United States Patent Application Publication US 2024/0131193 A1 - sequence listing, part 14

SEQ ID NO: 26550 - DNA, 2352 bp, synthetic construct
  source 1..2352: mol_type = other DNA; note = Synthetic coding sequence
atggccaagtacaacaccggcggcaaccccaccgaggacgtgagcgtgaacagtcgaccgtttcgcgtcacaggacctaacagcagctctggtattcaggcaagaaagaatttgtttaataatcagggaaacgccagtccacccgctgggccctcaaacgttccaaaatttggatctccaaaacctccagtggccgtaaaaccatcatcagaagagaaaccagacaaggagcccaagccacctttcctgaagccaacaggcgctggccagcggtttggaactcctgccagtcttaccacccgtgacccagaagcgaaagtggggttccttaagccggtcggacctaagccaatcaacttacctaaggaggacagtaagcccacttttccgtggcctcctgggaataagccctccttacacagcgtaaaccaagatcacgatctgaagccactgggacccaaatctgggcccaccccccctacctcggaaaacgagcagaagcaggcctttccaaaattaacaggcgtgaagggcaagttcatgtctgcgagtcaggacctggagccaaaaccacttttccctaaacccgcctttgggcaaaaacctcctttgtcaactgagaactcacatgaggacgagagtccgatgaagaatgtttcctcaagtaaaggtagcccagctcccctcggcgtccgatcgaagtcgggccccctgaagcctgccagagaggattccgaaaacaaggatcatgcaggagagattagttcactaccctttccaggggtcgtgctgaagccagccgcaagccggggcggacccgggctctccaaaaatggtgaagaaaagaaagaggaccggaaaatcgacgctgcgaaaaacacctttcagagtaagattaaccaggaggaactcgcttccggcacccctccagcgagattccccaaggctcctagcaaactgactgttggcggaccatggggacagtcccaagagaaagaaaagggcgataagaatagcgccacacctaaacagaaacccctgcctccgcttttcacattaggtcccccccctccaaaacccaaccgccctcccaacgtggatttgacaaagttccataagactagcagtggcaacagcacttctaaagggcaaaccagctattcaaccaccagtctgcctcccccacctcccagccaccccgcttcgcagcctccgctgcctgcctctcacccttctcagcccccggtgccatctctcccccctcggaatattaaaccgccgttcgacctgaaatcaccggttaatgaggataaccaggacggcgtgactcactctgacggagctggtaatctggacgaagagcaagacagtgaaggagagacctatgaagatattgaggcgtcaaaggagcgagagaagaaaagggagaaagaggaaaagaaacgccttgaacttgagaagaaggagcaaaaagagaaagagaagaaagaacaggagatcaaaaagaaattcaaactgactggtcctattcaggtgatccaccttgcaaaggcttgttgcgacgtcaaaggaggaaaaaacgagttgagttttaagcagggcgaacagatcgaaattatcaggatcacagataatccggagggcaaatggctcggcagaaccgcgagagggtcttacggctatattaagacgacagcggtcgagattgattatgattccctcaagctgaaaaaagactccctcggcgctccgtctcgtcctattgaggatgaccaggaggtctatgacgatgtcgccgagcaggacgatattagcagccattctcagagtggatccggcggcatcttccctcctccaccagacgatgacatttacgatggtattgaagaggaagatgccgacgatggcttccctgctccgcccaaacaactagatatgggagacgaggtgtacgacgacgtcgacacctctgactttccggttagttcagccgagatgtcccagggcaccaacgtgggcaaagcgaaaactgaggagaaggatctgaaaaaactcaagaagcaggagaaggaggaaaaggatttccggaagaagttcaagtacgacggggaaatcagggtcctgtactcgaccaaggttaccacctctatcacgtcgaaaaagtggggcacccgcgacctgcaggtgaagcccggggaatccctggaggtgatccaaaccaccgacgatacgaaggtgctctgtaggaatgaagaaggcaaatacggctacgtcctcaggagctacctcgccgataacgatggagagatctacgatgatatcgctgatggctgtatttacgacaacgattag

SEQ ID NO: 26551 - DNA, 393 bp, synthetic construct
  source 1..393: mol_type = other DNA; note = Synthetic coding sequence
atgatgctgggcaccgagggcggcgagggcttcgtggtgaaggtgagagggctcccttggtcttgcagtgccgatgaggtgcagcgatttttttcagactgtaaaatccaaaatggcgcccagggcatacgctttatctacaccagggagggaaggccgtcgggcgaggcattcgtggagctcgaaagcgaagatgaggtgaagttggcgctgaaaaaagaccgcgagactatgggccataggtacgtggaagtgtttaaatctaacaatgtcgaaatggactgggtcttgaaacacaccggcccaaattcacccgatacggcgaatgatgggttcgtccggctgagggggcttcctttcgggtgttctaaggaagagattgttcagttttag

SEQ ID NO: 26552 - DNA, 267 bp, synthetic construct
  source 1..267: mol_type = other DNA; note = Synthetic coding sequence
atggaggccgacatcatcaccaacctgcggtgccggctgaaggaggcagaggaggagcgactgaaagccgcccagtacgggttacagctcgtcgaatctcagaacgagctgcagaaccagctagataagtgtaggaacgagatgatgactatgacggaatcatatgaacaggagaagtataccttgcagcgcgaagtagagctgaaatcccgaatgctggagagcttgagttgtgaatgtgaggcaattaagcaacaacagaaatag

SEQ ID NO: 26553 - DNA, 1902 bp, synthetic construct
  source 1..1902: mol_type = other DNA; note = Synthetic coding sequence
atgaaggccatcaagaagagcctgaccgaggaggagtacctgtaccttgatttttcacaccagaccgaggggtgtatattccccttgcacaccagcgtaactttatttctactatcttactgcgattgtaagatattcaaaatctgcctagtggtaacgaaggaagttagtagagactcttccttactgagggatgatcttatccaggacgttgaaatccagatcatttctaggcaggagcttccacctatcgttcagaattgctgtctccccgcagtcgtggaaaggagcgacaatttctgtcgggccggcctggccgtggtgttaaggcacattattcagaaatcttatgaagcagacccactgaagaaggaattgctggaactgctgggattcaaaaagacctgccttaaggcctgcgcggaagtcagtcagtggacccgcttgtgtgaactgacaatcccccttgccatagagaacttccttcgcgaatcttccgaccagccccctacaattccggtcgagatcctgcagctggagaaaaagttgtctgagccagtgcgagtgcacaatgacgacaagttgcggcgacagaagctcaaacaacagaaggccgatggcgttggcccccccctgacaaaaggcaaggcaaaaagcaaggttcatacgcaggagacatccgagggcctggatagcagttcgaaatcactggagctcaaggtggcctttagcaaacttaccgtccaggaagaacccgccacaaccaatagagaacctagtcatatccggaaggctaaagcttccgatctgccgcctctcgaacacgtgttcgcagagggtctgtattttacgctggctgatatcgtcttgctcccctgtattcatcactttcttgttataatctcacgaaaattctccgaaaaacttgtcgaattcccactcctcgccagctggtatcaacgtattcaggaggttcctggcgttaagacagccgcctccaaatgcggaatacagttcttacacctaccaaagttgttgaccacgtccactgagcagcaccccaatctctgcgaggtgccaggagtggaggagcagtctgaccctctcttcatcggcggtccccgaccaaccatggcaaagctgatggaaaaaggaatcgaagtgatgttttctccacatccctgtccaacttggacgctggactggaacgttttaccagctgcggtgagcccaaaggaagggaaaatgagctcagacagggctctcagaaagcaacagcagctcaataatctggtgtacgtggtgaccaatcaggcaaagcctggtgatcggattgtcgatttttgttctggggggggccacgtgggtatcgtgctagctcacatgctgccatcttgccaggtgactctgattgagaacaaggaactgtcactgattagagccaagaagcgatccgatgagttgggtctgagtaatatatggttcatccaggctaacatggaatactttactgggatgttcaacattggcgtagctctccacgcatgcggagtggccactgacatggtgattgagcattgtatcaagacaagggcctcattcgtcacctgcccctgttgctacggatttatccagaacacatctaagttcaacttcccaaagtctgaacagttcaagaaaaccttatcctacaaggaacacatgatattatgccgctttgctgaccagactgcggtacagctaccgcctcaaagaagacttatcggcaaacaatgtatgtgcctggtcgatttggaccgggcccgagctgctgaggagtgcggttacagcgttcaggtaatttccatggaacctgagtcatgttctccaaagaacaatatgatcgtgggcgttccgatttag

SEQ ID NO: 26554 - DNA, 597 bp, synthetic construct
  source 1..597: mol_type = other DNA; note = Synthetic coding sequence
atggccaccggcgacctgaagcggagcctgcggaacctggagcaggtccttagactgctcaactatccggaggaagttgactgcgtgggactgatcaagggggatcctgctgcgtcactacccattatctcctactcatttacctcatactccccatacgtgaccgagctgattatggagtctaacgtagagttgatcgccaaaaatgatctgaggttcatcgacgctgtatataaacttttgagggatcagtttaattataagccaattctgactaaaaagcagtttatccagtgtggctttgcagagtggaagattcaaatcgtctgtgacatcctgaattgcgtgatgaagaaacacaaagagttgtcctctctgcagaaaatccccagccagcagcggaaaaagatcagtagcgggaagtccgagccaccactcggcaatgagaagatcagcgctgaggctgtaggcgtggacatatccggtcggttcatgacaagcggaaagaaaaaggccgtggtgatccgccatctttacaatgaagacaacgtggatatctccgaagacactctctctccaatcacggatgtaaattag

SEQ ID NO: 26555 - DNA, 336 bp, synthetic construct
  source 1..336: mol_type = other DNA; note = Synthetic coding sequence
atggtgatggagaagcccagccccctgctggtgggccgggagttcgtgaggcagtactatactttacttaacaaggccccagagtatctgcatagattttacggcaggaattcttcttacgtacatggcggtgttgatgctagcggcaagcctcaggaagctgtgtatggacaaaatgatatccatcacaaagtacttagcctgaatttttctgagtgccacacgaagattcgccacgtcgacgcacacgcaactttatcagatggagtcgttgtgcaggtaatgggattgctgagcaacagtggccagccagagagaaagtttatgcagacgtag

SEQ ID NO: 26556 - DNA, 681 bp, synthetic construct
  source 1..681: mol_type = other DNA; note = Synthetic coding sequence
atgagcagcccccgggacttccgggccgagcccgtgaacgactacgaaggaaacgattccgaggcagaagacctgaattttagagagacacttccgagttcctcccaggagaacactccccggtcaaaagttttcgagaacaaggttaactctgaaaaagtgaagttaagcctgcgaaactttccacacaatgactacgaggatgtcttcgaggagcccagcgagagcggctccgaccccagcatgtggacagctcgagggcctttcagaagagatcggtggagctcagaggacgaagaagccgccggacccagtcaggccctgagcccactgctgagtgacacaaggaaaatcgttagcgaaggggaactagatcaactcgcacaaattcggccactcatttttaattttcacgagcagactgccatcaaagactgcctcaagattctcgaggagaagaccgctgcttacgatatcatgcaggaattcatggctctggaactcaaaaatctcccaggcgagttcaactctgggaatcaaccatccaatcgcgagaagaacagatatcgcgatattctgccttttcagcaccatggctattccggtccaaacgagagaaccaccttttggcacggatccaatgaaggcgcagtttctttgttgctccggtattgtgcctag

SEQ ID NO: 26557 - DNA, 1872 bp, synthetic construct
  source 1..1872: mol_type = other DNA; note = Synthetic coding sequence
atgagcgacgaggtgttcagcaccaccctggcctacaccaagagccctaaggtgacaaaacggaccacatttcaggacgagctgatccgcgctataacggctcgcagcgcaaggcagcgtagctccgagtattctgatgattttgatagtgacgaaatcgtgtccctgggggacttttccgatacgtcagccgacgaaaatagcgtaaataaaaagatgaacgacttccacataagtgatgatgaggaaaagaatccaagtaaactactgtttctcaaaacaaataaatctaatggcaacatcacaaaggatgagccggtgtgcgccatcaaaaatgaggaggagatggcccccgatggctgcgaagacatcgtggtgaagtccttttccgagtctcagaataaggatgaggaattcgagaaggacaaaatcaaaatgaagccaaaacctaggattttgtcgattaaaagtaccagctcagcggagaataatagcctggacaccgacgaccacttcaaaccatctccacgacctcggtctatgctgaagaagaagagtcacatggaggagaaggacggattagaggacaaggagacggccctgagcgaggagctcgaactgcactcagcgccatcatcactcccaacacctaacggtatccagcttgaagcggagaaaaaagccttcagtgaaaatctggaccctgaggatagctgtcttacaagcctcgcaagcagtagtcttaagcagatactaggagattccttttcccccgggtccgagggaaatgcatccggaaaggcggatcatgtgactacagcggtggagaagtctaaagaatcccaggtaacagcagacgaccttgaggaagagaaagcaaaggctgaactgatcatggacgacgaccgcaccgtggatcctctgctgagcaaatcccagtcaatccttatctccacgtctgcaacggccagtagcaagaaaaccattgaggatagaaacatcaaaaataagaagtctactaataatagggcaagcagcgcctccgcacggctcatgacgtccgagttcttaaagaagtcgagtagcaagaggcgaacacccagcactactacttccagccattacctgggaaccctgaaggtgctagatcaaaagccttcacagaaacagagcatagagccagatcgagcagataatataagggcagcagtgtaccaggaatggctggaaaagaaaaacgtatacttacacgagatgcatcggatcaagcgcatagagtcagagaacctgcgcattcagaatgagcagaagaaagccgcaaagagggaggaagccctggcatctttcgaggcgtggaaagccatgaaagagaaagaagccaaaaaaatcgccgcaaaaaagaggttggaggaaaaaaacaaaaagaagaccgaggaagagaatgctgcccgcaagggggaggcacttcaagctttcgagaagtggaaggaaaagaaaatggagtacctaaaagagaagaatcggaaagaacgtgaatatgagagagctaaaaaacaaaaagaagaggagacggtagctgagaagaaaaaggacaatcttaccgccgtggagaaatggaatgaaaagaaggaggcattttttaagcagaaagaaaaagagaaaatcaacgagaaaagaaaggaggagctgaagagagccgagaagaaagacaaggacaaacaggccatcaatgagtacgagaagtggttggaaaacaaggaaaagcaggaacgcatcgaacgcaagcagaaaaagcgacactcatttctggagtccgaagctctaccaccttggtcaccgccttcacgcactgtgtttgccaaggtgttctag

SEQ ID NO: 26558 - DNA, 255 bp, synthetic construct
  source 1..255: mol_type = other DNA; note = Synthetic coding sequence
atgatgctgggcaccgagggcggcgagggcttcgtggtgaaggtgaggggcctgccttggtcctgttccgctgatgaggtgcagcggttctttagtgattgtaaaattcagaatggagcacagggcattcgatttatatacacacgcgaaggcaggccatccggggaagctttcgtggagctcgagtcagaagatgaagttaaactggcattgaagaaagaccgggagactatggggcaccggtacgtggaatag

SEQ ID NO: 26559 - DNA, 993 bp, synthetic construct
  source 1..993: mol_type = other DNA; note = Synthetic coding sequence
atggaccagggcgacacccccaccctggaggaggacctgaagaagttacagttaagcgagttcttcgatatttttgagaaagagaaggtggacaaggaagcattagcactctgtaccgaccgagacctgcaggaaattggaatacctctgggccctcggaagaagattttaaactattttagcacgagaaaaaattccatgggcatcaaacggcccgccccccaacccgcatcaggcgctaatatcccaaaagagagtgaattttgctctagttccaacactagaaatggcgactatttggatgtgggcatcggccaggtgagcgtcaagtatccgaggctcatctacaagcctgaaatcttttttgcgtttggaagcccgattggaatgttcctgactgtgcggggactgaagagaattgatcccaattatagattcccaacctgtaagggcttttttaatatctaccacccctttgatccagtggcctatcgtatagagcccatggttgtcccaggagtcgaattcgagccaatgctcattccccaccataaagggcgaaagcggatgcacctggagctcagggagggcttgacgagaatgtctatggatcttaaaaacaatctcctcggtagcctccggatggcctggaaaagctttacacgggccccctacccagcactgcaagcatccgaaacaccagaagagactgaggccgaacccgagtctaccagcgagaagccgtctgatgtaaatacagaagagacaagcgtggctgtgaaagaggaggttcttcccatcaacgttggtatgcttaacggcggacaacgaatcgattacgtacttcaggagaagccgatagaaagctttaacgaatatctattcgcgctccagagccacctctgttactgggagtcggaagacactgtacttctggttctaaaggagatctaccagacacaaggtatctttcttgaccagccccttcagtag

SEQ ID NO: 26560 - DNA, 1383 bp, synthetic construct
  source 1..1383: mol_type = other DNA; note = Synthetic coding sequence
atggacagcgagctgatgcacagcatcgtgggcagctaccacaagccaccagagcgggtgtttgtacctagcttcactcagaacgaaccttctcagaattgtcacccagccaatttggaggtgacctccccaaagatcctgcatagccccaattcacaggctttgatcctggctttgaaaaccttgcaggagaagattcacagactcgaactagaaaggacacaggctgaggataatctgaacattctctccagagaagctgcccagtataaaaaagctctggaaaatgagacgaacgaaagaaatttagcgcatcaggaactgatcaagcagaaaaaggacattagcatacagctgtcgagtgcacaatccagatgcacactcctggaaaaacagctggagtatacaaaacgtatggtgctcaatgttgagagggagaagaatatgatactggaacagcaggcccagctgcagcgggaaaaagaacaggatcagatgaaactgtacgccaagttagaaaaactggacgtcctagaaaaggaatgctttcgcctgactaccacccaaaaaacggcagaggataaaataaaacatctcgaggaaaaactgaaggaagaggaacaccaaagaaaattgttccaggacaaagcctctgagctgcaaaccggcttggaaatttctaaaattataatgtcttctgtaagtaatttgaaacactctaaagagaaaaaaaagtcttctaagaaaacaaaatgcatcaaacgccggcctccgtggcagatttgttcgaagttcggggcgctcccctttgtggccgaaaaaatgaggcaacatcgcgatccacacatcctacagaagcccttcaatgtgacagaaacaagatgcctccccaagccaagccgtaccacttcctggtgtaaagctatccctcccgactccgagaagagcatctccatttgcgacaatctgtcagagctgctgatggccatgcaagatgagctggatcagatgtcgatggaacatcaggagctcctaaagcagatgaaagagaccgagagtcatagcgtttgtgacgatatcgaatgtgagctggagtgtctgctgaaaaagatggagataaaaggggagcaaataagtaaattgaaaaaacaccaggattccgtgtgtaagctgcagcagaaggtccagaattcaaagatgtctgaagccagtggcatccagcaagaggatagctatccgaaaggcagtaaaaacatcaaaaactccccacgcaagtgtctgactgacacaaatctctttcagaagaacagcagctttcacccgatacgagtgcataacctccagatgaaactgagacgagatgacatcatgtgggagcagtag

SEQ ID NO: 26561 - DNA, 1068 bp, synthetic construct
  source 1..1068: mol_type = other DNA; note = Synthetic coding sequence
atgaccggcagcgccgccgacacccaccggtgcccccaccccaagggcgccaagggcacaagatccaggagttctcacgcccgtccagtgagcctggctacaagcggcggttccgaagaagaggacaaggacggcggagttctgttccatgtcaacaaaagcggttttcccatcgattctcacacgtgggagcgcatgtggatgcacgtggcaaaggtacaccctaaaggcggagaaatggttggcgccatccggaacgcagcattcctcgccaaaccatcgataccccaagtacccaattacaggttatcaatgactataccggactggctccaggccattcagaactatatgaaaactctgcagtataatcatacaggcacgcagttttttgagatccgcaagatgaggcctctgtcagggctgatggagacagcaaaggagatgacccgagagtccttacccattaaatgtttagaggcagtaatactgggtatctacctgacaaatggtcagcccagcatcgaacggttccctatatcttttaagacctacttctctggcaactactttcaccatgtcgttcttggaatatactgcaacggcaggtacggtagcctcgggatgagtaggcgggctgaactcatggataaaccgttgacatttcgcaccctctctgatcttattttcgacttcgaagattcctataaaaaatatttacacaccgtgaagaaggtgaagataggactgtatgttccacatgagcctcatagcttccaacctatcgagtggaaacaattggtacttaatgtcagcaaaatgttgcgtgctgacatcaggaaggagcttgaaaagtatgccagagacatgaggatgaagatcctgaaacccgcatcagcccactcacctacacaggtgcggagccgtgggaaaagcctatcacctagacgacgccaggccagccccccacgacgcctcgggagacgtgagaagtctccggccttaccagagaagaaagtggcagacttatcaacactaaacgaggtcgggtatcagatcagaatctag

SEQ ID NO: 26562 - DNA, 384 bp, synthetic construct
  source 1..384: mol_type = other DNA; note = Synthetic coding sequence
atggccagcaaccacaagagcagcgccgcccggcccgtgagccggggtggggtggggctgactggacgccccccaagtggcataagacccctctcaggtaacatcagagtggccaccgctatgcctcccgggaccgcccgcccagggagccgggggtgcccaattggcactgggggggtcttgtcttcccagatcaaagttgcccatcggcccgtgacacaacagggcctgacaggcatgaaaactggaactaagggaccccagcggcagatcctggataagtcctattacctggggctgctccggagtaagatcagtgagcttactactgaggtgaacaagttgcaaaaaggcattgagatgtacaatcaggagaactcatag

SEQ ID NO: 26563 - DNA, 510 bp, synthetic construct
  source 1..510: mol_type = other DNA; note = Synthetic coding sequence
atgcacaagctgcagagcggcatcggccggctgatcctgaaggaggagatgaaggctcgcagctcaagctatgcagacccttggaccccaccacgttcctccacctcttcaagggaggctttgcacacggccggatatgagatgtccctgaatggtagtcctaggtcacattacttagctgattccgatccacttataagtaaatccgcttccctgcctgcataccgaaggaacgggctccaccggactccctctgctgatctgttccattacgattccatgaacgccgtgaactggggcatgcgggaatataagatctatccgtacgagcttctcctggttactacaaggggcaggaacaggttgcctaaggacgtggacaggacacgtttggagcggcatttgtcacaggaagaattctatcaggtattcggaatgaccattagcgagttcgatcgcttagccctatggaagcgcaacgaactcaagaaacaggccaggctgttttag

SEQ ID NO: 26564 - DNA, 144 bp, synthetic construct
  source 1..144: mol_type = other DNA; note = Synthetic coding sequence
atggccagcgtgctgagccggcggctgggcaagcggagcctgctgggtgcgcgagtgcttgggccttccgcctccgaagggccaagcgccgctcctcccagcgagccactgctggagggggctgccccccagccgtttacttag

SEQ ID NO: 26565 - DNA, 558 bp, synthetic construct
  source 1..558: mol_type = other DNA; note = Synthetic coding sequence
atggacgacagcatcaacaaccggttcagctacgtgacccacgaggacatctgtaactgttttaatggcgacaccttgctggccatccaagcccccagcgggacccagcttgaagtgcctatacccgagatggggcaaaacggtcagaagaaatatcaaataaacctgaaatcacatagcggccctatccatgtcctgctgattaacaaggagagctccagttcaaaaccagtcgtatttccagtccctcctcccgatgatctgacccagccaagttctcagagtctcacccctgtgacacctcagaagagctctatggcaactcagaaccttcctgagcaacacgtttcggagaggagccaggcattgcagcagacctcggctacagacatctcttctgcgggtagcatttcgggagacatcatcgacgaattgatgagctcagacgtctttcctctgctgcgcttatcccctacccctgccgatgactataactttaatctagacgacaacgaaggtgtgtgtgacctattcgatgtgcagatcttgaactactag

SEQ ID NO: 26566 - DNA, 492 bp, synthetic construct
  source 1..492: mol_type = other DNA; note = Synthetic coding sequence
atgcccagcatcaagctgcagagcagcgacggcgagatcttcgaggttgatgtggaaattgctaaacaaagtgttacaatcaagaccatgctcgaggatcttggcatggatgacgaaggggacgacgacccagtccccttgcccaatgtgaatgccgctattttgaagaaggtgatccagtggtgcacacaccacaaggatgacccacctccacccgaggacgatgaaaataaggagaagcggactgacgacatcccagtgtgggaccaagaatttctaaaagtggatcaggggacactctttgaactgattctggcagcgaattacctggatataaagggcctcctcgacgtgacatgcaagactgttgcaaatatgatcaagggaaagacccccgaggaaatacgaaagacttttaatattaaaaacgacttcacagaagaagaagaggcacaggtcaggaaggaaaaccagtggtgcgaggaaaagtag

SEQ ID NO: 26567 - DNA, 915 bp, synthetic construct
  source 1..915: mol_type = other DNA; note = Synthetic coding sequence
atgagcaagcggcggcggctgaagcagggcgagcccatcatgaccggcaaaacacagacgagcaatgtaactaataaaaatgatccaaagagcatcaacagtagagtgtttattgggaacctgaatacagccatagtgaagaaagtagacatagaggcgatctttagcaaatacggcaagattgtgggctgctccgttcacaaaggatacgcctttgtgcaatatatgtctgagagacacgcgcgggctgctgtagccggcgaaaacgcgcgcgtcatcgcaggccaaccactggatatcaacatggccggtgagccaaagccctacaggcctaagccaggtaataagcggcccttgtctgctctgtacaggcttgaaagtaaagagcctttcttgtcggttggaggatatgtgttcgattatgactactatagagacgatttctacaatagactgttcgattaccacggcagagtgcctcctcccccacgcgccgtgatcccactaaagaggccccgggtggcggtcacgacaacaagacgcgggaagggagtgttttcaatgaaaggagggtccagaagcacagctagtggcagcactggctctaagctaaagtcagatgagttacagaccattaagaaggagctgacccaaattaagaccaaaattgactcactcctgggtcggttagagaagattgagaaacagcagaaggcggaggccgaggcccaaaagaaacaactggaagaatctctggttctgatccaggaagagtgcgtatcagaaatcgcagaccattctaccgaggaacctgccgagggagggccagacgccgatggggaggaaatgacagacggcatcgaagaggattttgatgaagacggcggacacgaactcttcttgcagataaagtag

SEQ ID NO: 26568 - DNA, 405 bp, synthetic construct
  source 1..405: mol_type = other DNA; note = Synthetic coding sequence
atgcccagcgccgaggccaagctgaagaagaaccggtgcgccaactgcttcgattgccccggatgcatgcacactctgagtactagggccacttcaatctccactcagttgccagacgatcctgcgaagacaacaatgaagaaggcatactacctggcctgtggtttctgtaggtggacatcaagagatgtcgggatggcggacaaatccgtggctagtggtggatggcaggaacctgagaaccctcatacccagcggatgaataagctgatagagtattaccagcaacttgcgcagaaggaaaaggttgagcgcgacagaaagaagctggcgagacggaggaattacatgcctcttgcttttagcgataagtatggtctgggaacaagactgcaacggccctag

SEQ ID NO: 26569 - DNA, 1230 bp, synthetic construct
  source 1..1230: mol_type = other DNA; note = Synthetic coding sequence
atgtggcgggtgatcgagcccccctgccccggcgcccccagcaccgagaacggtaagagcgttcattggaaactcggggcagataaggaggtatgggtgtgggtgatgggtgagcaccacctggacaaaccgtatgacgtcctttgcaacgagatcattgccgaaagggcccgcctgaaagcagaacaggaggcggaggagcctaggaaaactcacagcgaagaattcaccaactctctgaagactaagagtcagtaccacgacctgcaggctcccgataatcagcagacgaaggacatctggaagaaggtcgcagaaaaagaagagctagaacagggatctagacctgcacctaccctggaagaagaaaaaataagatcgctttcaagctcctcacggaacattcagcagatgttggccgacagcataaatcggatgaaagcatacgctttccaccagaaaaaagaatccatgaaaaagaagcaggacgaagagatcaatcagattgaagaagagcgcactaagcagatttgcaagtcgtggaaggaggactctgagtggcaggccagtctgagaaagtccaaagctgctgacgagaaacgaaggagtctggccaagcaagcccgggaggactataagcggctctccctgggagcacagaaggggcggggcggagaacgactgcaatctcccctgcgcgtgccacagaagccagaaagacccccactgcccccaaaaccccaatttttgaactccggtgcctatccacagaagcctctgaggaaccaaggcgtggtgcgaaccttgtcttccagcgctcaagaggatattatccgctggtttaaagaagagcaactaccacttcgtgctggctaccagaagacttccgacactatcgctccctggtttcatgggatcctcacgctcaagaaagcaaatgaactgttactttccactgggatgccaggaagctttctgatccgcgtgagcgaacgcataaagggctatgcactgtcctacctgtccgaagacgggtgcaagcacttcctgatcgacgccagcgcagacgcctatagcttcctgggcgtcgaccagttacagcacgctactttggctgatcttgtcgagtaccataaggaggaacctatcaccagtctgggtaaagagttactgctctacccctgcggtcaacaggatcagctccctgactacctcgagctctttgagtag

SEQ ID NO: 26570 - DNA, 390 bp, synthetic construct
  source 1..390: mol_type = other DNA; note = Synthetic coding sequence
atgagcgacaagagcgacctgaaggccgagctggagcggaagaagcagcggttggcgcagatacgtgaggaaaagaagaggaaagaggaggaacggaagaaaaaagaggccgacatgcagcaaaaaaaagaacctgtgcaagatgactctgatcttgaccgcaaacggcgcgagacggaagcgctgttgcaaagcattggcatcagccccgagccacctctggtgccaacccccatgtcgccgtcgtcgaagtctgtgtcaacgccctcggaagccgggagtcaagacagcggcgatctcggtcctctgaccagaaccctgcagtgggacaccgatccttcagtgctgcagctgcaaagcgattcagagctcggctacatgtccgcctag

SEQ ID NO: 26571 - DNA, 780 bp, synthetic construct
  source 1..780: mol_type = other DNA; note = Synthetic coding sequence
atggtgggccgggagaaggagctgagcatccacttcgtgcccggctcttgtaggctcgtagaagaggaagtgaacattcctaataggagagtgctcgttacgggagctactggactcctgggccgagcggtacacaaagaatttcagcaaaacaattggcatgctgtggggtgcggtttccggcgcgcacggcctaagttcgaacaagtcaacctgcttgattccaacgccgttcatcatattatccacgactttcaaccacatgtcattgtgcactgcgcggccgagaggaggcccgatgtggtggaaaaccagcccgatgctgctagtcaattgaacgtggacgcctccggcaacctggccaaagaggccgccgcagtgggcgcctttctcatttacatttctagcgactatgtgttcgatggaactaatcccccataccgggaggaggacatccccgctcccttgaacctttatgggaagacaaaactggatggggagaaagctgttctggaaaataaccttggggccgctgtgttaagaattcctatactgtacggtgaagtggagaaactggaagaatccgcagtgacagttatgttcgacaaagtccagttttcaaacaagtcggcaaatatggaccattggcagcagagatttcccactcatgtaaaggacgttgctacagtgtgtcgacagttagccgagaagcgcatgctggtgcgcagaataccagaatcctgtctctctgaggggcctctgtgcctcttccacgcttag

SEQ ID NO: 26572 - DNA, 549 bp, synthetic construct
  source 1..549: mol_type = other DNA; note = Synthetic coding sequence
agctacgacagcaccttcagctacgtgacccacgaggacatctgcaactgctttaatggagatacccttctggccatccaggctcccagtgggacacagttggaggtgccgattccagagatgggtcagaacggtcagaagaaatatcaaattaacctgaaatcacactctggtcctattcatgtgctactcattaacaaagagtctagcagctcaaaacccgtcgtatttcctgtgccccctccagacgacctgactcagccaagttctcagagcctcacccctgtcacacctcagaagagctctatggctactcagaatttaccagagcaacacgtgtctgaaaggagccaggcactgcagcagacgtccgccacagacatatcctcagcaggcagtatttccggcgacatcatagatgagctgatgtcctcagacgtctttccgctattacgactgtctccgacacccgcagacgattataattttaatctcgacgataatgaaggcgtgtgcgacctgttcgacgttcaaattctcaattattag

SEQ ID NO: 26573 - DNA, 162 bp, synthetic construct
  source 1..162: mol_type = other DNA; note = Synthetic coding sequence
atggacagcgagctgatgcacagcatcgtgggcagctaccacaagccaccagaaagggtcttcgtgccctcctttactcagaacgagcctagccagaactgtcatcctgctaaccttgaagtgacttccccgaagatcctccactctccaaactcacagtag

SEQ ID NO: 26574 - DNA, 3018 bp, synthetic construct
  source 1..3018: mol_type = other DNA; note = Synthetic coding sequence
atggccggcgccctgcggcggggccgggccctgggcagccggcccagcggccctactgtgagtagccgcaggagtcctcagtgccctgtggcccaggaaggcctgggagccaggtctcgaccccgcgtagccccccgctcccttgcacgatgtgggccctcatctaggcttatgggatggaaaccaagcgaggccaggggccagtctcagtccttccaggcttccggacttcaaccgcgatccttgaaggcagcgcgcagggctacaggccggcctgaccgatcccgagccgccaggcccactatggatccgtccgcccataggagccgggccgctccccctaatatggatccggatccacaggcaggtgtgcaagttggaatgagagtggtccgtggggtcgactggaagtgggggcaacaagacggcggcgaagggggggtcgggacagtcgtggagcttgggagacatggatcgccatctactccagataggaccgtggtggttcaatgggaccaggggaccagaaccaactacagagctggctaccagggggcgcacgaccttctcctctacgacaatgcccaaattggcgtgagacaccccaatattatctgcgactgctgcaagaaacacggcctgcggggtatgaggtggaagtgtagggtttgtcttgactatgatctgtgcacgcaatgctatatgcataataagcatgaacttgcccatgcctttgatagatatgaaacagcacactccagacctgtcaccctgtcacctcgtcagggtctgccccggatcccccttcgcgggatcttccagggagccaaagtagtgaggggtcccgattgggagtggggttcgcaggacgggaaacctgctgaacttcagaggcgcgtgtccgccgatagccagccctttcaacacggagacaaagtgaaatgtcttctggacaccgacgtgttgcgggagatgcaagagggccacggcgggtggaacccacggatggccgaattcatcggccaaacagggacggtgcacaggatcacggacagaggtgatgttcgtgttcagttcaatcatgaaactagatggaccttccacccaggcgcattaactaagcaccacagcttctgggtgggcgacgtagtgagagtgattggggaccttgacacagtgaagagactgcaggcaggccacggagagtggaccgacgacatggctcctgcactgggccgtgttggtaaggtggtaaaagtgttcggagatggcaaccttagagtcgccgtcgcaggccagcgttggaccttttcaccatcgtgcctggttgcatatcgtcctgaggaggacgccaacctggatgttgctgagagggccagagaaaataaaagctccctgtctgtcgcacttgacaaactgagagcccaaaagtccgacccggaacaccctggacgactggtagtcgaggttgccttagggaatgctgcccgcgctcttgatcttctcaggaggaggccggaacaggtggacacaaaaaaccagggccggaccgccctgcaggtcgcagcctacctaggacaggtggagctgattcgtctattactccaggcacgggccggggtggatctcccggacgacgagggaaacacggctcttcattatgccgcgttaggaaatcaacctgaggcgactagagtcctgctgtctgctggatgcagagccgatgccatcaactctacccagagtaccgccctccacgtggctgttcagaggggttttctcgaggttgtcagggcactgtgcgagcgcggttgtgacgtgaatctgcctgacgcccatagtgatactcctctgcacagcgccattagtgccgggaccggagcctctgggattgtggaagtgctcactgaagtccctaatatcgatgttactgccactaactcacagggattcactctgttacatcatgctagcttgaagggacatgctctagctgtgcgaaaaattctggcacgtgctcggcagctcgttgacgccaagaaggaggacgggttcactgctttgcaccttgctgctctgaacaaccaccgcgaagtagcacaaattctcattagagaggggaggtgtgacgtgaacgtgagaaatcgaaagcttcagtcacctctacatttagctgtacagcaggcgcatgtgggattggttcccctgctggtcgatgctgggtgtagtgtgaacgctgaagatgaggagggtgataccgcattacacgtggctctacaacgacatcagttgctccccctggtggcagacggggccgggggagacccagggcctctgcaactcttaagtaggttgcaggcttcaggtcttcccggtagcgcagaactcaccgtcggagccgccgtagcttgctttttggccttggagggagccgacgtatcatacaccaatcaccgaggcagatccccccttgatctggccgccgaggggcgggtcttgaaagcccttcaggggtgcgcacagcgctttcgcgagcgccaggcgggaggtggtgcggcaccaggccccaggcagacactaggcacgcctaacaccgttacaaatctgcacgtgggtgccgcacccggcccagaggccgcggagtgtctggtgtgctctgagctggctctccttgtcctgtttagcccctgtcagcacaggacggtttgtgaggaatgtgctcgacgcatgaaaaagtgcatccgctgtcaggtggtggtgtccaagaagctcaggccagatggctctgaggttgctagcgccgcacccgctccaggaccaccacgccaattggttgaggagctgcagagtcgttaccgtcagatggaggagaggataacctgtccaatttgcatcgactcccacatcagactggttttccagtgtggccatggagcatgcgccccctgtggctctgccttgagcgcgtgtccaatctgcagacagcccattcgtgacagaattcagatctttgtgtag

SEQ ID NO: 26575 - DNA, 294 bp, synthetic construct
  source 1..294: mol_type = other DNA; note = Synthetic coding sequence
atggccagcagcgccgagctggacttcaacctgcaggccctgctggaacagctatcacaggacgagctgagtaaatttaaatctttgatacggaccataagtttggggaaggagctacaaaccgtgccccagaccgaagtggacaaggcaaatgggaaacaactcgtagaaatttttaccagtcactcctgctcttactgggccggtatggccgcgatacaggtgttcgaaaagatgaaccagacacacctctcaggacgggccgatgaacactgcgtaatgccccccccgtag

SEQ ID NO: 26576 - DNA, 693 bp, synthetic construct
  source 1..693: mol_type = other DNA; note = Synthetic coding sequence
atggacagcgagctgatgcacagcatcgtgggcagctaccacaagccaccagagagggtctttgtacctagctttacacagaacgaaccctcacagaattgccaccccgcaaatctggaagtgacctcccccaagatactgcactcaccaaattctcaggcactgattctggcactcaagacactccaggagaaaatccaccggcttgaattggaacgtacgcaagctgaggataacctgaacattttgtcgcgcgaagcagcgcaatacaagaaggctctggaaaatgaaaccaatgagaggaatcttgcccaccaggagcttatcaagcagaagaaggacatctctattcagctgagctcagcccagtcccgatgtacactcctagaaaagcaactcgagtatactaaaaggatggtcttgaatgtggagcgcgagaagaatatgatcctcgagcagcaagcccagctgcagagagagaaagaacaggatcaaatgaagctgtatgccaaactggagaaactggacgtgctcgaaaaggaatgctttcggctgaccaccactcagaagaccgcggaggacaagatcaagcacctggaggaaaagctgaaagaggaggagcaccagcgcaagctgttccaggataaagctagcgagctgcagactgggttggagatctctaagataatttag

SEQ ID NO: 26577 - DNA, 624 bp, synthetic construct
  source 1..624: mol_type = other DNA; note = Synthetic coding sequence
atggaccggggcgagcagggcctgctgcggaccgaccccgtgcccgaggagggagaggacgtggctgccaccatatcggcaaccgaaaccctgtccgaagaagagcaggaagaactcaggagggaactggctaaagtggaagaggaaatccagaccctgtcacaagtgctcgcagccaaggaaaagcatcttgcagaaatcaagcgtaaattaggtataaactcactgcaggaattaaagcaaaacattgcgaaggggtggcaagacgtaactgctacttccgcttataaaaaaacttccgagactctaagccaggccggtcaaaaagccagcgccgcgttctcttctgttggaagtgtcataacaaagaaactggaagacgttaagctgcaggccttttcccactcctttagtattcggagcattcaacactcaatcagcatgccagctatgagaaattcacccacattcaagagtttcgaggagaaggttgagaatctgaaatccaaagtcggcggcacgaaacctgccgggggagatttcggggaggtcctgaactccgcagcaaatgcaagcgctactacgacagagcccctccctgagaagacacaggaaagtctgtag

SEQ ID NO: 26578 - DNA, 387 bp, synthetic construct
  source 1..387: mol_type = other DNA; note = Synthetic coding sequence
atgaagttcaaccccttcgtgaccagcgaccggagcaagaaccggaaacgacactttaatgccccctctcatgtaagaagaaagataatgagctcgcctcttagcaaggagctgaggcaaaagtataatgtgcggtcgatgcctatcaggaaggacgatgaagtgcaggtcgttagaggacactataagggccagcagatcggcaaggttgtgcaggtgtacaggaagaagtatgtgatttacatcgagagagtgcagagggaaaaagcaaatggcacaacagtgcacgtgggaatccacccttctaaagttgtcattacaaggcttaaactggacaaagaccgaaaaaagatcctggagcggaaagccaagagccggcaggtatag

SEQ ID NO: 26579 - DNA, 126 bp, synthetic construct
  source 1..126: mol_type = other DNA; note = Synthetic coding sequence
ggcctgaccaagcagctgctggacgacaccatcggcatccaccccacgtgcggggaggtcttcactaccctggagattactaaaagttccggcctggatatcacccagaaagggtgttgaggctag

SEQ ID NO: 26580 - DNA, 1365 bp, synthetic construct
  source 1..1365: mol_type = other DNA; note = Synthetic coding sequence
atgctgaagcagatcctgagcgagatgtacatcgaccccgacctgctagcagaactgtcagaggaacaaaaacagatcctcttcttcaagatgagggaggagcagatcaggagatggaaagaaagagaagcggcaatggagcgtaaggaaagcctgcctgtgaagcctcgccctaaaaaagaaaatgggaagtccgtacattggaagttgggcgccgacaaggaagtttgggtgtgggtcatgggcgagcaccacctagataagccctatgatgtcctttgtaacgagatcatcgctgagagagcgcgcctgaaggcagaacaggaggccgaagagccacgtaaaacacactctgaagagttcacaaatagccttaagactaagagccaatatcacgacctgcaggcccctgataaccagcaaacaaaggatatttggaaaaaagtggccgagaaggaggaactcgaacagggaagtaggcctgcccctactctcgaagaggaaaagattcgcagcctgtcatcctccagcagaaacatccaacagatgttagccgattcgattaaccggatgaaagcctacgccttccatcaaaagaaggagagtatgaagaagaaacaagacgaggagattaatcagattgaagaagaacggaccaaacagatctgcaagtcgtggaaggaggactccgaatggcaagcatctttaaggaagtcaaaagcagccgacgagaagaggcggagtctggccaagcaggcccgtgaggattataagcggctgagcttgggtgcccagaagggccggggaggggaacgccttcagagcccgctgcgagtgccacagaaacctgagcgaccacctctgcccccaaagcctcagttcctgaactccggagcctaccctcagaagccactacgtaatcagggagtcgttcgaacactctctagctccgctcaggaggatatcatacgttggttcaaggaggaacaactgcccctgcgcgccgggtaccagaaaaccagcgacactatagccccctggtttcacggcatcctcacgttaaagaaggcgaatgagctgctgctgtccacggggatgccgggttcgttcctcatacgggtgtcagaacggattaaaggctacgctttgagttatttgtcagaggacgggtgcaaacactttctcattgacgcttcagcggacgcatacagctttcttggagtggaccagctccaacacgccacactggcagatctggttgaataccacaaggaggagccgattacgagtctgggtaaagagctcttgctctacccatgtggccagcaggatcagttgcctgactacttggaattattcgaatag

SEQ ID NO: 26581 - DNA, 438 bp, synthetic construct
  source 1..438: mol_type = other DNA; note = Synthetic coding sequence
atgaagttcaaccccttcgtgaccagcgaccggagcaagaaccggaagcgccactttaacgccccatctcacgtgcggcggaaaattatgtcaagtcctctgagtaaggaattgagacaaaagtataacgttcgcagtatgccgattaggaaggatgatgaagtgcaggtcgtgagggggcactataaaggtcaacaaattggcaaagtcgtccaggtttatcgcaagaagtatgtgatttatattgaaagagtccaacgggagaaagcaaatggaaccaccgttcacgtggggatccatcccagcaaggttgttattacacggctgaaactggacaaggacaggaagaaaatattggagcgcaaagccaaatcaaggcaggtaggaaaagaaaagggaaaatacaaggaagagcttatcgagaagatgcaggaatag

SEQ ID NO: 26582 - DNA, 621 bp, synthetic construct
  source 1..621: mol_type = other DNA; note = Synthetic coding sequence
atggacagcgagctgatgcacagcatcgtgggcagctaccacaagccacctgaacgagtctttgtgccatcattcacacagaacgagccttcccaaaattgccaccccgctaacctggaagttacatctcctaagatcttacactcacctaattcccaggctttgatcctggcactgaagacactacaggagaagatccaccgtctggagctcgagcgcacacaggctgaagataacctcaacattttgtcccgcgaggcagctcagtataaaaaagccttagaaaatgagacgaatgagcgtaatctggcacaccaggagctgattaaacagaaaaaggacatctctattcagctgtcaagcgcccagtctcgctgcacattgctagaaaagcagttagaatacacaaaaaggatggtactcaacgtagagcgagagaaaaatatgattcttgaacagcaagcgcagctccaaagggagaaggagcaggaccagatgaagctgtatgcgaagctggagaaactcgacgtcctggagaaggaatgttttaggctcactaccactcagaagaccgccgaagacaagattaaacacctggaggagaagctgaaggaggaatag

SEQ ID NO: 26583 - DNA, 1050 bp, synthetic construct
  source 1..1050: mol_type = other DNA; note = Synthetic coding sequence
atggaggacccccagagcaaggagcccgccggcgaggccgtggccctggccctcctggaaagtcctcgacccgagggtggagaagagcccccccggccctcaccagaagaaacccagcagtgcaagtttgatggtcaggaaactaaaggcagcaagtttataaccagttcagcctcagacttttccgaccccgtatataaggaaattgccatcacaaatgggtgcattaaccgcatgagcaaagaggagctgagagcaaaactctctgagttcaaactggagactcgaggcgttaaggatgtcctcaagaagcggcttaaaaactactacaaaaaacagaagctgatgctcaaggaaagtaatttcgcagacagctactacgactatatttgcattatcgattttgaggctacctgtgaagaagggaaccctccagagtttgtgcatgagatcattgaatttccggtggtgctcctgaatacccacaccctcgaaattgaggatactttccagcagtatgtgcggcctgagattaacacgcagctgtcagacttttgcatatctctaacaggtattactcaagaccaggtggaccgagccgacacatttccacaggtgttgaaaaaggtcattgattggatgaagctgaaggagttaggaacgaaatacaaatactccttactaacggatggatcatgggacatgtcaaagtttctcaacatccagtgtcagttgtcccgcttgaaatatcctcccttcgccaaaaagtggataaacatccggaagtcatacggcaacttttataaagtccctcgcagccagacgaaactaacaattatgctcgagaaactgggaatggactacgatggaaggccgcactgcgggttggacgacagcaagaacatagctcgcatagcagttaggatgctccaagacgggtgtgaacttagaatcaacgaaaagatgcatgcagggcagctgatgagtgtgtcaagctctctgcccatcgaggggacccccccaccgcagatgcctcatttccggaagtag

SEQ ID NO: 26584 - DNA, 429 bp, synthetic construct
  source 1..429: mol_type = other DNA; note = Synthetic coding sequence
atgcccagcatcaagctgcagagcagcgacggcgagatcttcgaggtagatgtcgagatcgcgaaacaatcagtgacaatcaaaactatgctggaagatctgggaatggacgatgagggagacgatgatcctgtgcccctgcctaacgtcaatgcagccattctgaagaaggtgattcagtggtgtactcaccacaaagatgacccgcctccacccgaagacgatgagaataaggaaaagcggacagacgacattcctgtctgggaccaggagtttctgaaggtcgatcaagggacactgttcgagctgatcctggctgcaaattacctggatattaaagggttactggatgtaacttgtaaaacagtggccaatatgatcaagggaaagactcccgaagaaattcgcaaaacatttaacatcaagtag

SEQ ID NO: 26585 - DNA, 375 bp, synthetic construct
  source 1..375: mol_type = other DNA; note = Synthetic coding sequence
atgagcgccaccgtggtggacgccgtgaacgccgcccccctgagcggctccaaagaaatgtcccttgaagagcccaaaaaaatgaccagagaagactggcgtaaaaagaaagagctggaagagcaaagaaagctgggtaacgctcctgccgaggtcgacgaagagggcaaagacattaatccacatatcccccagtacatttcttcggtaccctggtatatcgacccaagcaagcgacctaccctgaaacatcagcggccccagccagagaagcaaaagcagttcagttcctctggcgaatggtataaacgcggagttaaggagaattccatcattacaaagtaccgcaaaggggcctgcgaaaattgtgggtag

SEQ ID NO: 26586 - DNA, 750 bp, synthetic construct
  source 1..750: mol_type = other DNA; note = Synthetic coding sequence
atggtggaccggctggccaacagcgaggccaacacccggcggatctccattgttgaaaattgctttggagccgcaggtcaacctctgacgatcccagggcgcgtacttattggcgagggagtgttgaccaaactctgccggaagaagccaaaagctcgacagtttttcctttttaatgatatccttgtgtatggtaacatagtgatccagaagaaaaaatacaacaaacagcacattattccgctggaaaacgtaactatcgactccattaaggatgagggcgacctacgaaatggctggctcatcaagactcccaccaaaagtttcgccgtctacgctgccacagctacagagaagagcgagtggatgaaccacattaataagtgtgtgactgacctgctcagtaaatccggcaagaccccctccaacgagcatgctgcggtgtgggttcccgattcagaagcaactgtctgtatgaggtgtcaaaaggcgaagtttacacctgtgaataggcgccaccactgtcgaaaatgcggattcgtcgtctgtgggccctgttccgagaagcgcttcttgctcccatctcagtccagtaaaccagtgcgtatttgtgatttttgctatgacttactcagtgcaggtgacatggcaacctgtcagccggctcgttcggattcctactcacagagtctgaagtcccccctgaatgatatgagcgacgatgacgacgatgacgattccagtgactag

SEQ ID NO: 26587 - DNA, 120 bp, synthetic construct
  source 1..120: mol_type = other DNA; note = Synthetic coding sequence
atgaagttcaaccccttcgtgaccagcgaccggagcaagaaccggaagcggcacttcaacgccccaagtcacgttcggcgtaaaatcatgagttcgccactgtctaaagagctgagatag

SEQ ID NO: 26588 - DNA, 1401 bp, synthetic construct
  source 1..1401: mol_type = other DNA; note = Synthetic coding sequence
atgggctggatcaccgaggacctgatccggcggaacgccgagcacaatgactgtgttatcttttccctcgaagagctgtctctgcatcagcaggaaatagaaaggctggaacatatcgataaatggtgccgggacctgaaaattctctatttgcaaaataatttaattggtaagatcgagaatgtgtccaaactcaagaagctcgaatacctgaatctggccttaaacaacatcgaaaaaattgaaaacctggaaggctgtgaggaacttgccaaactagatctgactgtgaactttattggagaattgtcctccattaagaaccttcagcacaacatccaccttaaggaattgttccttatgggcaacccctgcgccagtttcgaccactaccgtgaatttgtggtggcgactcttcctcaattaaagtggctggatggaaaagaaattgagccctcggaacgtataaaggctcttcaggattactctgtcatcgaaccccaaatcagagagcaggagaaagaccactgcctcaaacgcgccaagctgaaagaggaagcccagagaaaacatcaggaagaagataagaatgaagataagcgaagtaatgccgggttcgacgggcgatggtataccgatatcaacgccaccttgtcttcgctcgagtcaaaagaccacctgcaagcccctgacacagaggaacacaacacaaaaaagttggataactccgaggatgacttggagttttggaacaagccatgcttattcactcccgaatcccggcttgagacactgcgccatatggagaagcagcgcaagaagcaggagaagctgagcgagaaaaagaaaaaggtgaaacctcctcgtaccctcattacagaagacggcaaggctcttaatgtgaacgagcctaagatcgacttttcactcaaagacaacgagaagcaaatcatcctggatttggcagtttatcggtatatggacaccagcctcatagacgttgacgttcagcccacgtatgtcagagtgatgataaaggggaaacctttccaactggttctgccagccgaagtgaaaccggatagcagctctgcaaaacgcagtcagaccaccggtcacctcgttatctgtatgcccaaggtgggagaagtgataaccggcgggcagagagctttcaagtcaatgaaaacgacttccgatagatcccgggagcaaactaacacccggtcaaagcatatggagaagctagaagtggacccttccaaacacagctttccagatgtgacgaatattgttcaagagaagaagcacacacctaggcgtcgccctgagcccaaaatcatcccttctgaagaagatccaacctttgaagataacccagaggtgccccccctcatctag

SEQ ID NO: 26589 - DNA, 528 bp, synthetic construct
  source 1..528: mol_type = other DNA; note = Synthetic coding sequence
atggccagcaaccacaagagcagcgccgcccggcccgtgagccgggggggcgttggcctgaccggccggcccccatcaggtattcggcctctgagcggcaatattagggtagcaactgccatgcccccagggaccgcacggccgggctctcggggttgcccaatcggcacaggaggcgttctgagtagtcaaatcaaagttgcacatagacctgtgacacagcaaggtttgactggcatgaagacaggcacaaaagggccccagaggcagatcctggataagtcttactatctcggtttgttgcggtcaaagatttccgaactcactacggaggtgaacaagctgcagaaaggaatagagatgtacaaccaggaaaatagcgtatatctatcgtacgagaaaagggcagaaaccctggccgtggagattaaggaactgcagggacagctcgctgattacaatatgctcgttgacaagctcaacactaataccgagatggaagaagtgatgaatgactataatatgtag

SEQ ID NO: 26590 - DNA, 438 bp, synthetic construct
  source 1..438: mol_type = other DNA; note = Synthetic coding sequence
atgaagttcaaccccttcgtgaccagcgaccggagcaagaaccggaaaagacactttaacgccccttcacacgtccgcaggaaaattatgtcttcaccactgtctaaagaactcagacagaagtacaacgtgaggagcatgccgatcaggaaggatgatgaagttcaggtggtcaggggacattacaagggacagcagattggtaaggtggtgcaagtgtaccgcaagaaatacgtgatctacatcgagcgtgtgcagcgcgagaaggcgaacggcaccactgttcatgtcggcatccacccgtctaaggtggttattactagactcaaactggacaaggacagaaaaaagatccttgaaaggaaggcgaaatcccgccaagtgggtaaagagaagggcaaatacaaggaagaactgattgaaaagatgcaggaatag

SEQ ID NO: 26591 - DNA, 2136 bp, synthetic construct
  source 1..2136: mol_type = other DNA; note = Synthetic coding sequence
atgagcagcgtgcagagccagcaggagcagctgagccagagcgaccccagtccaagccctaatagctgcagcagtttcgagctgattgacatggacgcgggttccttatatgaacccgtgagtccccattggttctactgcaagatcatcgactccaaggaaacatggattccttttaactctgaggatagccagcaattagaggaggcctattctagtgggaaaggatgcaatgggcgcgttgttccgactgacgggggtagatacgacgtccatctaggggagaggatgcgatatgccgtttattgggacgaactggcaagcgaggttaggcgctgtacgtggttctataaaggagacaaggacaacaaatatgtgccttactcagagtcttttagccaggtcctggaagagacctacatgttggcggttaccctcgatgagtggaagaagaaactagaatctccaaacagagagataattattttgcacaatcccaaattaatggttcattatcaaccggtagccggttcggacgactgggggagcacacctaccgaacaaggccggccccggactgtgaagcggggagtggagaacatctcggtggatattcattgtggagaacccctgcagatagaccacttggtgtttgtcgtacacggtatagggcctgcctgtgacctccggttccggtcaattgtccagtgcgtgaatgacttccgtagcgtgtcactcaacctcctgcagacacattttaaaaaggcacaggaaaaccagcagatcggacgagtggagttcctccccgtgaactggcactccccactgcacagcacgggtgtagatgtagatttgcaacgcattaccctgccgagcattaaccggttgaggcatttcacaaatgataccattctggatgtgttcttctataactctcctacctattgccagacaatcgtggacactgtcgcgagcgagatgaaccggatttacacactgttcctgcaacgaaatccagacttcaaaggaggcgtcagcatcgctggacattctttgggctcacttatattgttcgacatcctaactaatcaaaaggattcactcggtgacattgacagcgagaaagatagcctaaacatcgtaatggaccagggcgacaccccgactctggaagaggatctcaaaaagctgcaactgagtgaattttttgacatttttgaaaaggaaaaagtcgataaggaggccctcgctctctgtacggatagagacctgcaggagattggcatccctctgggtccccggaaaaagatcctgaattatttcagcactcgaaagaactccatgggcatcaaaaggccagcgcctcagccggcaagcggggcaaacatcccgaaggaaagcgaattttgttcttcgtctaacacgagaaacggggactacctggacgtcggcattgggcaggtctctgtgaagtacccgcggctgatttacaagcctgagattttctttgcgttcgggtcccctatcggaatgttcttaacagtccgaggcctgaagcgcatcgacccgaactaccgcttcccaacatgcaaaggattcttcaacatctaccatccctttgaccccgtggcttacaggatcgaaccaatggttgtacctggcgttgaattcgaacctatgctcatcccacatcacaaaggccgaaagcgcatgcaccttgaactccgtgaaggcctaacacgcatgtctatggacctgaagaataatcttctaggaagcctgaggatggcatggaaatcattcacgagagccccttaccctgctttgcaggcgtcggaaacccccgaggagacagaagcagagccagagtctaccagtgagaagccctctgacgttaacactgaagaaaccagcgtggcggtaaaagaggaggtcttaccaattaacgtggggatgctaaacggggggcagcggatagattacgttctgcaggaaaagcctatcgagtccttcaatgagtatctgtttgccctgcagtcgcatctctgctactgggaatcagaggatacagtactgctcgttttgaaagagatttatcagactcagggaatttttctggaccagcccctacagtag

SEQ ID NO: 26592 - DNA, 471 bp, synthetic construct
  source 1..471: mol_type = other DNA; note = Synthetic coding sequence
atggccagcgtgctgagccggcggctgggcaagcggagcctgctgggagctagggtcctgggacccagcgcatctgagggacctagcgctgctcctccttctgagccactgctggaaggtgcagcaccccaaccatttacaacctcagacgacactccatgccaggagcagcctaaagaggtgctgaaggcccccagcacaagcgggctccagcaggtggcattccagccaggccaaaaagtgtacgtatggtatggcgggcaggagtgtaccggactggttgaacagcattcttggatggagggacaggttacagtctggcttctggaacagaagcttcaggtctgctgcagggtggaagaggtgtggctcgccgagctccagggcccctgtccccaggcaccccccctagaacccggcgctcaggcacttgcataccggccggtctccagaaacatagatgttccctag

SEQ ID NO: 26593 - DNA, 309 bp, synthetic construct
  source 1..309: mol_type = other DNA; note = Synthetic coding sequence
atgcccagcatcaagctgcagagcagcgacggcgagatcttcgaggtggatgtggagatcgctaagcaatctgtgacaattaaaacgatgctggaagatctgggcatggacgacgagggcgatgacgatccagttcctctgccaaacgtcaacgcagccatcctaaaaaaagtgatccagtggtgtactcaccacaaggatgaccccccccccccagaagatgacgagaacaaggaaaagagaaccgacgacatccccgtttgggatcaggaattcttaaaggtcgatcaagggaccttgttcgagtag

SEQ ID NO: 26594 - DNA, 465 bp, synthetic construct
  source 1..465: mol_type = other DNA; note = Synthetic coding sequence
atggccgacgacctggacttcgagaccggcgacgccggcgccagcgcaaccttccctatgcagtgttcggcgctgaggaaaaatggatttgtcgtgctcaaggggtggccttgcaaaattgtggagatgagcgcgtcgaaaaccggcaaacacggccatgccaaggtccatcttgtggggattgacatctttaccggcaagaagtatgaagatatttgcccttccacgcacaacatggacgtgccaaacatcaagaggaacgactttcagctgatcggcatacaggacggatacttatctcttctgcaagactctggtgaagtgccagaggacctccgtctccctgaaggcgatttaggtaaagagattgaacagaagtacgactgcggcgaagaaatattgataaccgtgctcagtgctatgaccgaggaggctgctgtcgcaatcaaggctatggcgaagtag

SEQ ID NO: 26595 - DNA, 306 bp, synthetic construct
  source 1..306: mol_type = other DNA; note = Synthetic coding sequence
atgagcgccaccgtggtggacgccgtgaacgccgcccccctgagcggaagcaaggagatgagcctggaagagccaaaaaaaatgacacgggaggattggaggaaaaagaaagagctagaggaacagcggaagttaggaaacgctccagccgaggtggatgaggaaggcaaggacatcaatccgcatattccacagtacataagcagcgttccttggtatattgaccctagtaagcggcccacccttaagcaccagcgcccgcaacccgaaaagcaaaagcagttcagcagctccggcgaatggtag

SEQ ID NO: 26596 - DNA, 3201 bp, synthetic construct
  source 1..3201: mol_type = other DNA; note = Synthetic coding sequence
atggccggcgccctgcggcggggccgggccctgggcagccggccctctggcccaaccgtcagttcaagacgatctcctcagtgcccagtggcccaagaaggactgggagcgagaagccgcccgagggtcgccccacgctccttagctcgatgtgggccaagcagtagactaatgggctggaagccttcagaggcccgcggccagtcacagtcctttcaagctagcggcctccagccaaggtctctgaaagctgctcgccgtgctactggccggcctgatagatcacgggcggcaagacctaccatggacccctccgcccatagatcccgggctgcccctccgaacatggaccctgacccacaggcaggcgtccaggtcgggatgagggtggtgcgaggcgttgattggaagtgggggcaacaggacggtggagaaggcggggtcggaacagtcgtggagctggggcgccacggtagtccctctacgcctgacaggacagtggtggtacaatgggatcaagggactaggacaaactatagagccggttaccaaggcgctcatgatcttctgctgtatgataacgcccaaattggggtgaggcatcccaacatcatttgtgattgttgcaagaagcatgggctaagaggcatgagatggaaatgcagggtatgtctcgattatgacttgtgtacgcagtgctacatgcacaacaaacacgagctggcacatgcctttgaccgatatgaaaccgcccacagcagaccagtcactctgagtccgagacaaggactgccacggatcccgcttcggggtatcttccaaggagccaaggtcgtgcgaggacccgattgggagtgggggtcccaggacggtggcgaggggaaacccggaagggtcgtcgacattaggggttgggacgttgagaccggccggtccgtcgctagtgtgacttgggcagacgggactacaaacgtgtatagagtcggacacaagggtaaggtcgatctcaagtgtgtgggggaggcggccgggggcttctactacaaggatcacctcccaaggctgggcaaacctgcggaactacagagaagggtgagcgccgacagccagcctttccagcatggggacaaggtcaagtgcctattggacacagatgtgctgcgtgaaatgcaggagggccacggcgggtggaatccacgcatggctgaaaccggaactgtgcatagaatcacagaccggggcgacgtcagggtgcagtttaaccatgagacaaggtggacgtttcatcccggagccctgactaagcatcactctttctgggttggggacgtggtgagggtcatcggcgatctggacaccgttaagagattacaggccgggcacggtgagtggactgacgatatggctccagccttgggaagagtaggaaaagtggtgaaagtgtttggtgatggaaatctgagagtcgcggttgcaggtcagagatggacatttagtccatcttgtctcgtcgcatatcgacctgaagaagatgccaacctggatgttgcagagcgggcgcgcgaaaataaaagctccttaagtgttgccctagataagctgagggctcagaagtctgatcccgagcatccaggccggttagtggtggaggtggccctcgggaatgcagcacgtgccctagacctgcttcggaggcgccccgagcaagtcgataccaagaaccagggccgtacagcccttcaagttgctgcctatcttggtcaagtcgaactgatcagactgttacttcaagcacgagctggcgtggacctgccagacgacgagggtaataccgccctacactacgccgccctgggcaaccagcctgaggcgaccagggtcctgttatctgctggatgtcgtgccgatgccatcaattccacccagagcaccgctcttcatgtcgccgtgcaacgtggcttcttggaggtggtgagagctctgtgtgaacgtggctgcgacgtcaacttacctgacgcccattccgatactcccctgcatagcgccatatcagctgggacgggagcctccggtatcgtcgaggtactaacagaagtgccaaacattgatgtgaccgccacgaattctcagggattcacgttactccatcatgccagtctgaaaggccatgcattagccgttaggaaaatactcgctcgagccagacaactagtggatgccaagaaggaagatggctttacggccctgcacttggcggcattgaacaatcacagagaagtcgcgcaaattctaattagagaagggagatgcgacgttaatgtacgtaacagaaaactccagagccctttgcacctcgcagtccagcaggcccacgtgggtctggtacctctgctcgtcgatgctggttgctctgttaacgccgaggacgaggaaggggatacagccttgcatgttgcgctgcagaggcatcaactcctcccactggttgccgatggcgccggaggggatccagggcccctacagcttttgtcgagactccaagccagcggtctccccggaagcgctgagttgacagtgggggccgcagtggcttgtttcctagcacttgaaggcgctgatgtgtcctacactaatcatagggggagatctccacttgatctggcagctgagggacgtgttttgaaagctctccagggatgtgcacagcgcttccgggaacgacaggccggcgggggtgccgctcccggcccacgccagacactggggacccctaatactgtgacaaatttacatgtgggtgccgcacctggcccagaggctgccgagtgtttggtttgtagcgaactggctcttctggtgctgttttccccctgtcagcacaggacagtttgcgaagagtgtgcccggagaatgaaaaagtgcattcgatgccaggtggtggtgtctaagaaactgaggccagacggaagtgaggttgccagtgcggcccctgctcccggtcccccccgacagctggtggaagagttgcagtcccgctatcgccagatggaggaaagaatcacctgtcctatatgtatcgattcacacatccgcctggtgttccagtgtggccatggagcatgcgcaccctgcggttcagctctttcggcatgtccgatttgtcggcagcctatacgggatcggattcagatcttcgtttag

SEQ ID NO: 26597 - DNA, 348 bp, synthetic construct
  source 1..348: mol_type = other DNA; note = Synthetic coding sequence
atgatgctgggcaccgagggcggcgagggcttcgtggtgaaggtgagaggacttccatggtcttgtagcgcagacgaagtgcagcgctttttctctgactgtaagatacagaacggggctcagggaatccggttcatatatacccgcgaggggagaccctccggcgaggcatttgtggaactggaatctgaggacgaggttaaactggctctgaagaaggatagagaaactatgggacaccggtatgttgaagtgtttaagtccaacaatgtggaaatggactgggtgctcaagcatacaggacctaacagccctgatactgccaacgacgggttcgttagactctag

SEQ ID NO: 26598 - DNA, 375 bp, synthetic construct
  source 1..375: mol_type = other DNA; note = Synthetic coding sequence
atggccagcgtgctgagccggcggctgggcaagcggagcctgctgggcgcgcgtgtgctgggaccgtctgcctctgagggaccgtcagccgccccccctagcgaacccttgttggaaggagcggcaccgcagcccttcaccacttccgatgacacaccctgccaggagcagcccaaagaggtgctcaaagcccccagcactagtggcctgcagcaggttgctttccagcccgggcagaaggtctatgtttggtacggcggacaagaatgtactggactagtcgagcaacatagttggatggaagggcaagtaacggtatggctactggagcagaaactgcaggtttgttgccgggtcgaggaagtctggctgtag

SEQ ID NO: 26599 - DNA, 438 bp, synthetic construct
  source 1..438: mol_type = other DNA; note = Synthetic coding sequence
atgaagttcaaccccttcgtgaccagcgaccggagcaagaaccggaaaagacacttcaacgccccgagccatgtcaggagaaagatcatgagctcaccacttagcaaagagcttcgtcagaaatataacgtcaggagcatgcctattcgcaaggacgacgaggtgcaggtcgtgaggggccactacaaaggccagcaaatcggtaaagtcgtgcaggtgtatcgcaaaaaatatgtgatatatatcgagcgcgtgcagagagagaaggccaacgggacgacggtgcacgtcggcattcatccttcaaaggtggtgataacccggttaaaattggacaaggatagaaagaagatattagagcgcaaagctaagtctcggcaggtggggaaggaaaaaggaaagtataaagaagaactgattgaaaaaatgcaagagtag

SEQ ID NO: 26600 - DNA, 339 bp, synthetic construct
  source 1..339: mol_type = other DNA; note = Synthetic coding sequence
atggacagcgagctgatgcacagcatcgtgggcagctaccacaagcctcctgagagggtgtttgtgccctcattcactcaaaacgagccttcacagaactgtcaccctgccaatttagaagtgacaagcccaaagatactacatagccccaattcacaggcattgatcctcgctcttaagactctccaggaaaaaatccacaggctggaactggagcgaacacaagccgaggataacttaaacatattaagtagggaggctgcacagtacaagaaagctttagagaatgagaccaacgagcggaacttagcacaccaggagctcatcaaacagaagtag

SEQ ID NO: 26601 - DNA, 345 bp, synthetic construct
  source 1..345: mol_type = other DNA; note = Synthetic coding sequence
atgcccagcgccgaggccaagctgaagaagaaccggtgcgccaactgtttcgattgcccaggatgcatgcacacactctcaaccagagccaccagcatttctactcagctgccagatgatcccgcgaaaaccactatgaaaaaggcgtattatctggcgtgtggcttctgtagatggacgagccgggatgtgggcatggccgataagtccgtggcatccggcggttggcaggaacccgagaacccacacacacagcgcatgaataaactgatagaatattaccaacagctcgcacagaaagagaaggtggagagagatcgcaagaagctcgccaggcgccggtag

SEQ ID NO: 26602 - DNA, 648 bp, synthetic construct
  source 1..648: mol_type = other DNA; note = Synthetic coding sequence
atgcccggcgaggccaccgagaccgtgcccgccaccgagcaggagctgcctcaaagtcaagcggagacaggatccggtactgcaagcgatagtggggagtccgtaccaggcattgaagagcaggattcaactcaaactacgacacagaaagcttggctggttgctgcagccgagatcgatgaggagccagtcggtaaagccaagcagtcaaggagcgagaaaagagctaggaaggccatgtcaaagttaggcctgcttcaggtgactggtgtgacaagagtcacaatttggaagtcaaagaatattttatttgtgattacaaaactggacgtttataaatcgccagccagcgacgcttacattgtgtttggagaagccaaaatccaggacctttcacaacaggcacaactggcagcagctgagaagtttcgcgtacagggggaggccgtaggaaatatccaggaaaatacccagacccctaccgtgcaggaagaatctgaagaggaggaggtggatgaaactggagtcgaagtgaaggatgtgaaactcgtgatgtcccaggcaaatgtttcccgcgccaaagcggtgcgtgccctcaaaaataattcgaacgacattgttaacgcaatcatggaactcacagtatag

SEQ ID NO: 26603 - DNA, 432 bp, synthetic construct
  source 1..432: mol_type = other DNA; note = Synthetic coding sequence
atgagcgccaccgtggtggacgccgtgaacgccgcccccctgagcggatccaaggaaatgtctctggaggagcctaagaaaatgacacgggaagattggaggaagaaaaaggagctggaagaacagcggaagcttggaaatgctcctgctgaagtcgacgaggaaggtaaagacatcaatccgcacataccccagtatatctcatccgtcccgtggtatatcgacccgagcaagaggcctacactcaagcaccagcgacctcagcctgagaagcagaaacagtttagttcatccggcgaatggtataaacggggtgtcaaggaaaattcgatcattactaaatacagaaaaggcgcttgcgagaactgtggagctatgacacacaaaaaaaaagattgtttcgaacgccctcgaagagtgggtgccaaatag

SEQ ID NO: 26604 - DNA, 567 bp, synthetic construct
  source 1..567: mol_type = other DNA; note = Synthetic coding sequence
atggccagcgtgctgagccggcggctgggcaagcggagcctgctgggcgctagagtgctggggccttctgcctcagagggaccctctgcagcacctccttctgagcccctccttgaaggcgccgctccccagccatttaccaccagtgacgacactccttgtcaggaacagcccaaagaagtactgaaggctcctagtacatcaggactgcagcaggttgcttttcagcccgggcagaaggtgtacgtttggtacggaggtcaagagtgtacaggcctggttgaacagcattcatggatggaaggccaggtgacagtgtggctacttgagcagaaactccaagtatgttgtagagtcgaggaagtgtggctcgccgagctgcaaggcccgtgtccccaggcacctcccctagaacccggtgctcaggccctggcctatcgccccgtctctcgaaatatcgatgtgcctaaaagaaaatccgatgccgtggagatggatgaaatgatggcggcaatggttttgacatcactgagttgctccccggttgtgcagagccccccaggctag

SEQ ID NO: 26605 - DNA, 87 bp, synthetic construct
  source 1..87: mol_type = other DNA; note = Synthetic coding sequence
atgatgctgggcaccgagggcggcgagggcttcgtggtgaaggtgagaggtttaccatggagttgtagcgctgacgaggttcagtag

SEQ ID NO: 26606 - DNA, 87 bp, synthetic construct
  source 1..87: mol_type = other DNA; note = Synthetic coding sequence
atggacagcgagctgatgcacagcatcgtgggcagctaccacaagcctccagaaagggtgttcgtgccttcctttacccagaactag

SEQ ID NO: 26607 - DNA, 1074 bp, synthetic construct
  source 1..1074: mol_type = other DNA; note = Synthetic coding sequence
atgggcggcgccgtgagcgccggcgaggacaacgacgacctgatcgataatctgaaggaggcccagtacattcggaccgagcgagttgaacaggcgtttagagccatagacagaggtgactactaccttgaaggctatcgcgataacgcttataaggacctagcatggaagcatggaaacattcacctgtccgccccatgtatctactcagaggtgatggaagcactgaagctgcagccagggctaagttttctgaacctgggctcagggaccggctacctgtcaaccatggtaggcctgattctgggtccgttcggcatcaaccatggaatagagctgcattccgatgtggtggagtacgctaaagaaaaactagaaagttttataaagaactccgacagcttcgacaagtttgagttctgcgagcctgcattcgttgtggggaattgcctgcagattgcttcggattcacatcagtacgaccggatttactgcggcgcgggggtccagaaagatcatgaaaattacatgaagatattgcttaaagtcgggggaatactggtgatgcctatagaggaccaacttacgcagataatgagaacaggccaaaacacttgggaaagcaaaaatatactcgcggtgtcctttgcacctttagtccagcctagtaagaacgataacggtaagccagactctgtgggacttccaccatgcgctgtccgcaacctgcaggatctagccagaatttatatccgtaggacactgaggaacttcatcaacgacgagatgcaggccaaagggataccacagcgcgctcctcccaagaggaaacgcaagagagtcaaacagaggatcaatacatacgtattcgtgggaaaccaactgattccccagcctctagacagtgaggaggatgaaaagatggaagaggataataaggaagaggaagaaaaggaccataatgaggccatgaaaccagaggaacccccacaaaaccttttgcgcgagaaaatcatgaagctgccactacccgagtcactgaaagcgtatctgacatattttcgagacaagtag

SEQ ID NO: 26608 - DNA, 483 bp, synthetic construct
  source 1..483: mol_type = other DNA; note = Synthetic coding sequence
atgcccagcatcaagctgcagagcagcgacggcgagatcttcgaggtagacgtggagattgctaaacaatctgttaccatcaaaactatgttggaggacctcggcatggacgatgagggtgatgatgatccagttcccctccccaacgtcaacgcagccattttgaaaaaagtgatccagtggtgcacccaccacaaggacgacccaccacccccggaagacgacgagaacaaagaaaagagaaccgatgatattcctgtctgggaccaggaatttctgaaggtggatcagggcacgctgtttgagctgattctagctgctaattacctggacatcaaaggactgctggatgtcacctgcaagacagttgctaacatgatcaaaggaaaaaccccggaagagatcaggaagacgttcaacatcaaaaacgatttcacagaggaagaagaggcccaggtggggtcaacgcagttttgcttatag

SEQ ID NO: 26609 - DNA, 342 bp, synthetic construct
  source 1..342: mol_type = other DNA; note = Synthetic coding sequence
atggacagcgagctgatgcacagcatcgtgggcagctaccacaagccccccgaacgagttttcgtgcctagttttacccaaaatgagccgtcacaaaactgccatcccgccaatttggaggtaaccagtccaaaaattctgcactctcctaattcccaggcgttaatcttagctttgaagactctccaggagaaaatccatagactagaactggaacggacacaggccgaggacaacctgaatatcctctcgcgggaggctgctcaatacaagaaagccttggaaaacgagaccaacgaacgcaatctcgctcaccaggagctgattaagcagaaaaaatag

SEQ ID NO: 26610 - DNA, 309 bp, synthetic construct
  source 1..309: mol_type = other DNA; note = Synthetic coding sequence
atggccagcgtgctgagccggcggctgggcaagcggagcctgctgggcgcccgggtgcttggcccctccgccagcgaaggcccttcagctgctccacccagtgagcctctgctagaaggcgcagcccctcagccatttaccaccagtgacgataccccctgccaagaacagccgaaagaagtcctaaaggccccttctacgtcaggactccagcaggttgcattccaacctggccagaaggtatacgtgtggtatggggggcaagagtgcaccgggctggtggagcagcacagctggatggaaggttag

SEQ ID NO: 26611 - DNA, 492 bp, synthetic construct
  source 1..492: mol_type = other DNA; note = Synthetic coding sequence
atgcccagcatcaagctgcagagcagcgacggcgagatcttcgaggtggacgttgaaattgccaaacagagcgtgaccattaaaacaatgctggaggacctggggatggacgatgaaggcgacgacgaccctgtcccactgcctaacgttaatgcagccattctgaaaaaggtaatccagtggtgtacacaccataaagatgatcctccccccccagaggatgacgagaataaggaaaaaaggacagatgatattccagtgtgggatcaggaattcctgaaggtggaccagggcacactgttcgagctgatactggcagccaattatttggacattaagggcttgttggacgttacttgcaagaccgtcgctaatatgatcaagggaaagactcctgaagaaattcgcaaaacattcaacatcaagaatgacttcacagaggaagaggaggctcaggtgcgtaaagaaaaccaatggtgtgaggagaagtag

SEQ ID NO: 26612 - DNA, 441 bp, synthetic construct
  source 1..441: mol_type = other DNA; note = Synthetic coding sequence
atgtgccccggcaactggctgtgggccagcatgaccttcatggcccgctttagtagatcaagctcacgctcacccgtcagaacacgcgggaccctcgaagaaatgcctactgtccagcacccctttctgaacgttttcgaactggaaaggctgttgtacacaggtaagacagcgtgcaaccatgctgacgaagtgtggccaggtctctatctgggcgaccaggatatggccaacaaccgaagagaactgaggagactcgggatcacccacgtgcttaacgcatctcattcccgctggcggggaacccctgaagcatacgaagggctaggcatacggtatctgggtgtggaggctcatgactcccctgccttcgatatgagtattcattttcagactgcggccgatttcattcaccgggccctgtcacagcccggcggctag

SEQ ID NO: 26613 - DNA, 1542 bp, synthetic construct
  source 1..1542: mol_type = other DNA; note = Synthetic coding sequence
atggccagcgtgctgagccggcggctgggcaagcggagcctgctgggcgccagagtgcttgggccttccgccagtgaaggcccctctgccgctccgcctagtgaaccccttctggagggcgcagctccacaacctttcaccacaagtgatgataccccttgtcaggaacagccaaaggaagtgttgaaggccccaagtacttctggccttcaacaagtagcctttcagccaggtcaaaaggtctacgtctggtacggtgggcaagaatgtactggacttgtggagcagcattcttggatggaaggacaagtcactgtctggcttctggaacagaaattgcaggtctgttgcagggttgaggaagtgtggctggcagagcttcaggggccgtgtccccaggcccctcctcttgaacccggcgcccaagccctcgcgtaccgcccagttagccggaatatcgacgttccaaagcgcaaatcagacgccgttgagatggacgagatgatggcagctatggtgctaacctcactgtcttgtagcccggtggtgcagtcccctcctggcacagaagcaaatttctctgcctctcgagctgcatgcgacccttggaaggaatcaggcgacatatccgattctggcagttccaccacaagtggacattggtccggctcttctggggtatccacgccttccccaccccacccgcaggcatctcccaaatatctgggtgacgcatttgggtctccacaaacggatcacggtttcgaaaccgatccagatcctttcctgctggatgagccggccccgcgaaagcgtaaaaacagcgtgaaagttatgtacaagtgtctttggcccaactgcgggaaggtgctgaggtctatcgtaggaataaaaagacacgtcaaagctctgcacttgggcgacacagtggattccgaccaatttaagcgcgaagaggatttctattatacggaggtccagctcaaagaggaatctgccgcagctgctgctgccgctgcagccggaactcccgtgcccgggacccctacgtccgaaccagcccccacacccagtatgacgggcttgccactgtccgctttgcctccaccacttcataaagcccaaagttcagggcctgagcacccgggtccagagtcaagccttccctctggggcactctctaaaagcgcgcctggttctttttggcacatccaggccgatcatgcttatcaggcacttccttcatttcaaattcccgtgagtccccatatctacacaagcgtgtcttgggctgcagcccctagcgcagcttgttcccttagtccagtgaggagccgcagcctcagcttttccgaaccccagcagcccgctcctgccatgaagagccacttgatcgtgacaagccccccacgcgcccagtcgggggcaagaaaggcccgcggcgaagccaaaaaatgtaggaaagtgtacggtattgagcacagagaccaatggtgcaccgcatgcaggtggaaaaaggcttgtcaacgctttctcgactag

SEQ ID NO: 26614 - DNA, 438 bp, synthetic construct
  source 1..438: mol_type = other DNA; note = Synthetic coding sequence
atggccgtgagcaccggcgtgaaggtgccccggaacttccggctgctggaagagctagaggaggggcagaaaggagtgggggatggcacagtgagttggggtctcgaagatgatgaggatatgaccctgacccggtggacaggcatgatcatcggcccaccccgtacgaattatgaaaaccggatctactctttgaaggtcgaatgtggccccaagtatcctgaagccccaccaagtgtcagatttgtgacaaagatcaacatgaatgggatcaacaacagttcagggatggtggacgcaagatccatcccagtacttgccaaatggcagaatagctattcaattaaagtagtgctgcaggaattaaggcgactcatgatgtccaaagaaaacatgaagctgcctcagccccctgaagggcagacctacaataattag

SEQ ID NO: 26615 - DNA, 1542 bp, synthetic construct
  source 1..1542: mol_type = other DNA; note = Synthetic coding sequence
atggccagcgtgctgagccggcggctgggcaagcggagcctgctgggggcacgggtgctgggacctagcgccagtgaagggccctcagcagccccccctagcgaacccctgcttgagggtgccgccccacagccattcaccaccagtgacgacacaccgtgccaagagcagccaaaagaggtgctgaaagccccatcgacgtctggattacagcaggtcgccttccagcccgggcagaaagtgtacgtgtggtacgggggccaggaatgcacaggtctcgtcgaacaacactcttggatggagggccaggtcacagtctggctcctggaacagaaactgcaggtgtgctgccgcgttgaagaagtgtggctcgcggagctacagggtccttgtccacaggcgccaccactagagcctggtgcacaggcactagcatatcggccggtcagcagaaacatcgatgtgcctaaaagaaaatcagatgccgtagagatggacgagatgatggcagcgatggtcctgacctcactatcctgctcccccgtcgtgcagagcccccctgggacagaggccaatttctctgctagccgggctgcctgcgatccttggaaagagtccggggatatctctgacagcgggagctctacaacaagcggacattggagcggatcctctggcgtgagcactccctctccaccacatccgcaagcgagccctaaatacttgggagatgcctttggtagcccacagacagatcacggattcgagacagacccagaccccttcctactggacgagcccgctcccagaaagaggaagaattcggtgaaggtaatgtataagtgtctgtggccaaattgcggaaaagtgttaaggtccattgtggggatcaagagacacgtcaaagcgctgcatctgggcgacacggtggactcagatcaattcaagcgagaagaagatttttactatactgaggtgcagctcaaagaggagagcgctgctgccgcggcagcagcagccgctggtaccccagtgcccggaacccccacctccgagccagctccaacaccatccatgaccggcctgcctctgtccgccctcccccctccactgcataaagcacagtcctctggtcccgagcacccgggaccggaatccagcctgcccagcggcgccctctccaaaagtgctccgggaagcttttggcacatccaggcagatcacgcctaccaagcactccccagctttcaaattcccgtgtcacctcacatttatacttctgtcagttgggcggccgccccaagtgcggcatgcagcctgtcacctgtcagatctcgatcactctcatttagtgagcctcaacagccggctcctgccatgaagtctcacttgatagtcacttctcctccgagagctcagagcggagccagaaaggctcggggagaggccaagaagtgtagaaaagtttacggaatcgagcaccgggaccaatggtgcactgcatgtagatggaagaaggcttgccagcgcttcctggactag

SEQ ID NO: 26616 - DNA, 57 bp, synthetic construct
  source 1..57: mol_type = other DNA; note = Synthetic coding sequence
atgcccagcatcaagctgcagagcagcgacggcgagatcttcgaggtcgatgtctag

SEQ ID NO: 26617 - DNA, 1935 bp, synthetic construct
  source 1..1935: mol_type = other DNA; note = Synthetic coding sequence
gtggccagcgagggcagcgtgcggcggcccagcggccccgtgcccgccccccagcctccggcctttcgcttcgtgagtaggcccggtagagcaaggtccgagagcgaaactctggagagatcaccaccacagagcccgggccctggaaaagctggggatgcaccaaacaggaggtcaggtcacgtccggggtgctcgggtcctgagcccaccaggcaggcgcgcccgcttgagctccccaggccctagtagaagctctgaggccagagaggaacttcggcggcacttagtggggctcatcgaaagatcccgagtggtgatcttctcaaaatcctattgcccccatagcacccgtgttaaggagcttttcagctccctgggggtagagtgtaacgtactggaattggatcaagtcgacgacggggcccgcgtgcaggaagttctgtcagaaattaccaatcagaagacggtgccaaatatcttcgttaataaggtgcatgtcggagggtgtgaccagacttttcaggcctatcagagcggcttgttgcagaaattactccaagaggacttggcatacgattatgatctgataatcatagggggcggctcaggggggctgtcttgcgcgaaggaagcagcaatactcgggaaaaaggtgatggtgcttgatttcgtggtgcctagtccacagggcacatcttgggggctcggcggaacatgcgtgaacgtgggctgcattccaaagaagctcatgcaccaggcggccctgttgggccaggcactgtgcgattctagaaagttcggatgggagtacaatcagcaagttaggcacaattgggagacgatgacgaaagccattcagaaccacatttcaagcctgaattggggctacagactgagtttaagggagaaggcggttgcgtatgtgaattcatacggcgagtttgtcgagcatcacaagattaaggccacgaataaaaagggccaggagacctattatacagccgcgcaatttgtgattgccacgggcgaacgccctcgatacttggggatccaaggagacaaggaatactgcatcacatcggacgatctgttttctctcccttactgcccaggaaagacactggtcgtcggggccagttatgtggcgctggagtgtgcagggtttctggctggattcggcctggatgtcaccgttatggtgagatcaatactattgaggggtttcgatcaagaaatggcagagaaggttgggtcatatatggagcagcacggggtcaaattcctgcggaaattcatcccagtaatggtgcagcagcttgaaaaagggagtcccggcaagctaaaggttctggcaaaatccacagaagggacagagactattgaaggcgtttataatactgtgctgttggccatcggcagagatagttgtacaagaaaaatcggcttggagaaaattggcgtcaagatcaacgagaagtccgggaaaatcccagttaatgacgtggaacagacaaatgtgccatatgtctacgccgttggtgatatcctggaagacaagcccgaactcaccccagtggcaattcagtcgggcaagctgttggcccagcgcctgtttggagccagcctagagaaaatctaccatactctcttttggccattagagtggacagtagccgggcgggaaaataatacctgctatgctaagatcatttgtaataagtttgatcacgaccgggtgatcgggttccatatattgggaccaaacgctggcgaagtcacacagggcttcgcagccgccatgaagtgcggcttgacgaaacagctgctggatgacaccattggaattcacccaacctgtggcgaggtgttcactacactggagattacaaagtcaagtggactcgacataactcagaaggggtgctgaggatag

SEQ ID NO: 26618 - DNA, 1338 bp, synthetic construct
  source 1..1338: mol_type = other DNA; note = Synthetic coding sequence
atgaacaagggcatcagcagcatccccatcaacctgcgggtgtactccccccacgtgctcaacctcactctcattgatctccccgggattactaaagtgccagttggtgatcagccaccggatattgaataccagataagggaaatgatcatgcagtttattactagggaaaactgccttatcctagcggtgactcccgcaaatactgacttggctaacagtgacgccctgaagctcgccaaggaggtcgacccacagggcctgcgcactattggggtaatcaccaagttagatcttatggatgaggggactgatgctcgggatgtgctcgaaaacaagttgctgcccctccgacgcggctacgtgggggtggtaaacagaagccagaaagacatcgacggcaagaaagacattaaggccgcgatgcttgcagagcgtaagttctttctatctcaccccgcttaccgtcacatcgccgacagaatggggacacctcatttgcaaaaagtgctgaatcagcagctcacaaatcacattagagacactcttcccaacttccggaataagttacagggacagctcttgagtatagagcacgaagtcgaggcttacaaaaatttcaaaccagaggacccaactcgcaagactaaagctttactgcagatggttcagcagttcgcggttgatttcgagaagagaatcgaagggtcaggagaccaggtggacaccctggagctatcgggcggagcgaagattaaccgaatcttccatgaacgcttcccattcgagatcgtcaagatggagttcaatgagaaggaactgcggcgggaaatcagttacgcaatcaaaaacattcacggtatccgaaccggcctgttcactccagatatggctttcgaagcaattgtgaagaagcaaatcgttaagctgaagggcccctctctgaagagtgtagatctagtgatacaggaactcattaacaccgtgaagaagtgcacaaagaaacttgcaaattttcccaggctctgcgaagaaactgaaaggattgtcgccaatcacatccgggaacgcgagggaaaaaccaaagaccaggtgcttctactgatcgacattcaggtgtcttacattaacacaaaccacgaagatttcattggctttgccaatgcccagcaacgttcttcccaagtccacaagaaaaccacagtgggaaatcaggtgatccgtaaggggtggttgacaatatcaaatatcggcatcatgaaagggggctctaaaggatactggtttgtgctcacggccgagtccctcagttggtacaaagatgatgaggagaagtag

SEQ ID NO: 26619 - DNA, 1560 bp, synthetic construct
  source 1..1560: mol_type = other DNA; note = Synthetic coding sequence
atgctgcagctgatggacagcggcatcaccatctgcctgcggaacggggcagcatccgtgttcaagaagaaggagtggtccacccagggcgaggaaaacaaacaagactccaagctcaaaaaactttctgaagattccctcaccaagcagccggaggaggtttttgatgtgttagagaaactgggggaaggctcctacgggagcgtcttcaaggccattcacaaggagagcggccaggtcgtcgccattaagcaagtgccggtcgagtctgaccttcaggagatcattaaagagatttccattatgcaacagtgtgactcaccctatgtggtgaagtattacggatcgtatttcaagaatacagacctttggattgtcatggaatattgcggcgcgggttcggtctcggacatcattcggctccgaaacaaaactttaatcgaggacgagatcgccaccatcctgaaatccactctgaagggcctggagtacctccactttatgcgaaaaatccacagggatattaaggccggcaatattctgctcaatacggaggggcacgccaagctcgctgactttggtgtcgccggacagctgactgacacaatggccaagcgtaacacagtcatcggaacccccttctggatggcacccgaggtgatacaagaaatcggctacaattgcgttgccgacatctggtctctcggcatcacgagtatcgagatggcagaggggaagccgccatatgctgacatacatccaatgagagccattttcatgattcccacgaatccgccaccaacattcaggaagcctgaactgtggagcgacgatttcactgacttcgtcaagaagtgtctagttaaaaacccagaacagagggctacagcaactcaactcttgcagcatcccttcatcaaaaatgctaagccagttagcattttgagagacctgattaccgaggcgatggaaattaaagccaaacgtcacgaagagcagcagcgggaacttgaggaggaggaagagaactcggatgaagatgaactggattcacacacaatggtcaagacctccgtggagtccgtgggaaccatgcgagccactagcaccatgtccgagggcgctcaaactatgatcgagcataacagtactatgctcgaaagtgacctgggtactatggtgatcaacagcgaagacgaagaggaggaggatgggactatgaagcgaaacgctacttcacctcaggtccagcgcccctcatttatggattacttcgataaacaggacttcaagaacaagtctcatgaaaactgcaaccagaacatgcacgagcccttccccatgtcaaaaaacgtgttcccagacaattggaaagtgcctcaggatggtgattttgatttcctcaaaaatctgagcttagaagagctgcagatgaggcttaaagcccttgaccctatgatggaaagggagattgaggagctgcggcagaggtatactgccaaaaggcaaccaatcctggacgccatggacgccaagaaaagacgccaacagaacttctag

SEQ ID NO: 26620 - DNA, 1392 bp, synthetic construct
  source 1..1392: mol_type = other DNA; note = Synthetic coding sequence
atgaagatcatggacagcgagctgatgcacagcatcgtgggcagctaccataagcctcccgaacgagtcttcgttccctccttcacccagaatgagccatctcagaattgccatcccgccaaccttgaagttacgtctccaaaaatcctgcactcacccaatagccaagctctgatcttggccttaaaaaccctgcaggaaaaaatccatagactggagttggagaggacacaagcagaagataacctgaacatcctgtcccgcgaggccgcacagtataaaaaggcactcgaaaatgagactaatgagcgaaaccttgcccaccaggaactcatcaagcagaagaaggatattagcatacaactgagttcggctcagtcccgctgcacgctcctggagaagcagctggaatacacaaaacggatggtactaaatgtcgagcgagagaaaaacatgattctagagcaacaggcccagctgcagcgagagaaagaacaggaccaaatgaagctttacgctaaactggagaaactggatgtccttgagaaggaatgcttccgcctgacaacgacgcagaaaactgccgaggacaagattaaacacctggaagaaaagctaaaggaggaggaacatcagcgaaaactcttccaggacaaagctagcgaacttcaaactgggctcgagatttccaagataattatgtcttccgtgtcaaacctcaagcactccaaggagaaaaagaaatcctccaagaaaaccaagtgtattaagcgcaggccaccgtggcagatctgttccaagttcggggccctgccctttgttgctgagaagatgcgccagcaccgggatccccacatcctgcagaagccattcaatgtgaccgaaacacgctgcctacctaagccctcaaggaccaccagttggtgtaaggctattcccccagactccgagaaaagcatctcgatctgcgataatctgtccgagctgctgatggcaatgcaggacgagctcgaccagatgtcaatggagcatcaggagctgcttaagcagatgaaggaaacggagtcacattcggtctgcgacgacatcgagtgtgagctcgagtgcctgttgaaaaagatggaaataaagggagagcagatcagcaaactgaaaaaacaccaggacagtgtttgtaagctgcagcagaaagtacaaaatagcaagatgtctgaagcatctggcatccaacaagaggatagctatcctaaaggcagcaagaacatcaagaactctccaaggaaatgtctgacggatacgaacctgttccagaaaaactcctctttccatccgatcagagtccacaatctgcagatgaagctgcggagagacgacataatgtgggagcaatag

SEQ ID NO: 26621 - DNA, 1050 bp, synthetic construct
  source 1..1050: mol_type = other DNA; note = Synthetic coding sequence
atggaggacccccagagcaaggagcccgccggcgaggccgtggccttagctctcctggagtcccctaggccagagggcggcgaagagccccctcggccctccccagaagagacccaacagtgcaagttcgacggacaggaaaccaagggaagcaagtttataacatcctccgccagcgatttcagtgacccggtctataaggagatcgcgatcacaaatggctgtattaatcgaatgagcaaagaggaactgcgcgcgaaactcagcgagttcaaactagagacaagaggagtgaaggatgtgttaaagaaacgcttgaagaactactacaagaaacagaaacttatgctcaaggagtcaaatttcgcggattcctactatgactacatttgtatcattgactttgaagctacatgtgaggagggaaatcctccggaatttgtgcatgagatcatagagttcccggtggtgcttcttaatactcatactctggagattgaggacacttttcagcagtacgtgaggcccgaaatcaacacacagctgtctgacttctgtatcagtctaactgggatcacccaggatcaggtggatcgggctgatacatttccccaggtgttaaagaaggtcattgattggatgaagctcaaggagctaggtactaaatacaagtatagcttactgaccgatggaagctgggacatgtccaagtttttgaatatccagtgccagcttagcagattaaagtaccctcccttcgcaaaaaaatggatcaacatcaggaaatcttacggcaacttctacaaggtcccccgcagccagacaaaactcacaattatgctggaaaaactgggaatggattacgacgggagaccccactgtggactcgacgactctaagaatatcgcacgaattgcagtgaggatgcttcaagatggatgcgaactccggattaacgaaaaaatgcacgcagggcagcttatgtctgtgtcctcgtctctgcctattgagggcacaccccccccccagatgccacattttcgtaagtag

SEQ ID NO: 26622 - DNA, 636 bp, synthetic construct
  source 1..636: mol_type = other DNA; note = Synthetic coding sequence
atgtgccccggcaactggctgtgggccagcatgaccttcatggccaggttcagccgcagctcatccaggagtcctgtgcggacccggggaaccctagaagagatgccaaccgtgcagcatccttttctaaatgtgttcgaactcgagaggctcctgtacacggggaagacagcgtgtaaccacgccgacgaggtgtggcccggcttgtacctcggcgatcaagacatggccaataataggcgtgagctgcggagattggggattacccatgtgcttaacgcgtcacactctcgttggcgcggcactccagaagcttacgaggggctaggcatcaggtacctcggcgttgaggctcatgacagtcctgccttcgacatgtctattcactttcaaaccgccgctgactttatacaccgagcactgagtcagcctggcgggaaaatcctcgtgcattgcgccgtcggagtgagtagatctgctactctcgtcctggcgtaccttatgttgtaccatcacctgaccctcgtcgaagccattaagaaggtaaaggatcatcgcggcattataccaaacagaggattcttgcgccagctactcgctctggataggagactcaggcaaggcctcgaagcttag

SEQ ID NO: 26623 - DNA, 438 bp, synthetic construct
  source 1..438: mol_type = other DNA; note = Synthetic coding sequence
atgatccccatctggaagcagcaggcccggcccggcgacggccccgtgatttgggactaccatgtggttctcctccatgtgtcatctggcggtcagaattttatctacgacttagatacagtactgccttttccttgcttgttcgacacctatgtcgaagacgcctttaaaagcgacgacgatatccatcctcagtttcggagaaaattccgggttatccgtgcagatagttacctcaagaatttcgcaagcgaccggagccatatgaaagacagctcagggaactggagagagcctcctcccccctatccttgtatcgaaaccggagactccaagatgaatctgaatgacttcatctcaatggatccgaaggtcggatggggtgccgtgtatacattgtccgagtttacccaccggtttggctcaaaaaactgctag

SEQ ID NO: 26624 - DNA, 258 bp, synthetic construct
  source 1..258: mol_type = other DNA; note = Synthetic coding sequence
atgagcgacaagagcgacctgaaggccgagctggagcggaagaagcagcgccttgcacagattagggaggaaaagaaacgaaaggaggaagaacgaaagaagaaggaagccgatatgcagcagaaaaaagaaccagtgcaagacgattccgacttggacaggaagcggcgcgaaactgaagcactgctacagagtattggaattagtcctgaaccaccgcttgtgcccaccccaatgtcgccatcctctaaaagctag

SEQ ID NO: 26625 - DNA, 588 bp, synthetic construct
  source 1..588: mol_type = other DNA; note = Synthetic coding sequence
atggacagcgagctgatgcacagcatcgtgggcagctaccacaagccgcccgaacgagtattcgttccatcttttacacaaaatgagccttcacagaactgtcaccctgcaaacttggaggtgacctcccccaaaattcttcactcaccaaattcccaggctctcattctggccttgaagacattgcaagagaagattcatcggcttgaattagaacgtacccaagccgaggataacttgaacatactgtctagggaagccgctcagtataaaaaagcactcgaaaatgagactaatgaacggaacttggctcaccaggaactaatcaaacagaagaaggatatcagcatacagctttcatcggcccagagccggtgcaccctacttgaaaagcaacttgagtacacaaagagaatggtcttaaacgtcgagcgcgaaaagaatatgatccttgagcagcaggcgcaattgcaaagagaaaaagagcaagatcagatgaagctctacgcgaaattagagaagctggacgtcttggagaaggaatgctttagactcacaaccacgcagaagaccgccgaggacaagtag

SEQ ID NO: 26626 - DNA, 1272 bp, synthetic construct
  source 1..1272: mol_type = other DNA; note = Synthetic coding sequence
atggaggacaagcggagcctgagcatggcccggtgcgaggagcggaactcccgaggtcaagaccacggcctggagcgagttccatttccgccccagctgcagtcagaaacttatctgcaccctgccgacccaagtcccgcctgggatgacccagggtctacagggagccctaacctgaggttgttgacagaagagatcgcgtttcaacctttagccgaagaagccagttttagaagaccccatcccgatggtgacgttcccccacagggagaagacaatctgctatcgctaccatttcctcaaaagctctggagactggtaagctctaatcagttcagcagcatctggtgggacgacagcggcgcctgtagagtgataaatcaaaagctgttcgagaaggagatactgaaaagagatgtggcccataaagtattcgctacgaccagcatcaagtcgtttttcaggcagttgaatctgtacgggttccgcaaacgccgacagtgcacctttagaacttttacacgcatcttttcagcaaagcggttagttagcatcttgaacaagttggagttctattgtcatccgtatttccagcgtgacagcccacaccttctggtccgcatgaagcggcgagtgggcgtaaagtctgcacctagacaccaggaagaggacaaaccggaagctgcgggatcatgtcttgctccagctgatacagagcagcaggaccatacaagccccaacgaaaatgatcaggtgaccccgcagcacagggagccggccggaccaaacacacagatacgctctgggtccgcccccccagccacccccgtgatggtcccggattccgccgtggcttctgacaactccccagtgacccagcctgccggcgaatggtctgaaggaagccaggctcacgttacccccgttgccgcggtccctggaccagccgctctcccattcctgtacgtccccgggagtcctacccaaatgaattcttacgggcctgtcgtggccctgccaactgcctcccggagtacactggcaatggatacaaccggtctccctgcgccaggaatgctgcccttctgccacctgtgggtgcctgtcaccctcgtcgctgcaggagccgcccaaccagccgcttccatggttatgtttccacaccttcccgccctgcaccaccattgtcctcactcccaccggactagccaatacatgcccgcatcagacggaccccaggcttatccagactatgctgaccagtccacctag

SEQ ID NO: 26627 - DNA, 2097 bp, synthetic construct
  source 1..2097: mol_type = other DNA; note = Synthetic coding sequence
ggcgtgggcggccggggcgagcggctgccccggggcttcgcccgggtagtccgcgtggcatccgaagggtccgtgcgcaggccctcagggcctgtgccggctccgcaaccccctgcgttcaggtttgtttcccgccctggaagggccagatccgaatccgagaccttggagcggagccctccgcagagccccggacccgggaaagccggggacgcccccaatcggagaagtggacatgtccgaggtgcacgggtactgagcccaccggggcgaagagcacgattgtctagtcccgggccctctaggagttcagaggctagagaagagttgagaaggcatctggtaggactgattgaacggagccgcgtggtgatattctcaaagtcctattgccctcacagtactagggtaaaagaactcttctcaagtctgggcgttgaatgcaacgttctcgagctggatcaggtggatgacggcgcacgcgtccaggaagtgctgtccgaaataacaaatcagaagacagtcccgaatattttcgtgaataaggtacatgtcgggggatgcgaccagacgttccaggcctaccaaagcgggctgctccaaaagctgcttcaggaagacctagcatatgactatgacctcatcattatcgggggagggagtggaggtctgtcttgcgcaaaagaggctgccattctcggtaaaaaagttatggtgcttgattttgtagtcccaagcccacagggtacctcctggggcttaggcggaacctgcgtcaatgtcggttgcatcccaaagaagttgatgcaccaggcagccctgctgggtcaggcactgtgtgacagcagaaaatttgggtgggagtacaaccagcaggtgcgtcacaactgggagactatgacaaaggctatccagaatcacatttcttctctcaactgggggtaccggctttcactgcgtgaaaaagccgtggcctatgtgaactcttacggcgaattcgtcgaacaccataaaataaaggccaccaacaaaaaaggccaagaaacatattacacagctgcacagttcgtgattgccacgggcgaacgaccgcggtacctgggcatccagggcgacaaagaatattgtatcacctcggacgatttgtttagcctgccctattgccccgggaagacactagtggtgggcgcatcctacgttgccctggaatgcgcgggattcctagctgggtttggtctagacgtgaccgtgatggtccgctctattctgctgagaggcttcgaccaggagatggccgaaaaggtgggctcctacatggaacagcatggagtgaaatttctgcggaagtttattcctgtgatggtccagcagctcgagaaggggtctcccggtaaactgaaggtgttagccaagtccacagagggaaccgagaccattgaaggcgtttataacacggtgctcctggcaatcggaagagactcttgtacacgcaagattgggttggaaaagatcggagttaaaatcaacgaaaagagcggcaaaataccagtaaacgacgtggagcagaccaacgttccatatgtctatgccgtgggcgacattttggaggataagcccgaactgacacccgtagctatccagtctggcaagttgctcgcccagagactgttcggtgccagcctggaaaaatgcgactatataaatgttcctaccacggtcttcacgcctctggagtacggctgttgtgggcttagtgaggaaaaagcaattgaggtgtacaaaaaggagaacctggagatctaccacacactgttttggcctcttgagtggacagtggccgggagggagaacaatacctgctatgcaaagattatctgtaacaagtttgaccacgaccgcgtaatcggcttccatatccttggcccaaacgctggggaggttacccagggcttcgccgccgcaatgaagtgcgggctcacaaagcagctactggacgacacaatcgggatacacccaacatgcggcgaggtgttcacgaccctggaaattacgaagagctctgggctcgacattacccagaagggttgctgaggctag

SEQ ID NO: 26628 - DNA, 609 bp, synthetic construct
  source 1..609: mol_type = other DNA; note = Synthetic coding sequence
atgaccggcagcaacagccacatcaccatcctgaccctgaaggtgctgccgcacttcgagtcattgggcaagcaggaaaagattcccaacaaaatgagtgcctttcgtaatcactgtccgcatctggacagtgtgggcgagataactaaagaagaccttatccagaaaagcctggggacgtgccaggactgcaaggtccagggaccaaatctgtgggcctgcttggaaaaccgatgtagctatgttggttgcggggagagtcaagtggatcatagcactattcacagtcaggagacaaagcattacctgactgtgaacctcactacactgcgagtatggtgctatgcctgctccaaggaagtgttccttgaccgaaaactcggcacccagccatccctgcctcatgtgcggcagccgcaccagattcaagagaacagcgtgcaagattttaagatacctagcaacactacgctgaagactcccctggtcgcggtgtttgatgatctggacattgaggcagatgaggaggatgagttgcgagcaagaggactgactggactgaagaacatagggaatacatgctacatgaacgccgccctccaggcctag

SEQ ID NO: 26629 - DNA, 1443 bp, synthetic construct
  source 1..1443: mol_type = other DNA; note = Synthetic coding sequence
atggagaccgacctgaacagccaggaccggaaggacctggacaagtttattaagttctttgcgctcaagacagttcaggtcatcgtgcaggcacgtctcggcgaaaagatttgcacacggtcttcctcatcgcctaccggcagtgattggttcaatttggctattaaagacatacccgaggttacccatgaagcgaagaaagccctagcaggacagctgcctgccgtgggccggtccatgtgcgtggaaatctccctgaaaacatcggagggagactctatggagctcgagatttggtgtctggaaatgaacgagaaatgcgacaaggaaatcaaggttagctacacagtctataataggctctctctgcttctgaagtcccttctcgcaatcactagggtgacacccgcctatagacttagtagaaaacaagggcacgaatatgtcattttgtataggatttacttcggggaagtccaactttcgggcctgggcgaggggttccagaccgttcgtgtgggaaccgtaggcacccccgtcggaaccattaccctgtcatgtgcatatcgaatcaacttagccttcatgtctaccaggcaatttgaaaggaccccaccaatcatggggattataatcgatcattttgtagacagaccttatccatccagtagcccgatgcacccctgtaactacagaaccgccggtgaagacaccggagttatctacccctcggtggaggactctcaggaagtctgcacaacaagcttctccacctctccaccctctcagctcatggtgcccggtaaggaaggcggcgtaccactcgcccctaaccaacccgttcatgggactcaagccgaccaggagaggctggcaacttgtacgcctagcgaccggacacactgtgcagcgactcctagcagctccgaggataccgagaccgtgagcaacagtagcgagggccgggcatccccacatgatgtgctggagacaatctttgtgagaaaagttggagcctttgtgaacaaaccaattaatcaagtgactctgacttctctcgacataccattcgcaatgttcgcacctaagaacctggagctcgaggacacggatcctatggtgaatcctcccgattcccctgagactgaaagcccacttcaggggagccttcactcagacggatcaagtggaggctcaagcggaaacactcatgatgatttcgtaatgatagatttcaagcccgcctttagtaaggacgacatcctacctatggatttggggaccttctaccgcgaattccaaaatcccccacagctgagttcactgtcaatcgacattggtgcacagagcatggccgaagatctcgactcgctccccgagaagctggcggtgcacgaaaagaacgtccgtgaattcgacgcgttcgtcgagactttgcaatag

SEQ ID NO: 26630 - DNA, 309 bp, synthetic construct
  source 1..309: mol_type = other DNA; note = Synthetic coding sequence
atgctgagcgaggaggagaaggaggagctgaaggccgagctggtgcagctcgaagatgagatcacgactttaaggcaggtcctcagtgcgaaggagaggcaccttgtggaaatcaagcagaagctcggaatgaacttgatgaatgagctgaaacagaatttttcaaagagttggcatgacatgcagaccactaccgcctacaaaaagactcacgagaccctgtctcatgcaggtcagaaggctactgccgctttttcaaacgtaggtacagctattagcaagaagttcggagacatgaggaggaagtag

SEQ ID NO: 26631 - DNA, 318 bp, synthetic construct
  source 1..318: mol_type = other DNA; note = Synthetic coding sequence
atgagccagagcggcgccgtgagctgctgccccggcgccaccaacggtagtctgggacgcagtgacggcgtcgccaaaatgtcgcccaaggacctgtttgagcagcgtaagaagtattcaaactccaacgttattatgcatgagacaagccagtaccatgttcaacacctggcaacattcattatggacaagagcgaggccatcacaagcgtagacgacgcaatacggaaacttgtgcagctgtccagtaaagagaagatatggactcaagaaatgcttctacaggttaacgaccagtccctgaggctcctggactag

SEQ ID NO: 26632 - DNA, 222 bp, synthetic construct
  source 1..222: mol_type = other DNA; note = Synthetic coding sequence
atgagcgccttccggaaccactgcccccacctggacagcgtgggcgaaattaccaaagaggatttaatccagaagagcctgggtacttgtcaggattgcaaggtccagggccctaatctgtgggcgtgccttgagaatcgatgcagctatgtcggctgtggcgagagccaggttgatcattcaacgatccacagccaggagactaaacattatctgacatag

SEQ ID NO: 26633 - DNA, 276 bp, synthetic construct
  source 1..276: mol_type = other DNA; note = Synthetic coding sequence
atggccatgaccgtggtgaccaaggagaagaacaagaaggtgcccacgatctttctgagtaagaagccccgtgaaaaggaggtggatagtaaatcccaggtcatagaaggaatttccaggctgatatgctctgctaagcagcagcagacaatgttgagggtttcaatcgacggcgtggagtggtccgacatcaagttcttccaactagccgctcagtggcctacacacgtgaagcattttcctgtcggccttttcagcggcagtaaggccacttag

SEQ ID NO: 26634 - DNA, 2535 bp, synthetic construct
  source 1..2535: mol_type = other DNA; note = Synthetic coding sequence
atgttctggaagttcgacctgcacagcagcagccacatcgacaccctgctcgaaagggaagacgtgactcttaaggagctaatggatgaggaggatgtactacaggagtgcaaagcccagaatcgcaaactaatcgagttcctattgaaggccgagtgtctggaagatctcgtctccttcatcatagaggaaccacctcaggatatggacgagaagatccgctataaatatcctaacatttcttgtgagcttttgaccagcgacgtatcgcagatgaacgatcgcttgggagaggacgaatcattactgatgaaactctattcattcttgctcaatgattcacctttaaacccacttctcgcgagcttcttttctaaggttctcagcattctgattagccggaagccggaacagattgtcgacttcctcaaaaagaagcatgattttgtggatctcataattaaacatatcggaacctctgcgatcatggatttgctgttgaggctgctgacatgtatcgagcctccacagcctaggcaggatgtgctgaactggttgaacgaggaaaagatcatccaacggctggtggagatagttcacccaagccaggaagaagaccgacacagtaacgcctctcagagtctctgcgaaattgtacgattgagcagggaccagatgctgcaaatccagaattcaacggagcctgatccactgctcgccacactcgagaaacaggaaattattgagcaattattgtccaacatcttccacaaagaaaagaatgagtctgctatagtctctgccatccagatccttctgacactccttgagactaggcggcctacctttgaaggacacatagagatctgcccccccggcatgtcccactcagcttgttctgtcaataaatccgtcctggaggcaatcagaggccggctggggagttttcacgagctgctcctagaaccgcccaagaagtcagtcatgaagaccacctggggggtgctggatcctcctgttggcaacacaagactgaatgtaatcagacttatttcctcgttgctccaaaccaacacatcaagcattaacggggatctcatggaattgaattccatcggtgtcatattaaacatgttcttcaaatacacttggaacaactttctgcacactcaggtggaaatctgcattgccttgatcctggctagtcccttcgaaaacacagagaatgctactataactgaccaggacagtaccggtgataatctcctactgaaacatctgtttcagaaatgccagcttattgaacgcattctggaggcatgggagatgaacgaaaaaaaacaggccgaggggggcagaaggcacggctacatggggcacctcactaggattgctaattgtatcgtacattctaccgacaagggaccaaattccgccctggtgcaacagttaatcaaagatctaccagatgaggtcagggaacggtgggaaaccttttgtactagtagcctgggtgagactaacaaaaggaacacagttgacctggcattctctgattatcagatgcagcagatgaccagtaactttattgatcagttcgggtttaatgatgagaagtttgctgatcaggatgatatcggcaacgtcagttttgatagggtttctgacatcaactttacgctcaacaccaatgagagtgggaacattgccctctttgaagcctgttgtaaggagcggatccagcagttcgacgatggcggatctgatgaggaagatatctgggaggagaagcacattgcttttacgccagagagtcagcggaggagctcctcagggtcgacagatagtgaagagtcaacagattcagaggaggaagatggcgctaagcaggatctgttcgaaccgagttcggctaatactgaggacaaaatggaggtggatttatcggagccacccaattggagtgctaacttcgacgtccccatggagacgacccatggagctcctctggactctgtaggatctgacgtgtggtctacagaggagccaatgcctaccaaggagaccggttgggcgtccttcagcgagttcacctctagcctttccacaaaggactccttgagatctaatagccccgtagaaatggagaccagcaccgaacctatggaccccttaacccccagcgctgccgctttggcggttcagcctgaggcagctggttcagttgctatggaggcttcctcggatggcgaggaagacgccgagtcaaccgacaaagtgacggaaaccgtcatgaacggtggtatgaaagaaaccctgagcctgaccgtggatgccaaaaccgaaaccgccgtgtttaagagtgaagaaggaaagctatccacctcgcaagacgccgcttgtaaggacgccgaagagtgtcctgagaccgccgaagcaaaatgtgcggctccacgcccacccagctcctctccagaacaacgcacaggccaacctagcgctccaggggacaccagcgtaaacgggccagtttag

SEQ ID NO: 26635 - DNA, 2604 bp, synthetic construct
  source 1..2604: mol_type = other DNA; note = Synthetic coding sequence
atgttctggaagttcgacctgcacagcagcagccacatcgacaccctgttggaaagagaagatgtgaccttgaaggagttgatggatgaggaggatgttctccaagaatgcaaggcacagaatcgaaaactgatcgagttccttctgaaggcagaatgcctggaagatttagttagctttatcatcgaagagcctcctcaggacatggacgagaaaattcgctacaaatatcctaatatttcgtgcgagcttctgaccagcgatgtgtcccagatgaacgatcggctgggcgaggacgaaagcctactaatgaagctctacagtttcctcctgaatgatagtccattaaaccctctgttggccagcttctttagcaaggttctgtcaatcttaatttcccgtaaacccgagcagattgtagacttcttaaagaaaaaacatgacttcgttgacctgatcatcaaacatatcgggacttcagcaatcatggacttgctgttgagattgttaacctgtatagagcccccacaaccccgccaggacgtccttaattggctcaacgaagagaagatcatacaaagactggtagaaatcgtccacccatcccaagaagaggacagacattccaacgcttcccagtcgctctgtgagattgtgcgtttgtcgcgggatcaaatgctgcagatccagaatagtacagagcccgaccctctgctggcaacattagaaaagcaggagatcatagaacagctactgtcaaatatctttcacaaggagaaaaatgagagcgcaatcgtgagtgccattcagatactccttacattgcttgagacacgtcgccctactttcgaaggccacatcgagatatgtccgccaggaatgagccactctgcttgcagtgtaaacaagtccgtgctggaggctattcggggacgcctcggctcatttcacgaactccttctagagcctcccaagaagagcgtgatgaagacaacctggggtgtgctggaccccccagtgggtaacactagactaaacgtgatccgccttatctcatcactcctgcagaccaatacttcatccatcaacggggacttgatggagctgaactccatcggagtgattttgaacatgttcttcaagtatacatggaataactttcttcacacccaggtagagatctgtattgctcttatcctggctagtccgttcgaaaacacggagaacgcaactattacggatcaggattcaacgggagataatctccttcttaaacacctctttcaaaaatgtcagctgatcgagagaatcttggaggcttgggagatgaacgagaagaagcaggctgagggcggtcgaagacatgggtacatgggacatctgacgcgtatcgctaattgcattgttcattccacagataagggtccaaactctgcattggtccagcagctgataaaggacctgcccgatgaggtaagggagcggtgggagacattctgtactagcagcctcggggagactaacaagcggaataccgtggacctagttaccacttgtcatattcactctagctcagatgacgagatagatttcaaggagacaggtttctcacaggactcctcacttcaacaaatgcaacagatgacttccaatttcatagatcagtttgggtttaatgatgagaaattcgctgaccaggacgatatcgggaatgtttcattcgatcgcgttagtgacattaacttcaccctcaacaccaacgagtccgggaatatagctctgtttgaggcttgctgcaaggaacggatccaacagttcgatgatggagggagcgatgaagaagatatttgggaggaaaagcacatcgctttcacgcccgaatcccagcgtcgttcctcctcaggatctacagattctgaggagtcaacagacagcgaggaggaagacggggccaagcaggacctatttgaaccttcatctgccaatacagaagataaaatggaggtggacttatccgagccccccaattggagtgcaaactttgatgtacctatggagaccacccacggagccccactcgattctgtggggtccgatgtgtggagcactgaggaaccaatgccaaccaaggagacaggatgggcttcgttctctgaattcacttcttcactgagtactaaggacagcctgcgcagcaacagtccagtggagatggagacctccacagagccaatggaccctctgacaccatcagctgccgcactggccgtccaacccgaagcggctggcagcgtggccatggaagcctccagcgacggtgaggaggacgccgaatcgacagacaaagtgaccgagacagtcatgaatggcgggatgaaggagactttgagcctgaccgtcgacgccaaaactgagaccgccgtgttcaagagcgaagaaggaaagcttagtacttctcaggacgcagcatgtaaggatgccgaagagtgtccagagactgctgaggcaaaatgcgccgccccccgcccaccaagttcctctccagaacagcggaccggccaaccatcagcacctggtgatacctccgtcaatggtcctgtttag

SEQ ID NO: 26636 - DNA, 174 bp, synthetic construct
  source 1..174: mol_type = other DNA; note = Synthetic coding sequence
atgaccagcaagaagctggtgaacagcgtggccggctgcgccgacgatgccttggcagggctagtggcctgtaatcccaacctgcagctcctgcagggacatagagtggctcttcgaagcgatttggactccctcaaaggtcgcgttgccctactttcaggcggaggctcctag

SEQ ID NO: 26637 - DNA, 2709 bp, synthetic construct
  source 1..2709: mol_type = other DNA; note = Synthetic coding sequence
atgttccccgccctggagacccacctgaagcagaccatccccgacccctacgaagatttcatgtacaggcacctgcagtattacggctatttcaaggcccagagaggttctctgccaaactccgcaacgcatcagcatgtccgaaagaataacccgcaatgtttattaaacgggagcctcggcgagaaggatgatctgatccccgacacgctgcagaaggaaaagctactctggccaatcagcctgagctccgctgtgcacagacaaattgaagctatcaatcgtgactttcactcatgtctgggttggatgcaatggcggggactatccagtctgcagcctccaccccctcggttcaaagactccccagcctctgccttcagagtggccgggatcaccgactctcacatgttaagccttccacatttacgaagccggcagcttctgtatgatgagctcgatgaggtcaatccaaggctcagagagcctcaggaacttttttctattctctccacaaagcgcccgctccaagctcctcggtggcccatcgagtgcgaagttatcaaggaaaacattcatcacatcgaatgggcccccccccagcctgaatacttctatcaacctaagggcaacgagaaggtgcctgagatcgtcggtgagaagaaagggacggtagtttatcagctggatagcgtgcccatcgagggcagctactttacgtcgagtcgcgtcggaggtaagcgaggaatagtgaaagaactggctgtaacgctacagggtccagaggacaacacactgctctttgaatcgcgttttgaatccggcaatctgcaaaaggccgtaagggtcgacacttacgaatatgaactgacactgcgcactgacctgtatacaaacaagcacacacagtggttctactttagggtgcagaatacccgcaaagacgctacttataggttcactatagtcaacctcctgaaaccaaagtcactttacaccgttggtatgaagcctctgctgtacagccagctggacgcgaatacccgaaatatcggttggcgccgagaagggaacgaaattaagtattataaaaataacacagatgatggtcagcaaccattttactgcctgacctggaccattcagttcccatatgatcaggacacatgtttttttgcccacttctacccatatacatacacggacctgcaatgttacctgctgtcggtagctaacaaccccatacagtcccaattttgcaaattgcaaaccctgtgtcgctctctggccggaaacaccgtctacttgctcacaattaccaacccatcgcaaaccccccaggaagcagccgccaaaaaagccgtcgtcttgagcgcacgcgtacaccccggcgaaagcaatggctcatgggtcatgaagggcttcctggacttcatactctcaaatagcccggacgcccagttgttgcgagatatcttcgtcttcaaagttctacctatgctaaacccagatggcgtgatagtcggcaattatcggtgctcattggccgggagagacctgaacagacattataagacgatcctcaaagagtcctttccgtgcatttggtacacccgcaatatgattaaacgtctgctggaggagcgcgaagttctgctgtactgtgattttcacggtcatagtcgcaagaacaatatcttcctctacgggtgcaacaacaacaaccgtaagtactggcttcacgagagggtctttcccctcatgctctgtaaaaacgccccggacaagttctcctttcattcctgcaacttcaaggtgcagaagtgcaaggaaggcacggggcgtgtggtaatgtggcgtatgggaatcctgaacagttacactatggaaagcacttttggggggagcacactcggaaataagcgcgacacccactttactatcgaagacctgaagtccctgggataccacgtctgtgatacattgcttgacttctgtgatcctgatcagatgaaattcacacagtgcctggccgaactgaaggaactgctcagacaggaaattcacaaaaagttccacgaactcggccaggacgtggacctggaggggagctggtccgacatttcactgagtgacatcgaatccagcacatctgggagtgattccagcctgtccgatggtctgcccgtccatctagcaaatattgctgacgagctaacccaaaagaaaaagatgttcaaaaaaaaaaagaagaaatccctgcagacgcggaagcagcggaacgaacagtaccagaaaaagaatctgatgcaaaagttgaaacttacagaagacacatctgagaaggccgggtttgcctcaacccttcagaagcagcctacgtttttcaagaattctgaaaactctagctttttacccatgaagaatgagaatcccagacttaatgaaacaaacttgaaccgccgagataaggataccccgctggacccctcaatggccactttaattctccctaagaataagggacggatgcaaaataaaaagcctggctttacagtgtcgtgctccccaaagagaaccatcaacagttcccaggaacccgcacccggaatgaagcctaattggcctcgaagccgttaccccgccaccaaacgagggtgcgccgcaatggctgcctacccgagcctgcacatctatacatatccgtag

SEQ ID NO: 26638 - DNA, 537 bp, synthetic construct
  source 1..537: mol_type = other DNA; note = Synthetic coding sequence
atgaaccggcggcggaagttcctgctggccagcgtgctggccctgcagaacagctctttcatctacccctcatgccaaaaatgttttagtcggataatcttggtgtctaagaggtcaaactgccctaagtgcgggtcgactggagaatccggcaatgctaactatcgatacaagctctccctgaaagtggcagagtcgaataagcttttcgtcatcactgtttttggaagctgtcttgatactttctttggcctcaccgctaccggtttgcaccgatacatccaggacccaaacaaaattccggaaacgctggataacgacaccacacagaacctgctcactaaggctgtggaaacatgttttgtaggacagagctttattttcggcgtgaccaattttgagaatcagcctggtcagggaagcgacgcttcaaacttcttgcagcagtgttctgaccataaaagaaaggctaaggccctcgtggcttgtcaaattgttctgccagatcccgcaacacaggatgccaagaccaaatag

SEQ ID NO: 26639 - DNA, 441 bp, synthetic construct
  source 1..441: mol_type = other DNA; note = Synthetic coding sequence
atggtggccatggccgaggccgaggccggcgtggccgtggaggtgaggggcttgccgccagctgtcccagatgagctgctcacactatacttcgaaaacagaagacgcagtggcggtggccctgtcctgtcgtggcagcggttgggctgcggcggggtgctgacctttcgagagcctgcagacgcagagagagttttggcacaggccgaccacgagctgcacggggcccagctcagcctgcgccctgccccaccacgggcacctgcccgcctgctgctccaggggcttccacccggcactactccacagcgtttagagcagcacgttcaggccctcttgcgcgccagcggtttgcctgtacagccttgctgcgccctggctagcccgcggcctgaccgagctttggtgcagctgcccaagccactctctgaggcaggttag

SEQ ID NO: 26640 - DNA, 348 bp, synthetic construct
  source 1..348: mol_type = other DNA; note = Synthetic coding sequence
atggccggccggcccctgcggatcggcgaccagctggtgctggaggaggactatgatgagacctatattccctcggaacaggagatcctcgagtttgctagggagataggaatagaccccattaaggagccagaacttatgtggctggcacgtgaggggatcgtcgcacccctgcctggagaatggaaaccatgtcaagacatcacaggcgacatttattactttaacttcgcaaacggacagtccatgtgggaccacccatgtgacgaacactacagatcattggtcatccaggagcgagctaaactgtctacatccggcgcgatcaagaaaaaaaagaagaagtag

SEQ ID NO: 26641 - DNA, 1191 bp, synthetic construct
  source 1..1191: mol_type = other DNA; note = Synthetic coding sequence
atgcggaccagctacaccgtgaccctgcccgaggacccccccgccgcacccttcccagctctggccaaggagctgaggccgagatcccctctgagcccctcgcttctgctatcaaccttcgtaggactgcttctgaataaagcgaagaacagcaagagtgctcagggcctcgctgggcttcgcaatctgggaaatacttgttttatgaattccatcttgcagtgtctgtccaatacacgggagctgcgagattactgtctccaacggctgtatatgagagatctccatcacggaagcaacgctcacacggcgctcgtggaagagtttgccaaactcatacaaacaatttggaccagctcccctaacgatgtcgtgtccccttctgaattcaaaacacagatccagcggtacgcacctcgcttcgtcgggtacaaccagcaggatgctcaggagtttctacgatttttattggacggcctccacaacgaagtaaaccgggtcactctccgccctaagtccaatcccgagaatttagatcatctgcccgacgatgagaaggggcggcagatgtggcgcaaataccttgaaagggaggactctagaatcggtgatctgtttgtgggacagctgaagagcagtttaacatgcactgactgtggctattgcagcaccgtgtttgatcccttctgggacctgtccctgccaatcgcgaagagaggctaccccgaagtgactctcatggactgcatgaggctgtttactaaagaggacgttttagacggggatgaaaaacccacgtgctgccgatgtcgcggcagaaagcgctgcattaaaaaattctcaatccaacgattccctaaaattctggtccttcacctgaagagattcagcgagagtcggatccgtacctcaaaactaactacgttcgttaacttcccacttagggatctcgacctccgcgagtttgctagcgaaaatactaaccacgcggtctacaacttgtatgctgtgagcaatcattcaggaacaactatgggaggccattacaccgcttattgtcgttcaccaggaacgggcgagtggcacaccttcaacgattcatccgtgacccccatgagttcttctcaggtcagaacctccgatgcttacctattgttctatgagctggcaagtcccccatcaaggatgtag

SEQ ID NO: 26642 - DNA, 633 bp, synthetic construct
  source 1..633: mol_type = other DNA; note = Synthetic coding sequence
atggccgccagcgtggagcagcgggagggcaccatccaggtgcagggccaggctttgtttttccgcgaggcactgccaggctcgggtcaggctcgattctcagtactgcttttacatggcattcgttttagctctgaaacctggcagaacctcggaactctccaccggctcgcccaggccggctacagagccgtggctatcgatcttccggggctcggacatagcaaggaagccgccgctccagcgcccattggggaattagccccgggctccttcctggctgctgttgtggacgccctggagttaggccctcctgttgttatctcaccctcactctctgggatgtactcactcccatttctcacagcacctggaagccagttgcctgggtttgttcctgtggcacccatctgcacagataagatcaacgccgccaattatgccagcgtaaaaacgccagccctgatcgtgtatggtgaccaggaccccatgggtcaaacatccttcgagcatctcaagcaactgcccaaccacagagtgttgatcatgaaaggcgccgggcatccatgttatctagacaagcctgaggagtggcacactggtctgctggattttctgcaggggctgcaatag

SEQ ID NO: 26643 - DNA, 1428 bp, synthetic construct
  source 1..1428: mol_type = other DNA; note = Synthetic coding sequence
atggagctgtggcaggccgccctgagcaccctgaaccccaaccccaccgattcatgtcccctgtacctgaattatgctaccgtggctgcattgccttgccgggtctcacgacacaattcaccaagtgcagcccattttatcaccagactggttagaacctgcctcccacctggggctcatcgttgtattgttatggtgtgtgaacagcctgaggtattcgcctctgcttgcgccctcgcccgcgctttcccactctttacccataggagtggagcaagcagacggcttgaaaagaaaaccgtcacggtcgagttttttctggtcgggcaggacaacggacctgtggaagttagtacattgcaatgtttggccaatgctactgacggagtcaggctagctgcccgcatcgttgatacgccatgcaacgaaatgaacacagatacattcctcgaggaaatcaataaggtcgggaaggagctgggaatcattcctacaataatcagggatgaggaacttaaaactaggggcttcggcgggatttatggcgtggggaaagcggcattacaccctccagcactcgcggtgctgtcacataccccggacggtgccactcaaacaatcgcatgggttggcaagggaatcgtatatgatacgggagggttatctatcaaaggaaagacgacaatgcccgggatgaagcgcgattgtggaggtgccgctgctgtactgggtgcctttcgagctgcgattaaacagggtttcaaggacaatctgcacgccgtcttctgtctggccgaaaactcagtcggccctaacgctacccgccccgatgatattcatctgttatacagtggaaagacagttgagataaacaatacagacgccgagggaagactcgtgctggccgacggagtgtcctatgcctgtaaggatctgggggcggacattattctagatatggcaacgctgaccggggcccagggcatcgcgaccgggaaataccacgcagctgtgttaaccaattcagccgaatgggaagcggcttgtgtcaaggccgggaggaaatgcggcgacctcgtccatccactcgtgtattgcccggaactgcatttttctgaattcacgtccgcggtggccgacatgaagaacagcgtagcagacagggataatagtccctcgagctgcgcaggtctctttatcgcttcacatatcggcttcgattggccaggagtctgggtgcatttggatattgccgcccccgtgcacgccggcgagcgcgcaacggggttcggagtcgccctgctattagccttgtttgggagggcctccgaagaccctctactaaatcttgtaagtcctctgggctgcgaggtagacgtcgaagagggggaccttggtcgggactctaagaggagacggcttgtgtag

SEQ ID NO: 26644 - DNA, 537 bp, synthetic construct
  source 1..537: mol_type = other DNA; note = Synthetic coding sequence
atggtggccatggccgaggccgaggccggcgtggccgtggaggtgcgcggtttgccgcccgctgtgcctgacgagttgctgacactgtacttcgagaaccgtcgcagatcagggggtgggcctgtgctgtcatggcagcgacttgggtgcgggggggttttgacgtttcgggagccagcagacgctgagcgggtgctggcacaggcggatcatgaacttcatggtgcccaactgagcctgcgccccgctcccccacgagcccccgctagactgctgttgcaagggctgcctcctggaacgacaccccaaagattggaacagcacgtgcaggcactgttacgtgctagcgggcttccagtacagccatgttgtgctctcgcatcccctcggcccgacagggctctcgtgcagctgcctaaaccactctcagaagctgacgtaagggtgctcgaagaacaggcccagaacctgggcctcgagggtacattggtgagtctcgctagggtgccccaagcccgcgccgtccgggttgtgtag

SEQ ID NO: 26645 - DNA, 1893 bp, synthetic construct
  source 1..1893: mol_type = other DNA; note = Synthetic coding sequence
atggagaaggtgctgggctgcgagctgctgaagggcctgaacgtgctagaccttggtcttaacatggagatcctggaggagcagatgctacatgagatcctgtgtagagagtaccccgaactggaaacccgatggcaggatcttaagattagggcattggacacctgcaaggctgtggaagccgcggaggagcgactgcttactatgttgctgtttcagaaccccaagagacaaaagccagccaagtttctccggaatattgtgcgggcgcaggggaaactgtgccagttgcgtgcacattgtgaagagctggaggggcaaaagctccaggaaatggtgctctgggcaccctacagaccagtcgtgtggcatggaatggcaatggttaaagctctgtcacagcttcagaatctgttgcctctgttttgtatgtccccagaaaattggttggcggtaactaagcaggccctggactccatgaaaccgagggagataaatcacggcgaggatctggcgtctcacctcctgcagctgcgggctcacttgactcggcagctgctaggaagcacggtgactgctctgggcctgacacaggtaccacttgtgggcgcacttggtgcccttgctctgcttcaggccaccggcaaggcttctgagctcgaaagactggcgctttggccgggacttgcggctagcccatcaaccgtacattctaagcctgtgagcgacgtggcccggcccgcttggctgggaccaaaggcctggcacgaatgtgaaatgctggagttgttgcccccatttgtaggtctctgcgcctctcttgctggccactccagcgcttggcaagcctatctctccctctcctccacggtccttgggcccgcacccggccccggtcctgaaccgttaagtctgctgcagaagctgattctgtggcgggtgctgcggccagaatgcttagctggggcattggctgactttacgacctcactgttgggccggcccctggatgagaatacatatgccccgactatgccttttaaacattctcaagcaacccaaccaatgttaatcctgctaccccccccgggacatcccagcgccactctgcaccccttaacagtgatccagaagcttgctgcgaagtaccagcaggggcagaaacaattgcaagtgatcgccctgggatccgaagcatgggatcctgtgtccgtggtcgtgtctacactgtcccaagccatgtatgaaggacactggctcgtgttagataactgtcacctgatgccccattggccgaaagagctcctccaactacttctcgaactcctggggagagcaaaagtcgtagccgacctggagtcggaacagctgctagatcagcctgaaagtcggaatgtttccacagtgcacagggatttccgactctggctcattgtgcccgctgagagctcagcgtcactaccagccgttcttactcagcactccatgcctgtcttttggaaccaatctctggaacttgggcatgtgttaatagatagtgtggagctggcccaacaggttttgtatatgcagcctcctacccaggccctgccacttctgctgctccatggactactgctccatcgacaactctacggcacacggcttcaggcgcaccgtggcaggtggagccaggttaccctgacccaggtgttacagacacaggatcagctgtgggccagcttgtcaaatccacgggcagcaatgcaggaacttgctggtgaaacgttgcctctccctctgggagtgatctccccacaggagagcctggaagagggagggggagggattcagtttaccgccctagtgctcgcagtggtggaaactgaaggaacggggaccgagagattatag

SEQ ID NO: 26646 - DNA, 1488 bp, synthetic construct
  source 1..1488: mol_type = other DNA; note = Synthetic coding sequence
atggagctgcacggcggcaaccggggcggctaccagcccaaggccttagagcagagtggctgttggttgtggcaggcagcactgtctacactgaacccgaacccaacagatagttgtcccctttacctgaattatgctaccgtagcggcgctaccttgtcgtgtatcacgacataatagccccagtgctgctcatttcattacacgactcgtgcgaacgtgcctcccacccggtgcgcaccggtgcattgttatggtgtgtgaacagcccgaggtgtttgcatcagcttgtgcactagctcgagccttccctttgtttacgcaccgctctggggccagcaggcggctggagaagaaaaccgtgaccgtcgaatttttcctcgtcggacaggataacgggcccgtggaagtttctaccctacagtgccttgctaatgcgaccgatggggtgaggctggcggctcgtatcgtagacactccatgtaatgaaatgaataccgacacgttcttagaggaaataaacaaggttgggaaggagctcggcatcatacctacgatcatccgagatgaggaattaaagactagaggttttggcgggatttatggagtgggcaaggctgcgctgcatccgcccgctctcgcagtgcttagccacacgccagatggggctacccagacaattgcgtgggttggcaagggcatcgtctatgatacaggcggtctctccatcaaggggaaaactacaatgcccgggatgaaacgagactgtgggggcgccgcagccgtgctgggtgcatttagggccgccattaagcagggctttaaagataacctgcacgctgtcttctgtctggctgagaatagcgtaggccccaacgcaacgcgtccagatgatatacatcttttgtattctggtaagacagtcgaaattaataacaccgacgcagaaggccgcctcgtgttggccgacggcgtctcgtatgcatgcaaggatttaggagcggacattattcttgacatggccactctgaccggtgcgcagggcattgccacaggtaagtatcacgcagctgtgctgacaaactccgccgagtgggaagccgcttgcgttaaagcaggtcgaaagtgtggggatctcgtccaccctttggtgtattgcccagaactacactttagtgaattcacaagcgccgttgccgatatgaaaaactctgtcgcggatagggacaattccccatcgtcctgtgcggggctctttatcgcttcccacatagggtttgattggcctggagtgtgggtgcacctcgacatcgccgcccccgtgcatgcgggcgaaagagcgaccggctttggcgtcgcgctgctgcttgcacttttcggtcgggccagcgaggacccattactgaatctggttagccccttgggctgtgaggtcgacgttgaagaaggcgacctggggagggatagcaagcgtcgtaggctcgtgtag

SEQ ID NO: 26647 - DNA, 618 bp, synthetic construct
  source 1..618: mol_type = other DNA; note = Synthetic coding sequence
atggagaccgacctgaacagccaggaccggaaggacctggacaagttcattaaattcttcgctctcaaaactgtgcaggtgatagtacaggcccgtctaggcgagaaaatctgcactcgtagcagctcttcacctacagggagtgattggtttaatctggcaattaaggacattccggaagtgacccacgaggccaagaaggcacttgcaggccagttaccagctgtagggcgaagcatgtgcgtggaaatcagtttgaagacttcagagggagacagtatggaactcgaaatctggtgtttagagatgaacgaaaagtgcgacaaggagataaaagtttcttataccgtctataataggctgtcgctactgctgaagagcctcctggccattacacgcgtgaccccagcctacaggctttcccgaaagcaaggccatgagtacgtgattttgtaccggatttactttggagaggtgcagctatcagggctcggggagggttttcagactgtacgggtgggaacagtggggactcccgtcgggacaattacgctgagttgcgcctatcggatcaaccttgcctttatgtcaactagacaattcgaacggaccccctag

SEQ ID NO: 26648 - DNA, 117 bp, synthetic construct
  source 1..117: mol_type = other DNA; note = Synthetic coding sequence
atggccgccttcaagctggacttcctgcccgagatgatggtggaccattgcagcctcaacagtagtcccgtcagcaagaagatgaatggcacccttgaccatcccgatcagccatag

SEQ ID NO: 26649 - DNA, 1554 bp, synthetic construct
  source 1..1554: mol_type = other DNA; note = Synthetic coding sequence
atggagaccgacctgaacagccaggaccggaaggacctggacaagttcataaagttcttcgcactgaaaacagtccaggttatcgtacaggctagactgggggaaaagatttgcacccggtcgtcctcctcccctactggcagtgactggttcaatcttgccattaaagatatacctgaggtgacgcacgaggctaaaaaagctctcgcaggtcagcttcctgctgtcggacgttccatgtgcgtggagatctcacttaagacaagcgagggggattctatggaactggagatttggtgtctggaaatgaatgagaaatgtgacaaggagattaaggtttcctacacggtctacaatagattgtctttactcctcaaaagcctgctggcgatcacaagagtcaccccggcctataggcttagccgaaaacagggtcatgagtatgtcatcctgtacaggatttacttcggagaggtgcagctctctggcctgggtgaaggctttcagacggtgagggtcggaactgtcggcacgcccgtgggtacaattacgctgagttgcgcttatcggatcaacctggcctttatgagcacaaggcagtttgagcggaccccaccaatcatgggtataatcatcgatcactttgtggacaggccttaccccagctcgtcaccaatgcatccctgcaattataggactgctggcgaagatacgggcgtgatctatccctctgttgaggatagccaggaggtgtgcaccacatctttctctacatcccctccctcccaactatccagcagcagactgtcttaccagcccgccgcacttggggtcggctctgctgacctggcgtatcctgtggtgttcgccgcagggctgaatgcaactcacccgcaccagctaatggttcccggaaaggaaggaggtgtacctttagctccaaaccagcccgtccacgggacacaggctgatcaggaacgcctggctacgtgtacgcctagtgatagaacccactgtgcagccactcctagcagcagtgaggatacagaaactgtatctaatagttccgagggccgggcaagtccccacgatgtgctcgagacaatctttgtgaggaaggtcggcgcgtttgtgaacaaacctattaatcaagtaaccttaactagccttgacatacctttcgccatgttcgcccctaagaatctggagctcgaggataccgatccgatggtaaaccctcccgactcaccagagactgaatctcctctgcaggggagcttgcattccgacggtagctccggcggctcttccgggaacacacatgatgatttcgtaatgattgactttaagccagcgttctccaaagatgacattctgcctatggacctgggaactttttaccgcgagtttcaaaatccaccacagttgtcttctctctcgattgacatcggggcacagagcatggcagaggacttagacagcctccccgagaaattggccgttcatgaaaagaacgtaagggaatttgacgcttttgtggagacccttcagtag

SEQ ID NO: 26650 - DNA, 768 bp, synthetic construct
  source 1..768: mol_type = other DNA; note = Synthetic coding sequence
atggagcggagcggccagcgggtgaccacctgggactgcgaccagggcaagcactctgactccgcccagaagaacgaaagagaaagtatcagacagaagctggccttgggctcattctttgatgacggccccggaatctacacttcctgttccaaatccggtaagccctcgcttagcagcaggctccaatccggaatgaatcttcagatatgtttcgtgaatgattccgggtccgataaggactccgacgccgacgatagcaagaccgaaacaagccttgataccccactgtctcctatgagtaagcaatctagctcctacagcgacagggacaccaccgaggaggaatctgaatcgttagatgatatggactttctgacgaggcagaagaaactccaagcagaagcaaagatggcgctagccatggcaaaaccaatggccaagatgcaggtggaggtggagaagcaaaacagaaagaagagcccagtggctgatttgttgccccatatgcctcacataagtgaatgtctgatgaaaaggagcctgaaacccacagatcttcgggacatgaccattggccaactgcaggtgattgttaatgatctgcattcacagatagagagcctgaacgaagaactcgtccaattgctactcatacgggatgagcttcacacagagcaagacgccatgctggtggatattgaagatctcacccggcacgctgagtctcagcaaaaacacatggcggaaaagatgccggctaaatag

SEQ ID NO: 26651 - DNA, 78 bp, synthetic construct
  source 1..78: mol_type = other DNA; note = Synthetic coding sequence
atgagccagagcggcgccgtgagctgctgccccggcgccaccaacggatcccttggcagatccgacggagtggcttag

SEQ ID NO: 26652 - DNA, 360 bp, synthetic construct
  source 1..360: mol_type = other DNA; note = Synthetic coding sequence
atggtgctggagggcaaccccgaggtgggcagcccccggaccagcgacctccagcacaggggaaataaagggagctgcgtgctctctagcccgggtgaagatgcccaaccaggggaagagcctattaagtatggcgagcttatcgtgttgggatgttgcgaagagggcggggaggagaccgaagctcagcgaggagaggtcaccggcccccgggcccacagctgctataacggctgcctagcatctggggacaaagggcgccgtaggagccggctcgccctgtctcgacggagtcacgctaacggagttaaacccgatgtcatgcatcatataagcaccccattggtgtctaaagcatag

SEQ ID NO: 26653 - DNA, 348 bp, synthetic construct
  source 1..348: mol_type = other DNA; note = Synthetic coding sequence
atggccggccggcccctgcggatcggcgaccagctggtgctggaggaggattatgacgagacctatatacccagtgagcaagaaatactggaatttgcaagagagattgggatcgaccccatcaaggaacccgagctcatgtggttagcgagagaaggaatagtggcacctctgcctggcgaatggaagccgtgtcaagacattacgggggatatttattactttaacttcgcaaatggccaaagcatgtgggatcacccttgcgatgaacactataggtcccttgtcatacaggaaagagcaaaactcagcacgagtggagccattaaaaaaaagaaaaagaagtag

SEQ ID NO: 26654 - DNA, 471 bp, synthetic construct
  source 1..471: mol_type = other DNA; note = Synthetic coding sequence
atgagcagcgtgcagagccagcaggagcagctgagccagagcgacccttcaccgagccccaacagttgttcttcctttgaactgatcgatatggacgccggttccctctatgaaccagtttcccctcattggttttactgtaagattatcgacagcaaggagacgtggatcccattcaattctgaagacagccagcagctggaggaagcctatagttctgggaagggatgcaatggtcgggtcgtgcctacggatggcggacggtatgatgttcacctcggcgaaaggatgcggtacgccgtttattgggatgaactggcctcggaggtcaggaggtgcacgtggttctacaaaggtgacaaggataacaaatacgtgccatatagcgagtccttctcccaggtgctggaagagacatacatgctcgccgtcactttggacgaatggaaaaagaaactggagagcccatag

SEQ ID NO: 26655 - DNA, 14262 bp, synthetic construct
  source 1..14262: mol_type = other DNA; note = Synthetic coding sequence
atggtgcccgaggagcggcgggtgggcctgagcagcgacgagacctcgagcgattctctcaaatcttggcattcaatttgcgtactggattcaaaagaacagcctctggcctgccagcagaagcaacggcaattcgtcaaaccagtgaccgagtcggagcaacccacagtactggaactactcttggcagagctgaggactctgttcagtgcggtcctgcaggattcttccccggcggcttggaggtacctccacgcggtcctagggctgctgccaccgtaccgcgagctcctagtgggacatctcgatctgctgccttttttggagcagctgtattgctgggccccctgggtacagacgcacctccacctggacctgttgggagcaatagtgcaggcatttccacccgattccagtctcttggattcagcgagccatgctgactgttgcccacagaaaaggcgactgcatcaccgcccaccctgcccggcctgcccctttgtacaggcccagtggtctcggcaacaggtcaaggaagaattggccacatggctccgtcccctgacgctccccgagctgcagagatgcctgggaatcgtgggagcgcaggtggccttagaagaagcggtgtggctcgacggacttagcttgctgcctctggccctggccgcagatataccagtacgctacgaaagcagtgatacagacaacgctgaggtggagcccgtgggcagaaaggagaccagaagtcagttagattacgaagtaccccgcgagaaagcattccagaaaagctctactgggtttagtccggagacatccttcttggattcccaggtgatgacggccttaaagatggaaaggtatctcaagaaaatccactttctctatttgaatgttgcacctagtagatacttccggccatactcgttaatggttgttcctccagacaaagtgaatccggaacattacatcttttcgccattcggaattttgcacgttcaccccgtggaagggtccgagacgatgacactggggacgtggcatcatcattgtgttctctggcagcagctgcagttcataccattcttcaagtattgcttgctgcgcaaatctttcacatgttggaagaagaacgtgaggttgcaggggctccaccgtctgcaaaagttcctggagaaccatcttctactggcagtcccgcatttcggcgctgggcttctccatatctcccgtctgctgcaagaactacatagtgtcagctggttgcctcaggagctggatcggtgctatgaattgcttgatctccaaacagcactggcagaagaaaagcacaaagcattacggctgctacatcgatgcctgaatctgtgtacgtccatcctgagactcgtgcacgaagacacctaccatatgcagcagtgcttacaggaaagagtccagaactgcgaccgaatacggacaggacagggcagtatctatctacaacgagtgcagcacaaacaactggaacagaaactgaagcaggcagaagcttggtggctccagctgggaaagttcgcaaggctcgtggactacatgatttgccagtccctgatctcggttctcgaggaacagatcacatccttcgtggctaacatactgcaggctcctagacagaagcccttcctgtccagtcaactggtgttcgatgatcacggtcaactgtcccacgtgccatgtgtcgagaatatgatccaaactcttactggcgggctgcagtcagtaaagacaagcgctctgcaggtggtccagagcgccgacctgaagacaagttctgattctttatactccgaggaagaggacgaagaggaggactccaaagatgagtttctcatgcctaagtttcagggccagccttccgatgcagtctcaatcttttgcggtcccaacgtgggcttagtctggccatggaagtcccatcccattgctggcattctcgaggtgcgaggatgtaggctgcgagggcaatattttccccataattataagcaattggaggaggatctggataataatcccaagatccagcaggctctaaatatacagcaggtccttctggagggtgtgctgtgcaaggttcaagagttctgtcgggaacaccattggattacgggcatctacgaattcctgcagtcatggggcccccagaaattggaagacatgcgcggcggtcccattaaaaactacgtaaccctcgtgagccgcctgaatgtatggcaggctcgagtcagcagcatgcccattgaactgctgaccaaaggtggcctgctcctgttgagctgtcacgacgttcaggccgaaatggaaagcaagctaaacagtatcaggaaggacatcctagcccacgtccaaaatgaatgctggaatctaagccagcaacttatgaccgagcttaccgatttcatgcatatctttagaacgattaacagcgatattcatgccatagcgcagtgtactcagaagttaaatgaggccaacgaacagtacgtggaactcgaggagcggatggagtatgtgcgggcactgcacgagctgattaggaaccatttttctctcttctcggccgaaaatgaggccctcgacatcagcgtgcgcagacagtttggggaatcccctataccaccttgtccgcccccacctcagcctcatctgctgcactgtcctctgcttgcaccacagctcctggacatgtgggaagccttccagttcgagaagtctcaggcctctgagttcctgttgtccaagagacacgctatcatgcccaagttgcagcagcttatggcagccgccctggccgagttggagggcctcctagctaaggctctttctggacccttcatggatcccacacaagaccagcgatccactgaacatcagctggtcagcctggaaaggcagttccaaaacaccgtctctgatctgagtgaattacatcacgcatatgcgatattcactgaagatgagacacctgttccactgcctatctgcggcactcggcctatagttcaacagcaaaggatatggcatttataccgggttatttctgaaaatattagtgaatggaagtgcatggccttcgcaaagttctcccccgctatggcgcaggaaaagacagagggttggctgactgaggccgcccgaatgtctactacgcttgagctgcatagcccggtcctccagcactgcatgcggattctaggcgaatttcgttcatatctccctctgctgactaagctgggctcactgcatcctcagtccctgaactgccagtgcttactacgggctttaggcctgggctctcttcagactatagagctgctgaccttagggcaacttctgacttatcctctgctggagtttgcagacagaattaatcaggtgtggcagaacgagaacgagcgcattcacgcacaggagactatccgtcggctgcagcgttactgggaagcacgccaactccggcttctgaactttattctccacgtaccgtatgaaccacccgcatccgaaaggtcaaagaggcaggtccttcgaagcccccagtgggaggtggtagacaaagactccggaacgttcatactgtctgactattccaacctgcaggatagcatccaggagtctttgcaggtgctctctaagattctcgctatcgaaaaaagcggggacctcaataagattgccctagaatgggtcgccattatgcatggtctgggagctctccttgaagtatggctaactttccagcagaaatggatctttttgaataaggttcttcatgaaatgaagattcagttcccaaatgccgatctgaacagtcggttcaaggtgatggacgatcagtacaggactctcatgcgcatctccgttgcagatccgatggtactgtctctggtggtcccgtccgccgaacggagcccttacttccagggtcaacagctccagcagttacttcaggccgggtctgtggaactcgagggtattatcatgtctctggagtcagtgctgtacggcgtgtgtgctcactttccgagactatttttcttgagcgactccgagcttgttgccctgctggccgccaggctggagtcttgcgaggcacaactttgggttaggcgttgctttccgcacgtccacgccgtttcctttcggtcttgcccaaccggtgaaaaaaatacagatgattgggagagctcccctaatactcagacacaggtggaggctctcgccgtcttgggggctggtggagaagaagtgaaactccagggccccctcccactgcaccccgatctgccgaagtggctcgctagcctggagaaatgtcttcggctcgctctggtgcatatgctgcagggatgtgtcgctgccagactcgctagaggcccaagcttgggggaggctctgaagcagctacctaagcaaaataaactgtacctgcagctgtacgtccaacactggatcgatctcgtgcaggccttcccttggcagtgtgtgctggtggccgaagaggtcgtgtggagggcagagatggaggaagccctgctggagtggggcacgctggccatggtatctatgcatatgaggaagttagaggttctggtgaatttcatgagagcacagcgcgcctcccaggggggtcagtccttgccatctgttcgccagacaagtttgctgagcgctctgctggtgatggcagtaactcacagggacatcgcccaactcctggagcaacaccaggtgtccgatctgaccgactttcattgggtgcgccagctcaaataccatctgggatctccacatatcatcccaaaaagcccgctgcaatccctgaaaactattgcttcgagcgagccctccctcagtcccgccgcgtgctggatcgatgttcttggtcggtctttcctgtacaactatgagtacctcgggccaagactaggtccccttcccagtctactgccagagagacctgctttggttctcctgttggcactcgaggaggtggcatgcggcaccgtgttagggccgaatggggtgggcaagagggctattgtaaattcgctcgcacaggcgctcggacggcagctcgtgatgttgccttgttctccccagatagaagcgcaatgcttaagcaattacctgaatggagcactgcaaggcggagcttggctactgctggagaaggtacatcagctgccaccggggttgctgagcgccctaggccagcgccttggagagctacaccacctatatgcccctctttaccaggaagccagtcgcaacacgtccaccattgacccaacgcagccacagctgctcgggtcgtcgttcttcgaaaagcaccatgtgtctgtcagactggggtacggctgtctgctcgtgttgagagccttatccagtgctgtgcccgctaacctccacctgctgctcagacccgtcgccctcgctttacctgatctcaggcaggtagccgagcttaccctcctcggcgcgggcatgagagacgcctttcagatggcaactcgactcagtaaattctttagtcttgagcgggagttggtgtcaggacccctgccttgtagactgccactgcttaaacagattcttgaggacacgatacgaacacttaacgtcacaaaggaagaaccaaagtgccagaaacctcgtagcctggcagcgatcgaggaagccgctctgttaagatctcctctctttagcatcctcaacggcctgcatctgcacaacctgcggggcctgctatgcgccctctttccttccgcttcccaggtgttggccgagcccatgacatataaactgatgaaacccctggtggtcgaggagctgcaacaagtgggtctggatccctcccctgatatcctagggtcattggaacaactgtctcaggcgttgtcacgagctagcgggatcttgttgttgggacctgccgggagtggcaaaacaacatgctggcacagcctgttcaagatccagaataggttggccgctatggaggatacttcgacacagggttgtcaaccagttgaaattacccatctgtacccatctgggcttagccctcaggagttcctgggctggctcgaagggtcctgttggcaccacgggatcttccctaaagtgctccgagccgcggggcaatgcaacaatatgggccagaaaagacagactgaggagagcatcggaatacagcattggattatatgcgatggggcatccaatggtgcctggctggatagcatcacctgcctcctgtcagagctgccgcaactgtcccttccttctggccagcagatagcccgcccgcccggaacctttctactgatggaggttgctgataccaccgggatttcgcctaccgtggttggctgttgcgctctggtgtggtgtggcggagagcagacgtggcagtgtatcttgtccgccctgatggcctcgctcccatatgagtaccgcctgcaacatcggaccgtagctgaactgaaccacatggcagaggtgttagtcccagccacactacgtttcctgacatgtcaaggcgtgagctccctcctgcaggttcatggtcaacaggctgtttgcgccggggtggctgaggtgacgagcatggctaggatcctgcacagccttctcgacctgcatctccgtctgaaggaggaaaaggctccgggacctgaagatctgagctattctgaccccgtggcacaatcctttcggtcctctaagagcagcttcctgaaccggagccaagtcgacagcgatgatgtccccgacaaatgtcgagagcacttgctggccgttagtagctttttattcgcattaatttgggggtttggggcacacctgccctctagattctggcctatcttcgatactttcataagggactcaatttcgcgcctcagcaactatcccgaacccccgccctctgcgcttgtgtttgatctccacgtgagccctgaagacggtaccctggtgccatttacggggcagtacttgagcagtcacataaagggcactcttggtacctttcaccccagcattcaaactgaacgtttactttacgtggttgaccttttgttgtccggcggtcaaccagtgctcctagccggcgaagccgcgaccggaaagtccgcgttcgtggaagtgctggtagagccccaccacccctacatatactcgcctatccacccagcattctcctcctcgcacctccgtctgcttctgtctcgcgggattcaaggacagacacaggcatcccctcagccaggacatcaccaggattcaaaaccgtctctgctgtttctactggaagacctgcacctggcaacaagcgaccccgaaaagtcctgtcagccagttttagaaacgctgagacaggccatggatggtaccgtctacgcccactctaccctagaactacagaccctgcaacctaccgtgaacttcttagccactgtgactgtgcccggttactgtgagcggcctctctgtccccgcctgttcagattgtttactgtgctggcccttgaatccatgacccaggcaacactgctggagcggcacgttcccattatccaggcctggctggagagattcccatcggtggaacgagaaagagctttagccagaggtctcgtccgggcttccgtcgaggcctgggaggcggtatgcaactgctttatgccttcgccgttacatccccattaccactttagcctccactccgtctctcacctgctctcaagcctgcagcttctgccaaaccggacaggctctagagggtttgtcgattaccctaatcaccaggaacatcttagaagggtctcaggactccgtggtacgtgtctgaccgtcatgatggccactcgcaacgtcgtgaggctgtggcttcatgaggctcagaggactttctgcgatagactggactcaccgagggaacgttcgtattgcgctaaactgctcctggtcgtggcccagtctgtcttctgttgtggccccgggccacaacacttgggtaaggaccaccaagagtcagaagaggaagaagaggaggagcgcgttcctgaggtggaaagtgaaggggaactagctcagtgggaagacttctccaatagcaattccgaaacggaagaggaagaagagccatatggcctacaggttgccagagtgagtaactccagagatccctcactaacaccttccatcgggcctgtgtcccggggcatgaaggagagcatcagccataagataagacaagaaaaagggacccgcgcttccaactacaggctgcaggtgagacgtagctttaagacatggtggcagaaaaagccacagatggacctcattagtcccctgctgttgccggtgctgttgcttcacccccaggaaaagccatccgacttggtgttctcccaggaattgatccttggccctaatagcgagaccccaaatctctacctggagcgccagtgggaaaagctggaggagcagctcgccacaagtgcagcccagctcaaactaagcccacatcttgcccgctgtcacagcatggctcaacacgtcgctcggcttgtacgtgtcctcgctcgtcctaggcagcacggcctgctactatccggggcgctcgggactgggcgccacacggctattaccttggcaagttcaatatgtcaagcccatttcttccatctgccctctggtagtgaagaagccatcctccagtgcctgagggacgcatcctggcatgctggtatgctgagccagcctgtggctctcctggtacccagcggggtcgacttaaccacgcttcaccggctcctcgccctggctacctcggggagtttcccggggcagtataccgaagcagatttagatcgtatcggcgagcatctccctagagaaaacctgggcgtgaaacagaacattaagaaggagatggtcttacagcggtttcatcagcaggtttgtagccaccttcacttgttctttctcatcggggacaagcaagcacacaagcaacttccctctaccttgttcctgcgcctgctccagttggctactgctagcatcgatagatatgaaccttgggatcaggccgcactcgcgaaagtggcacagcaccacctcgagggagcccagtccgtgcctttggacgacggatcatggaagtatcctgacctgcaggccagcattccgagcgtcgctaaagcgatggcactaattcacctgagcgctactcactaccacgaacacttatgccctgcactgcctctggtcactcctaagactttccttgatttcctagacacgtttttgatgctgcagcagcagacaatacttaagattaagaacaaggcacagagggtgcagaatgcactggagaacttaaggatgctgatcaaagaacacgggacccacgcgaatttgatattcgaccttgaacagcagctgaaagactctgggaagtctctgtcgatgttccagcagcagctggaacagtcgaaactcctgtacaagcaacaattggaagaatgcaggcatcaagaaaaccttatcgagaacctggctaggcagagagatgcactgcaggctcagcgggaggcctttctggagcagatgagtaaagccttcttggagcctctgagtcaattgcaagttgcagactttgaagagataaggagctaccgcgcccctcccgagtcagtcgtgagggtgacagacgctatgtgcgacctttttcaccatgaaaccggctgggcctccgccaaacaactgttgtgtacagaagacttttaccaggaactcgtattcttccctaaggagaagatcacagatagcgaattaattaaactccacctgattcttaaggcacctggcatggacgacgctgctcttcgtgcagttagccgacccgcagcaagcctggcagcatggttgtgggccgttcttcactacggcctggctcactgcaggggtttgcccacagatctgctattacagcaagtggaagctactctcacaagggagcaggcccgtctcggctattaccaatttcaggctcaggaaactctcgagcataatttggcccttgctaagatggtagaagacgcccaagcctcgcacaactgtgtagctaagactctgtctcaggctcagtgtgggcaatatcataagtggcccatgaaggcagcccttttgacccccatgcgggcttggaccacccaactgcagaagttgaaaggacggtgcatgaccgtctttggggacactctcttatgctctgccgccattatatacctgggtcccttcccaccacttaggcggcaggaactccttgatgagtggctggccctgtgcaggggcttccaggaggcactgggtcctgacgacgtggcccaggcactgaagagaaagcagaagagcgtgagtatacctcccaaaaaccctcttctagccacccactcccctttctctatcttatcgctactttcaagcgagtccgaacagtatcagtgggatggaaaccttaagccacaggccaaaagcgcacacttggccggtttactgctgcggtctcctacccactacagcagttgtagatggccacttctcctcgacccaagcaatgaagcactgatttggctggaccctttgcccctggaggagaatcgtagtttcgcccctgctctaaccgaaggccgcgggaagggtctaatgcgaaatcaaaagcgcgaaagcaagaccgacatgaaggaagaggacgatgagtccgaagaatctaatgaagctgaggatcagaccaaagaacagaaagcggaagagagaaagaatgagcaggaaaaagagcaggaggagaatgaagagaaggaggaagagaaaacagagtcacaggggtctaaacccgcatacgagactcaactgccaagcctgccctatctgtcggtgttaagtggcgccgaccccgagctcggttctcagttacaggaagcggcagcttgcggactaccagtgctgttaaccaatgtagaactggggctgggctgcgaagaactgcagtggttactacagagggagcagctgagcccgccacaagtgcagccggggttctgcctctacttaagcactacccttagcctctgcgctatggaaaaggttctggggtgtgagttgttaaaaggactaaacgtcctcgacctgggattaaatatggagattctggaggaacagatgttgcacgaaattctgtgtcgcgagtatccagaactggaaacgcggtggcaggacctgaagattcgagccctagacacatgcaaggctgtggaagcagcagaggagcgccttttaactatgctgctcttccagaatccaaagcgccagaagcctgccaagtttctgcggaatattgtcagggcacagggaaaactctgtcagctgcgcgcacactgcgaagagctcgagggccagaagttgcaggaaatggtgctgtgggcgccctatagaccggttgtgtggcatggaatggcaatggtgaaggccctctctcaattgcaaaatctacttcccctgttttgtatgtcccccgagaattggcttgctgtgactaaacaagcactggattccatgaagcccagagagatcaatcacggcgaggacctagcctcgcatctgctgcagctgcgtgcccacttaacccggcaattgttgggctcgacagtcacagcgctcggactgacacaagtgcctctggtgggtgctctgggcgccctggcacttcttcaagcgacaggcaaagcctccgaactggaacgcctagctctttggcccggcctggctgcaagcccctctactgtgcactcaaaaccagtttccgatgtggcccggccagcctggttgggccccaaagcttggcacgaatgtgaaatgctagagctgttgcccccttttgtgggtctctgtgctagtttggcagggcactcttctgcttggcaggcctacttgtcccttagctccacggtgctcggccccgcacccggccccggtccagagcctctcagcttacttcagaaactcatcttgtggcgtgtactgcgtccggaatgcctggcaggcgcactggctgactttacaacatcgctcctgggccgacccttggacgaaaatacatacgcacccacaatgccattcaagcatagtcaggccactcaacctatgctgatcctgctgcctccacccggccatccgtctgctaccttgcatccccttaccgtcattcaaaagctcgctgctaaatatcagcagggacaaaaacagctgcaggtgatcgctctgggatcagaggcgtgggaccccgtcagcgtagtagtctcgaccctttctcaggcgatgtacgaggggcactggctggtcctcgacaactgccacctgatgccacattggcctaaagaattgctacagctgctcctggaactgctaggacgagccaaggtggtcgccgaccttgagtctgagcagctgctcgaccagccggaaagtcggaacgtgtctactgtgcatagggactttaggctgtggctgatcgtgccagctgagtcatctgcaagcctgccagccgtgctgacacaacactctatgcctgtgttctggaatcagtccttagaactcggacacgtcctcattgactcagtggaacttgctcagcaggtgttatacatgcagccacccactcaggccttgccactgctcctcctgcacgggctcctgcttcataggcaactctacggaacccgactgcaggcccatcgggggcgatggagtcaggtgacactcactcaagtgctgcagactcaggatcagctgtgggcctccctcagtaatccccgggctgccatgcaagagctggccgctagtgtcttttacggaggtccactgggagatactgaggacagggaggcactgatttcgctgactcaggcttgcctctctccctcatctggcagctgggtgcagcctcacactcctcaatccctgcttgccacactgatgcccctcccggaattaagagaattagacgctatggcagagtgcaaggcacaaatgcacttactgccaagtcctccagagcctaggctatgcgggctgtccgaagggcctcaggcctggctcctgcggaggcagagtagagctttattgtccgccctgcagcgcagctccccagtgtgggtgccggaatcgagacggggtgctcagctggcagagaggcggttgcggcaacgactcgttcaggtcaatcgcagactggaaagtcttcaagaccttctaactcacgtaataagacaggacgaatctgatgcaccatggtctgtactggggcctaacgccagaaggcctctggagggagtgctggaaaccgaggccttggagctgtcacagctcgtcggaactcttcagagagacctcgactgtctactgcaacaactgaagggcgcacctccttgtccaagcaggagatgcgccgccgtggcgcatgctctctggaccgggcggttgccgctcccatggaggccgcacgcgcctgctgggccacagcccccttggcattggctgaggcagctgtcacgccgcggccagctgcttgttcggtatttaggtgttggagccgatgcatcttcagacgtaccagaacgcgtgttccacctgagtgctttccgccaccccagacgactcttactcgctctgagaggagaggccgctctggaccagaatgtgccgtcttcaaatttcccagggtccagggggtctgtgagtagtcaactacagtataagagactggaaatgaacagcaatcccctccatttccgcgttgaaaatggaccaaatccaactgtgcccgaacgaggcctcctcctcatcggcctacaggttctgcatgccgaatgggatccaatcgcaggcgcccttcaggacagccctagctcacagccctctcccttacctcctgtatccatatccacacaggctcctggaacttcagacctgcccgcccctgctgatctgactgtgtattcctgtccggtttacatgggcggccccctcgggacggcaaaactgcagtcaagaaatatcgtgatgcacctccccctgccgacgaagctgacacccaacacttgtgttcagaggagggtacatgtttgcagtccccccctgagctag

SEQ ID NO: 26656 - DNA, 390 bp, synthetic construct
  source 1..390: mol_type = other DNA; note = Synthetic coding sequence
atggtggccatggccgaggccgaggccggcgtggccgtggaggtgcgcgggctgccaccagctgttcccgacgaacttctgacactgtattttgaaaatagacgccgtagtggaggaggccctgtactgagctggcagaggctgggctgtggaggagtcttaaccttcagagagcctgctgatgcagaaagggtcctcgctcaagctgaccacgagctgcacggcgcccaattgtccctgcgcccggctcccccccgggctcccgcgcgcctgctgctacaaggcctgccccccgggacaacgccccagcggctggaacagcacgttcaggcactcctaagggcaagcggattaccagttcagccatgctgtgccctggctagtccgtag

SEQ ID NO: 26657 - DNA, 867 bp, synthetic construct
  source 1..867: mol_type = other DNA; note = Synthetic coding sequence
atggagcgggagcccagcgccagcgaggccgcccccgccgccgccgctttgtttgcttggggcgctaactcttacggacagcttggcctcggacataaggaggacgtcctgctccctcagcagctgaatgatttctgtaagcccaggagcgtgcggagaatcactggcggaggtggacacagtgctgtggtgactgacggcggggatttgtttgtgtgtggtttgaataaagatggtcagttgggactgggccatacggaagacattccctattttaccccttgtaaatcacttttcggatgtcctatccaacaggtcgcttgtggttgggacttcaccatcatgctgaccgaaaacggccaagttctcagttgcggctccaattcctttggccaactaggagtgccgcacggcccaaggagatgcgtggtgccccaggccattgagctgcacaaagaaaaggttgtgtgtattgccgccggacttcgccacgcggtcgctgcaaccgcctccggcattgttttccagtgggggactggcctcgccagctgtggacgacggctgtgccctgggcagacactgcccctctttttcaccgccaaagaaccttctagagtaactggactggagaacagcaaagctatgtgtgttctggccggatctgatcacagtgcatcactaactgatgctggcgaggtttacgtgtgggggtccaataaacacggccagctggctaacgaggccgcgttcttgccagtccctcagaagatcgaggctcactgtttccagaatgaaaaggttactgccatctggtcaggatggacacatctcgtggctcagacggggctcctgtggctccgagcttag

SEQ ID NO: 26658 - DNA, 372 bp, synthetic construct
  source 1..372: mol_type = other DNA; note = Synthetic coding sequence
atgaaccggcggcggaagttcctgctggccagcgtgctggccctgcagaactcctcatttatctatcctagttgtcagaagtgcttttcacggatcattctggtgagcaaaaggagcaactgtccaaaatgcggcagcaccggcgagtccgggaacgcaaattatcgatataagcttagcctaaaggttgcagagtctaacaagctttttgtcattacggtcttcggtagctgcctggataccttctttggcttgaccgccacaggtttacacaggtacatccaggatcccaataagattcccgagacactcgacaatgacactacccagaacctcttaacaaaggccgtggagacgtgctttgttggctag

SEQ ID NO: 26659 - DNA, 324 bp, synthetic construct
  source 1..324: mol_type = other DNA; note = Synthetic coding sequence
atgctgcggctgtaccccggccccatggtgaccgaggccgagggcaaaggagggcccgaaatggcaagcctgagttcaagtgtcgtgcctgttagtttcatatccacactgcgggagtcagtcctcgaccctggcgtgggtggtgagggtgctagtgataagcagcgatcaaagctgtccctgagtcattctatgatcccagctgccaagatccatacggagttatgcctgccggcctttttctccccggcaggaacacaacgccggtttcagcagccgcaacaccatttgacactttctataatccacacagccgcacgctag

SEQ ID NO: 26660 - DNA, 1653 bp, synthetic construct
  source 1..1653: mol_type = other DNA; note = Synthetic coding sequence
atggagaccgacctgaacagccaggaccggaaggacctggacaagttcattaaattcttcgctttaaaaacagtgcaggtcatcgtgcaggcaagactgggcgagaagatttgcacaagatcctccagctcaccaacagggtccgactggttcaatctcgccatcaaagatatacccgaggtgacccacgaggccaaaaaggctctggctgggcaactaccagctgtcggtaggtccatgtgcgtcgaaatcagtctgaaaactagtgaaggtgatagcatggaactggaaatctggtgtctcgagatgaacgagaaatgtgacaaagagataaaagtctcctataccgtgtacaatagactaagtctgttactcaagtccttattggccataactcgcgttacacccgcttacagacttagtcgcaagcaagggcacgaatatgtgatcctctatcggatatacttcggtgaagtccagctttctgggctgggcgaaggcttccagaccgtgagagtgggcacagtaggcactcctgttgggaccattacactaagctgtgcttatcgcatcaatctggccttcatgagtacaagacaattcgagcggacgccccccatcatggggattatcatagaccatttcgtggaccggccatacccttcgtcttcccctatgcacccatgcaattaccggacagcaggcgaagacactggggtgatatacccgtccgtcgaggactcccaggaagtgtgcacaacgtcctttagcacctcccccccgagccaatgcgtttttaccgtgactaaggcccactttcagactccaacccccgtagtaaccgacacattaagagttcccatggctgggttggccttctcgcaccagcttagctcatctcgtctgtcttaccagccagctgccctaggggtggggtctgctgacctggcctatcccgtcgtgttcgctgccgggcttaacgcgacccatccacaccagctcatggtcccagggaaggaaggaggggttccgctggcgcccaaccaacccgtgcacgggacccaggctgatcaggagcgtctggccacctgcactcctagtgaccggactcattgcgctgccactcctagtagctctgaggataccgaaaccgtcagcaattcttctgaaggaagggcaagtccacatgacgtgctcgagaccattttcgtgcgaaaggtcggcgccttcgtgaacaagcccattaatcaagtgacactgactagcttggatattccgtttgccatgtttgcaccaaaaaacctggagctcgaagataccgatccgatggttaatccacctgacagcccagaaacagaatccccgttgcagggcagtctgcacagtgatggctctagtggaggctcaagtggtaacacccatgacgactttgtgatgatcgacttcaagccggcgttcagtaaagatgatattctcccgatggaccttgggactttctaccgcgaatttcagaatcccccccagctaagttccctgtcgatagacataggagcacaaagcatggctgaagatctcgattcgctaccagagaagctggccgtccacgaaaaaaatgttcgggaatttgacgcgtttgtggaaaccctgcagtag

SEQ ID NO: 26661 - DNA, 4104 bp, synthetic construct
  source 1..4104: mol_type = other DNA; note = Synthetic coding sequence
atgggcaacagcgacagccagtacaccctgcagggcagcaagaaccattctaatactataacaggtgcaaagcagattccatgctccctgaagatcaggggtattcacgcgaaggaggagaagtctctgcacggctggggccacgggagcaacggcgccggctacaaatcgagatcattagccaggagttgcttgagtcactttaaatcgaatcagccctatgcaagccggctgggagggccgacctgcaaagtttctagaggcgtggcctactcgacacacaggacaaatgcgcctggtaaagactttcaaggcatcagtgcagccttcagcacagagaacgggttccactcggtcggccatgagctggcggataatcacataactagtcgcgactgtaacggacacctgctaaactgttacggccgtaacgaatcaatcgctagtacccctcccggagaagaccgcaagtcgcccagggttctaatcaaaacgctcggaaaactagacgggtgtcttagagtcgagtttcacaatggaggaaaccctagtaaggtacccgcagaagattgctccgaacctgtgcaacttctgagatacagccctaccctcgccagtgagacctcaccagtccccgaggccagaagagggtcttctgctgacagccttcctagtcatcgccctagcccaaccgactccagactgagatcttccaagggctctagtcttagcagtgaaagttcctggtatgattcaccgtggggcaacgcgggggaacttagtgaagctgaaggatccttcctcgcaccagggatgcccgatccctctttgcacgcttcattccctcctggcgatgccaaaaagccttttaaccagtcatccagcctgtctagcttacgtgaactgtataaagatgccaatttgggttccctttcacctagcgggatccgcctcagtgatgagtacatgggcacccatgccagcctgagcaacagggtatccttcgcctctgatattgacgtgccatctcgcgtggcgcatggagaccctattcaatattcaagcttcacactcccatgccgaaagccaaaggcatttgtggaagacaccgccaaaaaggattcgctgaaggcacgaatgagaaggatttccgattggacaggctccctttcacgcaagaagcgcaaactccaagagccgagatccaaggagggatctgactacttcgattccaggagcgacggacttaacacagacgtccaggggagcagccaggcgtccgccttcctttggagcggcggctcaacccagatcttaagccaaagatccgagtctacgcacgccatcggctcggaccctttgaggcagaacatctacgaaaatttcatgagagagctggaaatgtctaggaccaatactgagaatatcgagacgtccacagagacagccgaaagctcttccgagtccctgagctctctggagcagcttgatttgctgtttgaaaaagagcagggcgtggtccgaaaggccggttggttgtttttcaaaccgttagtcacagtccaaaaagaacgaaagctggagctcgtggccagaaggaagtggaagcagtattgggtgaccctgaaggggtgcaccctgttgttctatgagacctacggcaagaactcaatggatcagagtagtgcacccagatgtgcgctgtttgccgaggattcaatcgtgcagagcgtcccagagcaccctaagaaagagaacgtcttttgcctttctaacagttttggcgatgtttacttattccaggccacgtcccagacagaccttgagaattgggttacagcggtccacagcgcgtgtgctagcctttttgctaagaagcatggcaaagaagataccctaagacttctgaaaaatcagaccaaaaatttgcttcagaaaatagatatggactctaaaatgaagaagatggctgagctgcagttaagcgttgtgtcggatcccaagaatagaaaagcgatcgagaatcaaattcagcagtgggagcagaatctcgagaaatttcatatggacttgttccggatgcgatgctaccttgcatcactacagggtggggagctccctaatcccaaaagtctactggctgcagcatcaaggcctagtaaactggccctgggccgactggggattctgtcagtttcctccttccacgcactggtttgctcccgcgacgacagtgcattgagaaaaaggactctctctttgacccaaaggggccggaataagaagggtatattttcgtctctgaaagggctggatacccttgcacgtaagggtaaggaaaaacggccctctataacacaggtggacgaactgctccatatctacggtagtactgtcgacggtgtcccccgggacaacgcctgggagatacagacatatgtccatttccaggataaccacggcgtcactgtgggcataaagcccgagcaccgcgtggaagacattcttactctggcctgtaaaatgaggcagctggaaccaagccactacggtttacagctgcgaaaactggtcgacgataacgtcgagtattgtatcccggctccgtacgagtatatgcagcagcaggtgtacgatgagatcgaagtgttcccccttaatgtgtacgacgttcagctgactaagacagggagcgtctgcgatttcggatttgcagtgaccgcccaggtagacgagaggcagcatttgtctcggatcttcataagcgatgtgctccctgacggtctggcatacggcgagggccttcggaagggaaatgagatcatgactcttaatggggaggccgtcagtgatctggatctcaagcaaatggaagctctcttctccgagaagtcagtcggtctcaccctgattgcccgccctcctgacaccaaagccaccttatgcacctcgtggtccgacagcgaccttttttctcgggaccagaaatccctgctccctccgccaaatcagtcccaacttttagaagagtttcttgacaatttcaaaaaaaacacggctaacgacttttcaaacgtccctgacatcactaccggccttaaacgcagccagacagatggaacactggaccaggtgtctcatcgcgaaaagatggaacaaacatttaggtccgcagagcagatcactgccctatgcagatcctttaacgactctcaggccaacgggatggaaggccctagagagaaccaggacccacctcctcgatccctagctcgccacctttcggatgcagaccggcttaggaaggtgatccaggaacttgttgatactgaaaaatcatacgtgaaagacctatcctgcctcttcgagttgtatctggagcctctccaaaatgagactttccttacccaggacgagatggagtcactcttcggctccttacccgaaatgctggaattccagaaggttttccttgaaactttggaggatggaatttctgctagttccgacttcaatactctcgagactccctcccagtttcggaaactgttgttttccctgggagggagcttcctatattacgctgaccacttcaaactgtattccggcttctgcgcaaaccacattaaggttcagaaggttctggagagagcaaagaccgacaaagccttcaaggcattcttagatgcacggaatccaacaaagcagcacagctcaaccctcgagtcttatctgatcaagccggtgcagagagttctgaagtatcctctgctgctcaaggagctggtgtcattaaccgaccaagagagcgaggagcactaccaccttaccgaggcgctgaaagcgatggaaaaggtggctagccacataaatgagatgcaaaaaatttacgaagactacggaacggttttcgaccagctggttgcagaacagagtggaactgagaaggaggtcacagaactcagtatgggggagttgctcatgcactccactgtatcctggctcaacccctttctgtccctcggcaaggctcggaaagaccttgaactcaccgtctttgtgttcaagagagctgtgattctcgtgtacaaggaaaactgctag

SEQ ID NO: 26662 - DNA, 45 bp, synthetic construct; identical to SEQ ID NO: 13114
  source 1..45: mol_type = other DNA; note = Synthetic coding sequence

SEQ ID NO: 26663 - DNA, 519 bp, synthetic construct
  source 1..519: mol_type = other DNA; note = Synthetic coding sequence
atggtggccatggccgaggccgaggccggcgtggccgtggaggtgaggggcctaccaccggcagtacccgatgagctgctgacattgtatttcgaaaacagaagaagatcgggtggcgggcccgtcctatcatggcagcgtcttggttgtggtggggtgcttacattccgcgagccagctgatgccgagagggtgctggcccaggcagatcacgaactgcatggcgctcagctttcccttcgcccagcccctccccgcgcacctgcaagattgctcttgcagggattgccccccgggactactccgcagaggctggagcaacacgtgcaagccctgttaagggcttctgggctcccagtgcagccctgctgtgctcttgcatctcctaggccagatcgggctctggtccagctgcccaaacctctgtctgaagccgatgtccgagtactggaggaacaggctcagaacttgggactggaggggacactggtttcactggcccgggttcctcaagcttag

SEQ ID NO: 26664 - DNA, 27 bp, synthetic construct
  source 1..27: mol_type = other DNA; note = Synthetic coding sequence
atgttctggaagttcgacctgcactag

SEQ ID NO: 26665 - DNA, 411 bp, synthetic construct
  source 1..411: mol_type = other DNA; note = Synthetic coding sequence
atggtggccatggccgaggccgaggccggcgtggccgtggaggtgcggggactccctccggctgtgccagatgaattactcaccctgtactttgaaaacagaagaagatcaggaggtggcccagtgctcagttggcagcgactgggatgcggaggcgttctgacctttagggaaccagccgacgccgagcgggtgctcgctcaagctgatcatgaacttcatggggctcagttgtcccttaggccagctcctccacgtgcaccagcccggttgctgttgcagggactgcccccagggaccactcctcagagattagaacagcatgtgcaggcactgctgcgggcctctgggctccctgtccagccttgctgtgctctggcttcgccccggcctgatcgtgctctggtgtag

SEQ ID NO: 26666 - DNA, 5844 bp, synthetic construct
  source 1..5844: mol_type = other DNA; note = Synthetic coding sequence
ggccggcccatcgacccccgggagggccccggccggccccccctggatggccgagaccattttggtaggccaccggttgatataagagagaacctcgtccgaccaggaatcgaccatctgggaaggcgcgatcacttcggattcaacccagagaaaccttgggggcaccgaggcgactttgacgagcgggagcatcgagttctgcccgtctatggcggccctaagggactgcacgaggagcggggccgtttcaggagcggcaattaccgctttgatccccgctctggaccttggaacagaggatttggacaggaagttcaccgtgattttgacgaccgcagacggccatgggaacggcagagagacagagacgatcgtgactttgatttttgccgagagatgaacggtaaccgactgggccgcgaccgcattcaaaacacatgggtgcctccacctcacgccagagtgtttgactatttcgagggagcaaccagccagagaaagggtgataatgttccacaggttaacggagaaaatactgagagacacgcccaacctcccccgatcccagtacagaacgatccagaattgtatgaaaagcttacatcatccaacgaaattaacaaggaaaaaagtgataccgttgctgatatcgagtccgaacccgtagtggagtctacggagaccgaagggacaccattgacaagcctgactgccgagacgcggcggcaagttaagatggggaattccgatagtcagtatactttgcagggcagtaaaaatcactcaaacaccataactggagcgaagcaaattccttgttctttgaagatccgcggaatacacgccaaggaagagaaatcactacacgggtggggccacggatccaacggagctggctacaaaagtcgaagcctggcccgtagttgcctgagtcatttcaagtcgaaccagccatatgctagccgcctggggggaccaacctgcaaggtatcaaggggagtggcttatagcacccacaggaccaacgccccaggcaaagatttccaggggatcagtgctgctttctcaaccgagaatggatttcactccgtgggccacgagttagccgataatcacatcacctcacgagactgcaacggccatctgctgaattgctacggccgaaatgaaagcatcgctagtacaccaccaggagaggatcgtaagtcaccacgcgtgctaattaaaacactcggtaagctcgacgggtgcctgagagtcgagttccataacggtggtaatccttccaaggtgccagccgaagattgcagcgaaccagtccagctgctaaggtatagccccaccctggccagtgagacgtccccagtgcccgaagcacgcaggggctctagcgcagatagcctgccctctcacaggccctcacccacagattcacggctacggtctagtaaagggagcagtcttagcagcgagtcaagctggtacgacagcccatggggaaacgctggggagctgtccgaagccgaggggagcttccttgctcccggcatgcccgatccatccctccacgccagcttccctcccggagacgccaagaaacccttcaatcagagcagctcactctcttccctgagagagctgtataaggatgcaaatcttggttctctgtccccatccggtatcagactttccgatgaatacatgggaactcacgcctctctgagcaatcgcgtgagttttgcttccgatatcgatgtgcctagtcgtgtagcgcacggtgacccaatccagtactcatcttttactcttccatgtagaaagcccaaggcgtttgtggaagacacagccaagaaggactctcttaaagctcgaatgaggaggatctcagattggactggctctctctccagaaaaaaaaggaagctgcaggaaccccggtccaaagagggctctgactattttgattcacgttccgacggtttgaacactgatgtgcagggaagctcccaggcaagcgcctttctctggtcaggcggttccacccaaatactctcccaacggagtgaatctacccatgccattggatccgaccctctgagacagaacatctatgagaatttcatgcgggagctcgaaatgtccaggacgaacaccgagaacatcgaaacaagcaccgaaactgccgagtcttcctcagagtcgctctcctcccttgaacagcttgatctgctctttgagaaggaacagggggtggtgaggaaagccggctggctgtttttcaaaccgttggtgacagttcagaaagagagaaagcttgagctggtcgcccggagaaagtggaaacaatattgggtgaccctgaaaggctgcacacttctgttttacgaaacttacggtaaaaactcaatggaccaaagtagtgctccgaggtgtgccctattcgcagaggactctatcgtacagagcgtccccgaacacccaaaaaaggagaacgtgttctgtctttctaattcctttggggatgtctatctctttcaggctacgtcccaaacagaccttgagaactgggtcacagcagtacacagtgcatgcgcatctctgttcgcgaaaaagcacggaaaagaggacacccttcggcttttgaaaaaccagacgaagaatctgctgcagaagatagatatggattccaaaatgaaaaaaatggccgagctccagctgagtgtagtttcagatccaaaaaatcggaaagctatcgaaaaccagatacagcagtgggagcagaatcttgaaaaattccacatggacctattcagaatgaggtgctacctggcctcactccagggaggggagctgcctaatcccaagagtttgctagccgctgcatctcgtccatccaaactggctctgggcaggctgggcatactgtctgtctcatcattccatgctctcgtctgttcgagggatgacagcgccttgaggaagcgaactttgtccctgacgcaaagaggcagaaataagaagggaattttttcttccctgaaaggactcgacaccctagctagaaaaggaaaggagaagagacccagcattacccaggtggatgagctgctccacatctatggaagcacggtggacggtgtgcctagggataacgcctgggagatccaaacttacgtgcattttcaggacaaccacggcgtgaccgtgggcatcaagcccgagcacagggtcgaggacatcctgacactagcctgcaaaatgcgccaattggagccatcgcactatggcttacaactcaggaagctggtcgacgacaatgtggagtattgcataccagcaccctatgagtatatgcagcagcaagtgtacgatgaaattgaggtgtttccgcttaatgtctatgacgttcagcttactaagaccggtagcgtgtgcgacttcggttttgcggtgacagcccaggtggatgagagacaacacttgagcaggattttcataagcgatgtgctgcctgacggcctggcctatggggaggggctgagaaaaggaaatgagatcatgactctgaacggagaagccgtatcagatttggacctgaaacagatggaagccttgttttcagagaagtctgtcgggctcaccttaattgcaaggccgcctgacacgaaggccaccctctgtacgtcatggagcgatagcgacttgtttagtcgagaccagaagtccctgctccctccacctaatcagagccagctgctcgaggaattcctcgacaattttaagaaaaataccgcgaatgacttcagcaacgtccctgacattactacaggtctcaaaagatcccagacagatggtacactcgatcaggtgtcacatagggagaagatggaacaaacctttcggagtgctgagcagataactgcactgtgtaggtcatttaacgattcccaggctaacggaatggaaggcccccgggagaaccaggaccccccaccccgctccctggcacggcatttatcagatgccgacagacttaggaaggtcatacaagagttggtggatactgagaagagctacgtcaaggacctgtcatgcctcttcgagctgtatctggaacctttacaaaacgaaacgtttctgactcaagacgaaatggaaagtttgtttggctcccttcccgagatgttggagtttcagaaggtgtttctggaaactttagaggatggcatttctgctagctccgatttcaacactctggagactcccagccaatttcgaaagcttctgtttagcctgggggggtcctttctgtattacgcagaccacttcaagctgtattccggcttttgcgccaaccatatcaaagttcagaaggtgctggagagagccaaaaccgacaaagcatttaaggcatttctggacgcccggaatcctactaagcaacattcctctacactggagtcatacctgatcaagccagtacagagggtcctgaagtacccccttctgctaaaagaactggtgagtttgaccgaccaggaaagcgaggagcactaccatctgactgaggccctcaaggccatggaaaaagttgcgagtcacataaacgaaatgcagaaaatttacgaggactacggcacagtcttcgatcaacttgtggccgagcagtccggtactgaaaaggaagtgaccgagctatcaatgggcgaactcctgatgcacagtaccgtatcgtggctgaatccctttctaagtctcggaaaggcccgcaaggacctcgagctgaccgtgttcgtgttcaaaagggccgtgattcttgtgtataaggagaattgtaaactgaaaaaaaaactacccagtaacagccgtcccgcccacaactcaaccgaccttgatccctttaaattcagatggctcatccccatcagtgccttacaagtcaggttgggaaatccagcgggaactgagaataattctatctgggagctgattcataccaaaagcgagatcgaagggcgtcccgagactatctttcagctgtgctgttccgacagtgagagtaagacaaacatcgttaaggtcatacgcagtattctgcgtgaaaacttcaggcgacatattaagtgtgaactgccattggagaagacatgtaaagaccggttggtccctctgaagaatcgggtccccgtgtctgctaagctcgctagcagccggagtctgaaagtgctgaagaactcctcctctaacgagtggactggagaaactgggaaggggactcttctagactcagacgaaggatctctttctagcggaacacagagcagcggctgtccaaccgcagaaggaagacaggactcgaaaagtacatctccaggtaaatacccacatcctggactggctgattttgccgataacctcattaaggagagtgatatcctcagtgatgaagatgacgaccaccgacagaccgtcaaacagggaagccccacgaaggacattgaaattcaattccagcgtctacgtatcagcgaagatccggatgtgcatccggaagctgaacagcagcctggaccggagtcaggggaaggacaaaagggaggcgagcagcctaagttagtcagaggccacttctgtcccatcaagcggaaggctaacagtaccaagcgcgaccgcggtacactgctgaaagcacagattagacaccagtcactggattctcagagtgagaatgccaccatagaccttaacagtgtgctggagagagaattctctgttcagtctttgactagcgtcgtgagcgaggagtgcttctacgagactgagtctcacggtaagtcatag

SEQ ID NO: 26667 - DNA, 294 bp, synthetic construct
  source 1..294: mol_type = other DNA; note = Synthetic coding sequence
atggaggccgccgacgccagccggagcaacggcagcagccccgaggccagggacgcgcgaagcccgagtggaccttctggttctttggaaaatggcactaaggccgacggaaaggacgcaaagaccacaaacgggcatgggggtgaagctgccgagggaaaaagtctgggcagcgccttgaaacccggcgaaggtagatcagccctctttgccggtaacgaatggcgacgaccaatcatccagttcgtggagtctggggacgacaaaaattctaactacttttcgatggactag

SEQ ID NO: 26668 - DNA, 117 bp, synthetic construct
  source 1..117: mol_type = other DNA; note = Synthetic coding sequence
atggaggccgccgacgccagccggagcaacggcagcagccccgaggcaagggatgccagatccccctctggtccatctggatcactcgaaaatgggactaaagccgatgggaagtag

SEQ ID NO: 26669 - DNA, 1455 bp, synthetic construct
  source 1..1455: mol_type = other DNA; note = Synthetic coding sequence
atggccatcggcaagcggctggccaccctgcccaccaaggagcagaagacacaaaggctcatatcagagctgtctttattaaatcataagcttcccgcacgggtgtggctgccaactgcagggttcgatcaccacgtcgtgcgggttccacacacacaagcagtcgtgctgaacagtaaggataaggcaccgtatctgatttacgtcgaggtcttagaatgtgaaaatttcgacacaacgtcagtgcccgccaggattcctgagaacagaatcagaagtacgcgctcagtggagaatttaccagagtgcggcatcactcacgagcaaagagccggcagctttagcacagtgccaaactacgacaacgacgacgaagcttggagcgtggatgacattggcgaactgcaggttgagctacctgaagtgcacaccaactcgtgtgataacatttcccagttctcagtagactccattacttctcaggaaagcaaggagccagtcttcatagctgctggcgatattcggcggcgtctctccgagcaattagcgcacacaccaacagctttcaaaagggatcccgaggaccctagcgcggtggcattgaaggagccctggcaggagaaggtacgaagaatccgagagggctcaccctacggccacttacccaattggcgacttttgtcagtgatagtgaaatgcggcgatgatttgcgccaggagctcttggcctttcaagtcctgaaacagctgcagtccatctgggagcaagagcgcgttcctctatggatcaaaccatataaaatccttgtaatttctgctgattccgggatgattgaacctgtggtgaacgctgttagcattcaccaggtgaagaaacagagccagctctcattgctggactacttcctccaggagcatggatcttataccactgaagcatttctttctgctcaaaggaattttgtccagagctgcgcaggatactgcctggtatgctacctgctgcaggttaaggacaggcacaatgggaatattctgctggacgctgaagggcacattatccacattgactttggattcatcctttcttcatcccctaggaaccttggctttgaaactagcgcatttaaactcacaacggaatttgtagatgtcatgggggggctggacggcgatatgtttaactactataagatgctgatgctgcagggactgatcgccgcacggaagcacatggataaagtggtgcagatcgtagaaatcatgcagcaggggagccagttgccctgttttcacgggtcatcaacaatcaggaatctcaaggaacgctttcatatgtcaatgaccgaggagcagctgcagctcctcgttgaacagatggtcgacggctcaatgcgttccatcaccacaaagctttatgacgggttccaatatctcactaacgggatcatgtag

SEQ ID NO: 26670 - DNA, 228 bp, synthetic construct
  source 1..228: mol_type = other DNA; note = Synthetic coding sequence
atggccatccccatcaccgtgctggactgcgacctgctgctgtacggccggggccacaggacactggatcgcttcaagctggatgacgtcaccgatgaatacctgatgtccatgtacgggttcccgagacagttcatttattatctggtcgagctgttgggagctaatttgtctcgtcccacgcagcgtagtcgtgccataagccctgagacacaggtgctggcctag

SEQ ID NO: 26671 - DNA, 2754 bp, synthetic construct
  source 1..2754: mol_type = other DNA; note = Synthetic coding sequence
atggacggcgccgccggccccggcgacggccccgcccgggaggccctgcagagcctctcacagagactgcgtgtccaggaacaggagatggagctcgtaaaagcagccctcgcagaggcactgagacttctgcgtctccaggtgcccccctctagtctacaaggatcggggaccccagcacctcccggagacagtctggctgcccctccaggtttgcctcccacttgcacaccctctctcgtaagtagaggaacccagacagagaccgaagtggagctgaagtcttcccccggtccccccgggctgagtaatggacctcctgccccgcagggagcttccgaggaaccctctggtactcagagtgagggaggaggaagcagttcatccggggccggctcccctgggccaccggggatactgagacctctgcagcctcctcagcgagctgacactccccgacggaactcgtcatctagtagctcaccatctgagaggccgaggcagaagttgagccggaaggctatctcttctgcgaaccttttggtgcgcagcggttccacggaaagtcggggcggcaaggatccactaagcagcccaggaggcccgggtagcagacgatcaaactacaacctggagggcataagtgtgaaaatgttcctccgcggccgtcccatcacaatgtacataccctcaggcatccgcagtctagaagaactcccttccggtcctccacccgagaccctcagcttggactgggtctacggctataggggccgagactcacggtccaacttattcgtgctcaggtctggggaggtcgtctacttcattgcttgtgtcgtcgttttgtacagacccggaggcgggcccggcggcccaggcggagggggccaaaggcattaccgtgggcataccgactgtgtgcgctgcctggccgtccaccctgacggggttcgtgtggccagcgggcaaactgcaggggtcgacaaggacgggaagccattgcagcccgtcgtccatatatgggacagtgagaccctcctcaaactgcaggagattgggctaggcgcattcgaacgaggggtcggtgccctggccttcagtgcggccgatcaaggggctttcctttgcgtcgttgatgactccaacgagcacatgctttcagtgtgggattgttctcggggaatgaagctcgctgaaattaaatccacaaacgattccgtcttggccgtagggtttaatccccgagattctagttgtatcgttacttccggcaagtcgcacgtgcacttttggaattggagcggcggcgtcggggtgccgggaaatgggacactgacaaggaagcagggcgtgttcggcaagtataagaaaccaaagtttattccctgttttgtgttcttgcctgacggtgacatcttaaccggcgatagtgaggggaacattctgacctggggtcggtctccaagcgactccaaaacaccggggcggggaggcgcgaaagagacttatggaatcgtcgcccaggcccacgcgcacgaaggttcaatctttgccctgtgcctccggagagatggaaccgttctgtcgggcgggggtcgggaccgccgactggtgcagtggggaccaggtctggtcgcgcttcaggaggccgagattcccgagcattttggggccgtcagggcaattgctgagggtctcggaagcgagctgttggtgggcacaaccaagaatgctctgctccgaggagatttagctcagggatttagcccagtgatccagggccatacagatgagctctggggcctgtgtacacaccccagccagaatcggtttctgacttgtggtcacgaccggcagctatgtttgtgggatggagaaagtcacgcattggcttggtctatagatttaaaagagaccggactgtgtgccgactttcacccaagtggcgccgtcgtcgccgtggggctgaacaccggcaggtggctggttctggacactgagacccgtgaaattgtatccgacgtcatcgatgggaacgagcagctgtccgtcgttcgttactcacccgacggcctatacttagcaataggatcccacgacaacgtgatctatatctacagtgtctcctcggacggggctaaatcttcacggtttggtagatgtatgggacattcaagctttatcacccacctggattggtccaaagacgggaacttcatcatgtccaatagcggggactacgagatcttgtactgggacgtggctggggggtgcaagcaactgaaaaataggtacgagagtcgggaccgggagtgggctacctatacttgtgtactggggttccatgtctacgtgcccgtgcgatcttgccaaggggctgaaccacacgtgcggggccctcgtcagcctcgggaccagagaccaattcacgccagacggctggcgcctagactcgcaggtcgccaggggcgccagcatctgcctgtggcttctgcagggagatggggccgcggggccggggcccggcacgccctcagcaacccgctgcctgtacctagactgctgcctagaagactaatcgcagcctggagagaccggctggcccggcgccgggggcctgcaccaccatgcccatctctggcacaatcgcccacaacacgcggtaggctgtttcccgggttgacttccagacactccagatcccggatctttttggagggcgccaatggtgcccccgctcacacagtgtag

SEQ ID NO: 26672 - DNA, 321 bp, synthetic construct
  source 1..321: mol_type = other DNA; note = Synthetic coding sequence
atggtggccatggccgaggccgaggccggcgtggccgtggaggtgaggggcctcccccctgccgtcccagacgaattactcaccctctatttcgagaataggcgtcgcagcggtggagggcctgtgttgagttggcaaaggttaggatgcggcggagtgctgaccttccgcgaaccagcagacgccgaacgggtgttagcccaagctgatcatgagttgcatggggctcagctgagcttgagaccagcgccgccaagggctcctgctcggttactgctgcaggggctcccaccaggtactacccctcagaggttagaatag

SEQ ID NO: 26673 - DNA, 228 bp, synthetic construct
  source 1..228: mol_type = other DNA; note = Synthetic coding sequence
atgttctggaagttcgacctgcacagcagcagccacatcgacaccttgcttgagagggaggacgtgactttaaaagagctcatggacgaagaagacgtccttcaggagtgcaaagcccagaacaggaagttgatcgagttcctcctcaaggcagaatgcctcgaggatctggtcagcttcatcattgaggaaccgccacaagatatggacgaaaaaatcaggtattag

SEQ ID NO: 26674 - DNA, 1275 bp, synthetic construct
  source 1..1275: mol_type = other DNA; note = Synthetic coding sequence
atggaccagcccagcggccggagcttcatgcaggtgctgtgcgagaaatattcaccagagaatttcccatacaggcgaggaccaggaatgggtgtacatgtgcctgccactccacagggttccccaatgaaagatagactcaacctcccctccgtgctagtcctgaactcatgcggcatcacctgcgccggagacgaaaaagaaatagcagcgttctgcgcacacgtgtccgaactcgacttgagtgacaacaagcttgaagattggcatgaagtgagcaaaatcgtgtccaatgtaccacagctggagttcctgaatctatccagcaaccccctgaacctttcagtcctggagaggacatgtgccgggtctttctccggggtgcgtaagctggtgctgaataatagcaaagctagctgggagacggtccatatgattctgcaggagctgccggatttagaggagctgttcctttgcttgaatgattatgagactgtgtcctgtccctccatctgttgtcactcgctcaaactcttgcacattactgacaataatctacaggattggactgaaataagaaagctcggagtgatgtttccttcactcgatactctcgtgctggctaacaaccatcttaacgccatcgaagagccagatgactcactagctcgtctcttccccaatctaagatccatcagcctgcacaagtcaggcctgcagtcctgggaggatatcgataaactcaattccttccctaagctcgaagaggtacgcctcctggggatcccccttctccagccttacacgaccgaggagagacggaaactagttatcgcacggctcccttccgtgtcgaagcttaatggcagcgttgtcaccgacggcgagcgggaggactccgagcgcttcttcattcgatattacgtcgatgtgcctcaagaggaagtccccttcagataccacgaactaatcaccaagtacggtaagttggagcccttggctgaagtggacttgcgcccccagagcagtgcgaaggtcgaggtgcacttcaacgaccaagtggaggaaatgtccatacgtctagatcagacagttgcggaattgaagaagcagcttaaaacactcgtgcaactccctacatcgaacatgctgctatattactttgaccatgaggcaccattcggacccgaagagatgaagtacagctcacgtgcattgcactccttcggaatccgggacggagataagatctatgtggagagcaagaccaaatag

SEQ ID NO: 26675 - DNA, 288 bp, synthetic construct
  source 1..288: mol_type = other DNA; note = Synthetic coding sequence
atggaggccgccgacgccagccggagcaacggcagcagccccgaggccagggacgctcgtagcccttcgggtccgagtgggagcctggaaaatggaaccaaggccgacggaaaagatgccaagaccacgaacggccatgggggcgaggccgcagaggggaagagccttggtagcgccctgaagcccggggaaggcagaagtgccttgttcgccgggaacgagtggagacggcccattatccaatttgtggaatcaggcgacgacaagaactctaactattttagctag

SEQ ID NO: 26676 - DNA, 3144 bp, synthetic construct
  source 1..3144: mol_type = other DNA; note = Synthetic coding sequence
atggccccccggctgcagctggagaaggccgcctggcggtgggccgagacagtgaggcctgaagaggtttcacaagagcacattgagaccgcttatcgcatatggctggagccctgtatcagaggcgtctgtagacgcaattgtaagggcaacccaaactgcctcgtcggtataggcgagcacatctggctcggcgaaatcgacgagaattcctttcataatatcgacgacccgaactgcgagaggcggaagaaaaatagctttgtcggactgactaacctcggagccacttgttacgtcaatacctttctgcaggtgtggttcttgaacctcgagctgaggcaggcattgtacctgtgccctagtacctgctctgattatatgcttggcgatggcatccaggaggaaaaagattatgaaccccagacgatctgcgaacacttgcagtatctgttcgctcttctgcaaaattctaatagaagatatattgaccccagtgggtttgtgaaagccctcggactcgatactggacagcagcaagacgctcaagaattctctaagctctttatgagtttgcttgaagacactctgagcaaacagaagaacccagatgtgcgaaacattgtccaacagcagttttgcggagagtatgcgtatgtgactgtatgtaatcagtgcggccgagaatccaaactactgtccaaattctacgaacttgagctcaatattcagggacataaacagctcacggattgtatctccgaattcctgaaagaggagaagttggaaggggacaataggtatttctgcgagaactgccagtctaagcagaacgccacgaggaagattaggctcttgagcctgccttgcacgcttaatctgcagctcatgaggttcgttttcgatcgacaaacaggccataagaaaaaattgaacacatacatcgggttttctgaaatccttgatatggagccctacgttgagcataagggcggcagttacgtctatgaactgtcagctgtcctcattcacagaggagtgagcgcatattccggacactatatcgctcatgtgaaggacccgcagtccggggagtggtataagtttaatgacgaggatatcgaaaagatggagggtaagaagctccagcttggtatcgaagaggacttggaaccatcaaagtctcagacgcggaaaccgaaatgcggaaaaggaacacactgcagcagaaacgcgtacatgctggtttacaggctacagacccaagaaaagccaaacacaacagtccaggtcccagccttcttgcaggagctcgtcgacagggataactcaaagtttgaagagtggtgcatcgagatggcagaaatgcgcaaacagtccgtggacaaaggtaaggcgaaacatgaggaggtgaaagagctgtaccaacgcctgcccgccggcgctgaaccttatgaatttgtgagcctggagtggctacaaaaatggctagacgagtccacaccaacgaagcctatcgacaaccacgcgtgtctatgttctcacgacaagctgcacccggacaagataagcataatgaaaagaataagtgaatatgcagctgatatcttctattcccgctacggcggggggcctcgactaaccgtgaaggcattatgcaaggagtgcgttgttgagaggtgccgtatactccgtttgaagaatcagttgaatgaggattacaagactgttaacaatctgctcaaggcagcggtaaaaggctcagacgggttctgggtgggcaaaagtagtctccgctcatggcggcaactcgcccttgagcaattggatgagcaggacggggatgccgaacagtctaacggcaagatgaacggaagcacattgaataaagacgagtccaaagaggaacgtaaagaggaggaagaactcaattttaatgaagacattttatgcccacacgcggtgttcttcttttccaagtacatcttcctgaacagtggtgagctgtgcatcagcgagaatgaaagaagactcgtcagtaaagaggcttggagtaagctacagcaatatttccccaaggctccagagtttcccagctataaagaatgttgctcccagtgtaaaattctggaacgagagggggaggaaaacgaggccctacataagatgatcgcgaatgagcagaagacttccctgccgaatctttttcaggacaagaatcgaccctgtttgtcaaattggcctgaggacacggatgtgctctacattgtctcccagtttttcgtggaagagtggaggaaatttgtgcgcaagcctaccaggtgctcaccagtgtctagcgtcggaaatagcgccctgctgtgcccacacggcgggctaatgttcaccttcgcaagcatgaccaaagaagatagtaaactcattgctctaatctggcccagtgaatggcagatgatccaaaagctcttcgtcgtggaccatgtgattaagattactcggatcgaggtgggcgatgtgaaccctagtgaaacccagtacatcagtgaacctaaattgtgtccagagtgcagggagggactactatgccagcagcagagggacctgagggaatatacccaggccactatatacgtccacaaggtcgtggataacaaaaaggtgatgaaagattccgccccagagctcaatgtgagtagctccgaaactgaagaggacaaggaagaagctaaaccagatggtgagaaggatccagacttcaaccagagcaacggagggactaagaggcagaaaatttcgcatcaaaattatatagcgtatcagaagcaggttatcaggagatctatgagacaccgtaaagttcgcggggagaaggcgctgttggtgagtgctaatcagactctaaaagaactgaaaatacagattatgcacgccttcagcgtggcacctttcgatcagaacctcagcatcgacggtaagatcctgagcgacgactgtgccaccttggggaccctcggcgttataccggagtccgttatccttttgaaggccgatgagccaatcgccgactacgccgcaatggatgatgtaatgcaggtgtgcatgcctgaagaggggttcaaaggcactggcttgctaggacactag

SEQ ID NO: 26677 - DNA, 1443 bp, synthetic construct
  source 1..1443: mol_type = other DNA; note = Synthetic coding sequence
atggagaccgacctgaacagccaggaccggaaggacctggacaagttcatcaagtttttcgcactcaaaaccgtgcaggtgatagttcaggcaagactgggcgaaaagatttgcactcgcagtagcagctcccctacaggctccgattggttcaatctggccatcaaggacattccagaagttacccatgaggccaaaaaggctctcgctgggcaactccctgcagtagggcggtctatgtgtgtagagataagtctgaaaacaagtgagggggacagcatggagctcgagatttggtgcctggagatgaatgaaaagtgtgacaaagaaatcaaggtgtcctacaccgtgtacaatagactctcactcctcctcaagtcgctccttgccattactagagtcactccggcataccgactttccaggaagcagggtcacgagtatgtgatactgtatcggatatatttcggggaggtgcagctatctggattgggcgagggttttcaaactgttcgggtgggcacagtgggaacacccgtcggaactattactctttcatgcgcatacagaataaacctcgcatttatgagcacaaggcagttcgagagaacccccccgattatgggcatcataatcgatcacttcgttgacagaccgtaccctagttcttcccccatgcacccctgcaattaccgaactgccggggaagacactggggttatttacccttccgtagaggattctcaggaggtgtgtacaacatccttttctacttctcctccatcacagctgatggtccccggtaaagaggggggtgtgcccctggctcccaatcagcccgtgcacgggactcaggcagatcaagaaaggttggccacctgcacaccctcggaccggacccactgcgcagcaactccttcatcctccgaggacactgagacagtgtctaatagctcagaagggcgagcgagtccccacgatgttctggaaactattttcgttcggaaagtcggtgcctttgtaaacaagcccatcaaccaagtgaccctgaccagtcttgatatccccttcgctatgtttgctccaaaaaatttggaattggaggataccgaccccatggtgaacccgccagatagtcccgagacggaatctccgcttcagggctcgctccattccgacggcagttcgggcggttcatctgggaacactcacgacgacttcgtgatgattgattttaaaccggcatttagtaaagacgacatcctcccgatggatctgggcaccttttaccgggagttccaaaatccccctcagcttagctccctgtcgattgacattggggcacagtctatggccgaggacctggacagccttcccgagaagctagctgtgcacgagaaaaatgtgcgtgaatttgacgcctttgtggaaacgctccaatag

SEQ ID NO: 26678 - DNA, 2376 bp, synthetic construct
  source 1..2376: mol_type = other DNA; note = Synthetic coding sequence
atgttctggaagttcgacctgcacagcagcagccacatcgacaccctactggaacgtgaagatgtgactctcaaggaattgatggatgaggaagacgtactccaggagtgtaaggctcaaaaccgcaaactaattgaattccttctgaaagcagaatgcctggaggatctcgtctcctttattatcgaagaaccaccacaagacatggacgagaagattagatataagtatcctaatatctcctgtgagctgctgacttcagatgtgtctcagatgaatgatcgtctgggcgaggatgagtcccttctaatgaagctctattccttcctgttgaatgattctccactgaaccccctgcttgcaagtttcttttcaaaggtgctgagcatcttgatcagccggaagcctgagcagatcgtggatttcctgaagaagaaacacgattttgttgaccttataataaaacatattgggactagtgctatcatggatctgctgctcagactcctgacatgcatcgagcctccgcagccacgacaggacgttctcaattggctaaatgaggagaaaattattcagcggctggtggaaatcgtacacccttctcaggaggaagataggcatagcaacgcgagtcagagcctctgtgagattgtgaggctctccagggaccaaatgctccagattcagaatagcaccgaaccagaccccctcttggccacactcgagaagcaagaaattattgagcaactgctttccaatatttttcacaaagagaaaaatgaatccgccatcgtgagcgctatccagattctcttgacactcctcgaaacccggcggcccaccttcgaaggccatatcgaaatatgcccacctgggatgtctcacagcgcttgttcagtcaacaagagtgttttggaggccatcaggggacggctgggctcttttcatgagttactgctggaaccccctaagaatatgttctttaaatacacctggaataatttcctacatacacaggttgagatctgcatcgccctgatccttgcctctccattcgagaataccgagaacgccacaattaccgatcaggacagtacaggggacaatctgcttctgaaacacctcttccagaagtgtcaactcattgaacggatcctggaagcctgggaaatgaatgagaagaagcaggccgagggaggccgcaggcacggatatatggggcatttgactcgtattgctaattgtattgtgcacagcactgataaagggcctaactccgccctggtgcagcagttaattaaagatctacccgatgaggtgagagaaaggtgggaaactttctgcacttcgagcctgggagagacgaacaagcgaaataccgtcgacctggcgttcagtgactatcaaatgcagcagatgaccagcaattttatagaccaattcgggttcaacgatgagaagttcgccgaccaggacgacataggcaacgtcagcttcgaccgggtcagcgacataaatttcactctgaacacaaacgaatccggcaacatagcattgttcgaggcatgttgcaaggagagaattcaacagttcgatgacggggggtcggacgaggaagacatttgggaagagaaacacatagcttttacccccgagtcccagaggagatcatcctctggatctactgattcggaggagtctaccgacagcgaagaagaggacggcgctaagcaggacctgttcgagcctagtagcgcaaatactgaagataagatggaggtcgacctgtccgagcctcctaactggagcgccaattttgatgtccccatggaaactacccatggggcaccacttgactctgtcggatctgatgtgtggtccacagaagaacccatgcccacaaaagagacaggatgggctagcttcagcgaatttacctcatctctgagcaccaaggatagcctacgcagcaattcgcccgttgagatggaaacctccactgaaccaatggacccgcttactccttcagctgctgcactggcagtgcagccggaggccgcgggttccgttgctatggaagcatcttccgacggcgaggaagatgcagagtcaaccgataaggtcacagaaactgtgatgaacgggggaatgaaagagacccttagcctgacagtggatgccaagaccgaaacggcggtttttaaaagcgaggagggtaagctgtccacgagtcaggacgcagcttgcaaagacgctgaagagtgcccagaaaccgctgaagcgaaatgcgccgcaccacgaccgccttcttcctcacctgaacaaagtggcgtggaaatacccgctctccctggacagtggagccagcagtag

SEQ ID NO: 26679 - DNA, 1500 bp, synthetic construct
  source 1..1500: mol_type = other DNA; note = Synthetic coding sequence
atgttcggcgacgccagcaccagcctggtggtgcccgagaaggtgaaaacacctatgaagagctccaagacagatctccagggctccgcgtccccttccaaggttgagggagttcataccccgaggcaaaagcgcagcacccccttgaaagagagacaactctctaaaccgctatcggagcgaacaaactcttccgattctgaaaggagccccgacctcggtcattctacgcagataccaagaaaagtagtgtatgaccaacttaaccagatcttagtgagcgatgccgctttgcccgaaaatgtgatcctggttaatacaaccgactggcagggtcagtacgtcgccgagctcctgcaggaccagcgcaaacctgttgtttgcacttgctcgacagtcgaggttcaggccgtcctgtctgctctgttaactagaatccagcgttactgcaactgcaacagtagtatgcctagacccgtgaaggtcgctgccgtgggaggccagtcttatctgtcttcaattctgagattctttgtgaaatctttggcaaacaagacatctgactggttagggtacatgaggttcttgatcatccctctgggcagtcaccctgttgctaagtatctgggttccgttgattccaagtactctagttcatttctagattccggctggagagatctgttctcaaggagtgagccacctgtgtccgaacagctggacgtcgccgggagagttatgcagtacgtcaatggcgccgctaccacccatcagctacctgttgcagaggcgatgctgacttgtcgacataaatttccggacgaggatagctatcagaagttcataccttttataggtgtggtaaaagtgggcctggtagaagacagcccgtcgactgcgggtgacggggacgattctccagtggtatccctcactgtgccgagtactagcccaccaagcagttcgggcctgagcagagatgctacagcaacccccccctcctctcctagtatgagttctgccctcgcaatcgtgggttcccccaactcaccttacggcgacgttatcgggctgcaggtggactactggttgggccaccccggagagagacggcgcgagggggataagcgagatgcaagctcaaaaaatacgctcaaatctgtgttccgtagtgtacaggtctctcgcctgccacacagtggtgaggcacagctgtcgggcacaatggccatgacagtcgtgactaaagagaagaataagaaagtcccgacaatattcttgtctaagaagccccgcgaaaaagaggtcgatagtaagtctcaggtcatcgaaggaatctccagactaatatgctctgccaaacaacagcagaccatgctaagggtgagcatcgatggggtggagtggagcgacatcaaattctttcagcttgctgcccagtggcccacacatgttaagcacttcccagttggcttgttctctggatctaaggcgacttag

SEQ ID NO: 26680 - DNA, 435 bp, synthetic construct
  source 1..435: mol_type = other DNA; note = Synthetic coding sequence
atggtggccatggccgaggccgaggccggcgtggccgtggaggtgagaggcctcccacctgccgtccctgacgagctattgaccctgtatttcgaaaatagacgcagaagtggaggcggcccagtcctgagctggcagaggttagggtgcggtggtgtgctgacctttagggagcccgcagacgctgagcgtgtgctggctcaggctgaccacgagttgcatggagcccaactctctctacggcctgcaccacccagggcgcctgccaggcttctcttgcagggactgcctccaggtacgacaccgcaaagattggagcagcatgttcaggccctgctgcgggcatccggcctccctgtccaaccatgttgcgctctggcttcgccacggcccgaccgcgcacttgtccagctcccaaaaccattgagtgagtag

SEQ ID NO: 26681 - DNA, 513 bp, synthetic construct
  source 1..513: mol_type = other DNA; note = Synthetic coding sequence
atggccagcgaggccgagaagaccttccaccggttcgccgccttcggagaaagcagttcttccggaacagagatgaacaataagaatttttcaaaactctgcaaggattgcggtatcatggacggcaagacagtcacctctacagacgtggatattgtttttagtaaagtcaaagccaaaaatgcacgaaccattacttttcagcagtttaaggaggctgttaaggaactcggacagaagagattcaaaggaaaatcccccgatgaggtgctggagaacatctacggtctgatggagggtaaagacccggcaacgactggcgcaacgaaggctaccacagtgggggctgtggacaggctcacggatacgtcaaaatatacaggcacacataaggagcgtttcgatgaatcaggaaaagggaaggggatcgccggtcgagaggaaatgacggataacacagggtatgtgtcaggttacaagggatccggtacgtatgacaaaaagacaaaatag

SEQ ID NO: 26682 - DNA, 270 bp, synthetic construct
  source 1..270: mol_type = other DNA; note = Synthetic coding sequence
atggtggccatggccgaggccgaggccggcgtggccgtggaggtgaggggtctcccccctgcagtcccagatgagctcctgactctgtacttcgaaaatagacgacgctcaggaggcggtccggtactgtcgtggcaaagactcggctgtgggggcgtgttgacctttcgggaacccgcagatgctgaacgtgtgctggcacaggccgatcacgaactacacggcgctcaactctctctcagacctgcccctcccagagcccctgcctag

SEQ ID NO: 26683 - DNA, 1206 bp, synthetic construct
  source 1..1206: mol_type = other DNA; note = Synthetic coding sequence
atgtgcgtggagatcagcctgaagaccagcgagggcgacagcatggagctggagatttggtgcctggaaatgaatgagaaatgtgataaggagatcaaagtttcctatactgtgtataatcgattatccctgcttctgaagtccctcttggctattacccgtgttaccccagcctacagactgagtaggaagcaggggcacgaatatgtgatactttatcgtatctattttggagaggttcaactttccggtctgggagaagggtttcaaaccgtacgcgtaggtaccgtcggcactcctgtcggaactattactctaagttgtgcctatcggattaacttagcctttatgtccacacgccagtttgagcgcacaccaccaataatgggaatcatcattgaccacttcgtggatcgcccttacccatcttcaagcccgatgcatccttgtaattacaggaccgctggcgaagacactggtgtgatctatccttccgtggaggactctcaggaggtgtgtaccacaagcttctccacatccccaccatcacaattgatggtgcccggtaaggagggtggggtacccctggcacctaatcagcccgttcatggcactcaggcggaccaagagcggctggcgacatgcacaccctctgataggacccattgtgctgccacaccctcctctagcgaggatactgaaactgtgtccaactcctctgaaggccgggcttcgcctcacgacgtcctggaaaccatcttcgttcggaaggtgggcgcgttcgtgaacaagcctatcaaccaggtgacgctgacatcgctcgacatcccttttgccatgtttgctccaaagaatttggaactcgaggatactgatccaatggtgaatccccctgactcaccagaaaccgagtcccctttgcagggctccctgcactctgatggctcatctggcgggtctagtggcaacacacatgatgacttcgtgatgattgacttcaagccagcttttagcaaggacgacatccttccaatggatttgggaaccttctatcgggagttccaaaaccccccacagttgtcgagtttaagtatcgatataggggcacagagcatggccgaagacctcgatagcctgcccgaaaagctggccgtgcacgagaaaaatgtaagagagtttgacgcttttgtcgagaccttgcagtag

SEQ ID NO: 26684 - DNA, 2148 bp, synthetic construct
  source 1..2148: mol_type = other DNA; note = Synthetic coding sequence
atgagccagagcggcgccgtgagctgctgccccggcgccaccaacggctccctggggcgtagtgacggggtggcaaagatgtctcccaaggatttgttcgagcaaagaaagaaatactctaatagcaatgtaattatgcatgagacctcccagtatcatgtgcagcacctggcaacctttatcatggacaaatccgaagccatcacttctgttgacgacgcaatcagaaaattggttcaactgagcagtaaggagaagatttggacacaggagatgctgctccaggtcaatgatcagagtctgagattgctcgacatcgagtcgcaggaagagcttgaggatttcccactcccgacggtgcagaggtcacagacggtgttgaatcaactgcgctacccctctgtgcttctgctggtctgccaagacagcgagcagtctaaaccagacgtgcacttctttcattgcgacgaggttgaagccgaactagttcatgaggatattgaaagcgccttggcagattgccgtcttggcaagaaaatgagaccccagactctcaaaggacatcaggaaaagatacggcaaaggcagtccatcctccccccgcctcaaggtcctgcgccaattcccttccagcaccgcggaggcgatagtccggaggccaagaaccgggtcgggcctcaggtccctctctccgagcccggatttcgccgacgggagagccaggaggaacccagagctgtacttgctcagaaaatcgaaaaagagacacagatcctgaactgcgctttggatgacattgagtggtttgtggcgagactacaaaaagcagccgaagcttttaaacaactgaatcagaggaagaaggggaagaaaaaaggtaagaaagcacccgccgagggagttttaacgctgagagcccgcccacccagtgagggggagttcatcgactgcttccagaagataaagcttgccatcaacttactcgccaagcttcagaagcacatccagaacccatcagccgccgagctagttcacttcctcttcggacccctggatctgattgtcaatacctgctccgggcctgatattgcgcgctcggtaagttgtccactactaagcagagatgctgtggattttctacggggacatttggtgccaaaagaaatgagtttgtgggagtcgcttggcgagtcttggatgagaccccgctctgagtggcctcgggaaccccaggttcccctgtatgtgccaaaattccatagtgggtgggaaccacccgtggatgtgctccaagaagcgccctgggaggtcgaggggctggcgagtgctccaatcgaagaggtatctcctgtgtcgcgccagtctatccgaaatagtcagaaacactctcctactagtgagcctacccctccaggagatgccctgcctccggtctccagcccacacacccatagggggtatcagccaaccccagctatggcaaaatatgtgaaaatcctgtatgactttacagccagaaatgctaatgagctgagtgtgctcaaggatgaggtattggaagtgctggaggatgggagacaatggtggaagttgaggagccgaagcggacaggccggctacgtcccttgcaatatcctgggcgaggctaggccagaggatgcaggcgcacccttcgagcaggccggccaaaagtattgggggccagctagcccaacccacaaacttccaccttcattccccggcaacaaagacgagttaatgcagcacatggacgaggtgaatgacgagctgattagaaaaattagcaatattcgcgctcagcctcagagacacttcagggtcgagagatctcaaccagtgtcccaaccactcacctacgagagcggacccgatgaagtacgagcctggcttgaggcaaaagccttctcccctcgtatcgtggaaaatctgggaatcctaaccgggccccagctgttctccctgaataaggaggaactaaaaaaggtgtgtggggaggagggggtgagagtgtatagtcaattgactatgcaaaaggcattcctggaaaagcagcaaagcggttcagagctagaagagttaatgaataagtttcacagtatgaatcagcggcggggtgaagacagttag

SEQ ID NO: 26685 - DNA, 336 bp, synthetic construct
  source 1..336: mol_type = other DNA; note = Synthetic coding sequence
atgaccggcagcaacagccacatcaccatcctgaccctgaaggtgctgccacactttgagtcgctggggaaacaggagaaaattcccaacaagatgagcgcatttaggaaccattgtccacatcttgactctgtcggcgagatcacgaaggaggacctgatccaaaagagtctggggacctgccaggactgtaaggttcagggaccaaatttatgggcttgtctcgaaaacagatgctcatacgtcggttgcggcgagagtcaggtcgatcactccaccattcactcccaggagacaaaacactatttgacggtgaatcttacaactcttcggtag

SEQ ID NO: 26686 - DNA, 228 bp, synthetic construct
  source 1..228: mol_type = other DNA; note = Synthetic coding sequence
atggccggccaggaggaccccgtgcagcgggagatccaccaggactgggctaatagggaatacattgagattattacctccagtatcaagaaaattgccgattttctgaatagcttcgacatgagctgcagaagccgcttggccactctgaatgaaaaactaacggctttagaacgcaggattgagtacatcgaggctcgcgttaccaagggcgagaccctgacatag

SEQ ID NO: 26687 - DNA, 348 bp, synthetic construct
  source 1..348: mol_type = other DNA; note = Synthetic coding sequence
atgcggtacgtggccagctacctgctggccgccctgggcggcaactccagtccgtcggctaaggacattaagaagatcctggattctgtaggaatcgaagcggatgacgatcgactcaataaagtgatatccgagttaaatggcaagaatattgaggacgtgattgctcaaggaatagggaaactcgcctctgtgcctgccggcggcgccgtcgccgtgtcagctgcccccggttcggcagctcccgccgccggttccgcccccgctgccgcagaagaaaagaaagatgagaagaaagaggagtctgaggaatccgatgacgatatggggtttggtcttttcgactag

SEQ ID NO: 26688 - DNA, 1077 bp, synthetic construct
  source 1..1077: mol_type = other DNA; note = Synthetic coding sequence
atgcccggctgcgagctgcccgtgggcacctgccccgacatgtgcccagccgcagagagggctcagcgggagagagaacatcgactccataggctggaggtcgtgcctggatgccgccaggatccccccagagctgacccacagagggccgtcaaggaatattcgaggcccgcggccggaaaaccccgacccccgcccagccagttacggcccccttcagtccttctcgccacggtgcgatacctggctggagaggtggccgagagtgccgacatcgcaagagctgaggtggctagcttcgtggcagatcgtctgcgggccgtgctcctagacctggctctgcagggggccggcgacgctgaggccgccgtggtcctggaagcagctctcgccactctcctaaccgtggtggcacgcttgggccccgatgcagcaagaggaccagcggatccggttctgcttcaggcccaggttcaggaaggattcggatcactgcgcaggtgctatgctcgcggcgcaggtcctcatccgcgacagcccgcgttccagggcctgttcctgttgtataatctggggagtgtggaggctcttcatgaagtcctgcagctgcccgccgctctgcgggcgtgtccccctcttcgcaaggctctggctgtcgatgcagcgtttagagagggcaatgcggcacggctgttcaggcttttgcagaccttgccatatttgccttcatgcgccgtacagtgccacgtcggtcatgcccggcgagaggccctggctcgcttcgcccgtgcattcagcacacctaaaggccagaccttgcccttgggctttatggtgaaccttctggcactcgatggactgcgtgaggccagggatctgtgccaggcacacggcctccctttggatggtgaagagagggttgtatttcttaggggacgatatgtggaggagggtctcccccccgcttccacttgcaaggtgctcgtggaatctaagttacggggccggacactcgaggaggtcgtgatggccgaagaagaggacgaaggaaccgatcgaccgggttcaccagcctag

SEQ ID NO: 26689 - DNA, 4047 bp, synthetic construct
  source 1..4047: mol_type = other DNA; note = Synthetic coding sequence
atggccgacaccgacctgttcatggagtgcgaggaggaggagctggagccctggcagaagatctctgacgttatagaggactctgtcgtggaggactataactccgtggacaagaccaccaccgccggtaaccctctcgtccagcagggcgggcagccactgatactgacacaaaaccctgcgcctggtctgggaaccatggtgacgcagcctgtgcttagacccgtccaagtcatgcagaacgcaaaccacgtaacctccagcccagtcgcctcccagcctatcttcataacgacacaggggttcccagtgcgcaatgtacggccggtgcaaaacgccatgaatcaggtgggcattgtgttgaacgtacaacaagggcaaacagttagaccaataactttggtgcccgcacccggtacccaattcgtgaaaccaaccgtgggggtgccccaagtgttctcccaaatgaccccagttcgccccggttccacaatgcccgtcaggcctactaccaataccttcacgaccgtaattcctgctactctgaccatacgctcaactgtcccgcagtctcagtcccagcagaccaagagcacgccatctacttctaccacacccacagcaacccagcctacctctcttggccagctcgctgtgcagtcccctgggcagtctaatcaaaccacgaaccccaaactcgtgtcaatcgcatcgttcgtaacagtgaagaggcctggcgtgaccggagaaaattccaacgaagttgcaaagctggtgaatacccttaacactatcccatctctgggccagtcacctggaccagtggtcgtatctaataacagtagcgcgcacggatcgcagaggacaagcggaccagagagtagtatgaaggtgacctccagtatccctgttttcgacctgcaggatgggggccggaagatttgtcctagatgcaacgcacagttccgggttacagaggctctgcggggccatatgtgttactgttgccccgagatggtagagtatcagaagaaggggaaatcacttgattctgaaccatcagtgccgtcagcagctaaacctcctagtcctgaaaagacagcccctgtggcgtctactccctccagcacccccattccagccctgagccctcccacaaaggtccctgagccgaacgagaacgttggcgatgccgtccagacaaagttaataatgctggtcgacgacttctattacggccgggatggcggcaaagtcgcccaactgaccaattttcccaaggtggctacctcctttcgatgtccccactgtaccaagcggttaaaaaataatattagattcatgaaccatatgaaacaccatgtcgagctggatcagcagaatggtgaagtggatggccataccatatgccaacactgttaccgtcagttctctacgccatttcagctccaatgccatttggaaaacgtgcattctccatacgagagtactaccaaatgcaaaatttgtgagtgggcatttgaatcggagccactgtttctccagcacatgaaagatacccacaagcccggagaaatgccttacgtttgccaggtttgtcaataccgaagttccctgtatagtgaggtcgatgtccatttccggatgattcacgaggacacgagacacttgttatgcccctactgcctcaaagtattcaagaacgggaacgctttccaacagcactacatgcgtcatcagaaacgaaatgtctatcactgcaacaaatgccggctccagttcttgttcgctaaggataaaattgaacataagttgcagcatcataagaccttcagaaaacccaagcagcttgaaggcctgaagccaggcacaaaggtaaccatccgggcctccaggggccagcctcgcacagttcctgtcagcagtaatgacacccccccctccgccctccaggaggccgcaccactgacatcttctatggaccctctgccggtgttcttgtatcctccagtgcaaagatccattcaaaaacgcgccgtcaggaagatgagtgtcatgggaaggcaaacatgtctggagtgtagcttcgaaattcctgacttccctaaccatttccccacatatgtacactgcagcctatgtagatatagcacttgctgttcaagagcatacgctaatcacatgataaataaccatgtgccaagaaagagcccgaagtatcttgctttgtttaaaaacagtgtgagcggcatcaagcttgcttgcactagctgtactttcgtcacttccgtgggcgatgcaatggctaagcacctagtgttcaaccccagtcataggtcatcttctatcttacctaggggcctgacatggattgcccatagccggcacggccagactcgagatcgagtgcatgacaggaatgtcaagaacatgtacccaccgcccagcttcccaactaacaaagcggccacggtaaaatccgccggggcgacacccgccgagcctgaggaactgctgacacctcttgcacctgcactgcctagccccgcttctacagcaactccccctccaactcccacccacccccaggccctggccctcccacccctagccacagaaggtgctgagtgtttaaatgtggatgaccaggatgaagggtcaccagtgacccaagagccggagctggccagcggcggaggcgggtccggcggagtggggaagaaggagcagctgtccgtaaaaaaactccgggtcgtgctatttgccctgtgttgcaacaccgagcaagctgcagagcacttcaggaaccctcagcgcaggatcagacggtggctgcgccgctttcaggcctcccagggcgagaatctggaaggcaagtacctttcattcgaagctgaggagaagttggctgaatgggtactgacacagcgtgagcagcagctccctgtaaacgaggagacgttattccagaaggccactaaaatcgggcggagcctggagggaggatttaagattagctatgaatgggccgttcggtttatgctaagacaccacctgaccccccatgcccgccgagcggtcgcacacacgctccctaaggatgtggcagagaacgcaggcctgttcattgacttcgtgcagaggcagatccataaccaagacctcccgctgtcaatgatcgtcgccattgatgaaatcagtctgtttctcgatactgaggtgttgagtagcgacgacaggaaggagaatgcattacagactgtgggaaccggcgaaccatggtgcgatgttgtgctggccattctggccgatggcacggttctccccacccttgtgttttaccgcggccaaatggaccaacctgctaacatgccggacagcattttacttgaagccaaagagtctgggtatagcgacgatgaaatcatggaattgtggagcacccgggtttggcagaagcatacggcgtgccagcgcagcaagggaatgctggtcatggactgccaccgcactcacctgagcgaggaggtgctcgcgatgctgagtgccagtagtacactacccgctgtggtgccggccggctgtagttcgaagatccagccgctggacgtatgcatcaagagaactgtaaagaatttcttacacaagaaatggaaggaacaggcccgggagatggccgacacagcctgcgactccgacgttttactgcagctggtcctggtctggctgggcgaggtgctcggggtgattggagactgtccagaactcgtgcagcggtccttcttagtcgcatctgtcctccccggcccagacggaaatatcaattctcccacccgaaacgccgacatgcaggaggagctgatcgctagccttgaggaacaactgaaactgtctggcgagcactccgaaagttcaactcctcggcctagatccagcccggaggaaactatcgagcccgagtccttacaccagctgtttgaaggcgaatccgagactgaaagcttctacggctttgaggaggcagatctcgatttaatggaaatctag

SEQ ID NO: 26690 - DNA, 561 bp, synthetic construct
  source 1..561: mol_type = other DNA; note = Synthetic coding sequence
atgttctggaagttcgacctgcacagcagcagccacatcgacaccctcctggaaagagaggacgtgacactaaaagaacttatggatgaggaggatgtgctgcaagaatgtaaagcacaaaaccggaagcttatcgagttcctgctcaaggccgagtgtctcgaggacctggtctctttcatcattgaagagccccctcaggacatggatgaaaaaattcggtacaagtacccgaacatctcatgcgagctgctgacttccgacgtatcgcagatgaatgatcggctcggcgaggacgagtccttgcttatgaaactgtatagtttccttttaaatgattcgccgctaaaccctctgctagcttccttcttttcaaaggtactctcgatccttatttctaggaagccagaacagatcgtggacttcctgaagaaaaagcatgattttgtcgatctcataatcaaacatatcggcacatccgcaattatggatctgttgcttcgtttactcacctgcatcgaaccccctcagccaagacaggatgtgctcaattggttgtag

SEQ ID NO: 26691 - DNA, 288 bp, synthetic construct
  source 1..288: mol_type = other DNA; note = Synthetic coding sequence
atgagccagagcggcgccgtgagctgctgccccggcgccaccaacgggtctctcggccggagcgacggagtggcaaaaatgtctcctaaggacctgttcgaacagcgaaagaaatacagcaattccaacgtgatcatgcacgagacctctcagtatcatgtgcagcacttggctacattcatcatggataagtctgaggccattacatccgtcgatgatgccattcggaagctagtgcagctgagttcaaaggagaagatttggactcaggagatgcttttgcagtag

SEQ ID NO: 26692 - DNA, 1740 bp, synthetic construct
  source 1..1740: mol_type = other DNA; note = Synthetic coding sequence
atggacgacagcaagcaggagagcaccaccagcaaggaggaggagactaacataatatcatccatcgttcccagtacgcaggatatctaccaaagacagaattcgagtgatgtacacaaatcactgctcccggcagtggacgagactacgtgcggacatacacacttccagcagatgatcgataagtacataaacgaagctaatctgattcccgagaagaccgacttgcaggagctggagcacatttttcccaatctgcaccaccagcttttcaagcctctcgaaccccaccctgatttcgatctcagctcttcctctagcgggatttctccagataacagggacttttaccagcgttcagacagctcttccgagagccattgcgctaccggactgtccaagtctactgtttattttacagcactgcgtcggacctccatgcactctagcctgaacacgagccctaatcagcaacctgacacgaacttggcccatgtcggagcccacagcttcgctaccgaaaatataatcggtggatccgagcagtgtttcgagcagctgcaacccgagtacagtagccaggaagagtcccagcacgctgacctcccctcgattttctcaatcgaagctcgggactcttcacaggggatgaagaaccaaaactatccaagtgaggaacacacagaaattctccagaataagaaaaaaatcgtacattttcagctctctatcggtaatttgagcagcgtatactcatccagtgacgaagcaaatgtgttcgatcagctgaatgtccaacattccacaccctgtgggagtaacagcagtgagtgttccacaaaacatcagttggagtctcgaaaggaaagcatgggtttcgaggagctgagcaagcggggtgtcgtgacgatgctccagtctcagggacttattgaagacaacaagaatgagacttgccgggtcctggacatcaatccccaagtggaggaaacagacagccgtttgtgcgtgaggacggttgagatgggaacatccattcaggccccttattcattgacaactcagaacgaaaagtactttgagaattctgctgaaacagatatccctaagattacaaagaagttaagtcagttaggcgagtcagagctgttcgcaagctccgggtctttcagcctgcagagttctatccccgtgtgggaaactgaaacgggccatggtataatggaggagcccgagctgactctcatctctacaacagatacctccatcgcggaaatggactttgcgaatttaactctcgaggaaaagtcagagaacgaagcgaagtgtttcttccaggtctctgagtttcttcccctggtgagcgctaccgaggcgtcagactaccctgcagtgagcgaactgtctatcgaaaaaccaaggactgcttccacagcagagacacccagacgacttacgccagtacctggctcccttcaggaggcgtttatcaaaaggaaaaaatcttttatggaacgcagccaccagagacagaaggaaatacggaataaaattcacgtgtcggaaaactcccagatcaaaactgtcaaggaaaagccgtcaatttccagctccgtttcaagacttaagggagttaataaggtaagagcaagctttcctgaagaccgcaaaaccacccaggctctgcgacatcaacgggggcttaggctgtacaatcagctggccgaggtaaagcagtag

SEQ ID NO: 26693 - DNA, 435 bp, synthetic construct
  source 1..435: mol_type = other DNA; note = Synthetic coding sequence
atggtggccatggccgaggccgaggccggcgtggccgtggaggtgcgggggctacctccggcagttcccgacgagctattaacgctgtattttgagaatagacgcagatcaggcggaggccccgtgttatcatggcagcgtttagggtgtggaggggtgcttaccttcagggaacctgctgacgccgaaagggtgttagcccaggccgaccacgagttacacggggcccagctcagtctgagacccgcaccacccagggcccccgccaggttgctcctgcagggcctgccaccaggtacaacaccgcagagactggagcagcacgtgcaggccctgctgcgcgcaagcggccttccagttcagccttgttgcgcattagcctccccccggcctgatcgcgcattggtacaactacccaagccattgtcagaatag

SEQ ID NO: 26694 - DNA, 246 bp, synthetic construct
  source 1..246: mol_type = other DNA; note = Synthetic coding sequence
atggtggccatggccgaggccgaggccggcgtggccgtggaggtgaggggccttcctccagctgtgccagatgaactgcttactctttattttgagaaccgacggaggagcggtggaggacctgtgctctcttggcagcgcctcggctgcggcggggtcctgacgttcagagaaccagccgatgccgaacgagtactcgcccaggccgatcatgagctccatggagcacaactgagcttacgctag

SEQ ID NO: 26695 - DNA, 1539 bp, synthetic construct
  source 1..1539: mol_type = other DNA; note = Synthetic coding sequence
atggccgccttcaagctggacttcctgcccgagatgatggtggaccattgtagccttaacagctctccagtgagtaaaaaaatgaacggaacactggaccaccccgatcagcccgaccttgacgctatcaagatgtttgtgggtcaagtgccccgaacatggagtgaaaaagatttaagggaactgttcgagcagtatggagctgtgtacgaaattaacgtgttgcgggataggagtcagaatccccctcagtccaaggggtgttgcttcgttaccttttacacacgaaaggccgccctcgaagcacaaaacgcccttcacaacatgaaggtgctgcccggcatgcaccaccccattcagatgaagcccgctgatagcgaaaagaataacgtggaagaccggaagctcttcattggcatgatctccaagaaatgcaccgagaatgacattagagtaatgttctcttccttcgggcaaattgaggaatgccgcatcctcagaggtccagatggcctgtcccgtggctgcgctttcgtaactttcacgacccgcgcaatggcacagacggcaatcaaggcaatgcaccaggcccaaaccatggagggctgttcctcaccaatggtcgttaaatttgcagatactcagaaagataaggagcagaaaagaatggctcagcagctgcagcagcagatgcagcagatctccgcggcttccgtctggggaaacttggctggacttaatacactgggccctcagtaccttgctctctaccttcaactgcttcagcagactgcctcttctgggaacctcaacacattatcttccctgcatcccatgggcggcctgaatgccatgcaactccagaacctggcagcattggccgctgccgcttccgctgcccagaacacgccatccggaactaacgctttaacaacttcgagcagccccctgagcgtgctgacaagtagtgggtcgtcaccatcttccagttcttctaacagcgtgaacccaattgcaagccttggcgctctgcagacactagctggtgccacagcaggccttaatgttggatccctggctgggatggcagcactcaacggtggactggggtcaagtggactctctaacggcaccggcagcaccatggaggccctcacacaggcatatagcggcattcagcagtacgcggccgccgccctgcctacactctacaaccaaaatttactaactcaacagtctataggggccgcaggttctcagaaggaggggcccgaaggggctaatcttttcatttatcatctgccgcaggagtttggcgaccaggacctgctccaaatgttcatgcccttcggcaacgtggtgtcagccaaggtgtttattgataaacagaccaatctgagcaaatgttttggctttgtctcatacgacaaccctgtaagcgctcaggctgccatccagagtatgaatggtttccaaattggaatgaaaaggctgaaggtgcagctgaaaagaagcaaaaatgatagcaaaccctattag

SEQ ID NO: 26696 - DNA, 1131 bp, synthetic construct
  source 1..1131: mol_type = other DNA; note = Synthetic coding sequence
atgaaggacgtgcccggcttcctgcagcagagccagaacagcggcccgggccagccagccgtctggcaccggctagaggagctttacaccaaaaagctgtggcaccagttgacgctgcaggtattagattttgtgcaggacccttgtttcgcacagggcgatgggttaatcaaactctatgaaaattttatctcggagttcgaacacagagttaacccactgagcctggtcgagatcattctgcatgtggttcggcagatgaccgaccctaatgttgccctgactttcttggagaaaactagagagaaggtcaagtctagcgatgaggcagtcattctttgcaagaccgccattggtgcactgaaactgaatattggcgacctgcaagtcactaaagagacaatagaggatgtggaagagatgctcaacaacctaccaggagttacgagtgtgcattcacgcttctatgacctgtcttccaagtattaccagaccatagggaatcacgcttcctattataaggatgctctcagattcttaggatgtgtagatatcaaggatctgcccgtgtcagagcagcaggagagggcgttcactctggggcttgctggtcttctgggtgaaggcgtgtttaacttcggcgagttgttgatgcatcctgtgctggagtctctccgcaatactgatcggcagtggctaattgataccttgtacgcgttcaactctgggaacgtcgagcggttccagaccctgaagaccgcctggggacagcaaccagacctcgctgccaacgaagcccaactcctaagaaagatccaactgctctgcctgatggagatgacattcacacgacccgctaatcatcggcagctgacatttgaagagatcgcgaagtctgccaagatcactgttaacgaagtcgagttgcttgtgatgaaagccctctccgtgggactcgtaaaagggagtatcgatgaggtcgacaagagagtgcatatgacgtgggtgcagccccgggttctggaccttcagcaaatcaaaggcatgaaagatagactggagttctggtgtaccgatgtcaaatcaatggaaatgctcgtggagcaccaagctcatgatatcctgacttag

SEQ ID NO: 26697 - DNA, 489 bp, synthetic construct
  source 1..489: mol_type = other DNA; note = Synthetic coding sequence
atgaccagcaagaagctggtgaacagcgtggccggctgcgccgacgatgcacttgcaggcctggtcgcctgcaatccaaacttgcaactgctgcagggacacagagtggccctgcggagtgatcttgactccctaaagggaagggtggcgctgctttctggtgggggaagtggccatgagcctgcccatgctgggttcattggtaaagggatgctcacgggagtcattgccggagccgtttttactagtccagcagtgggatctatcctggccgcgatccgtgccgtcgcccaggctggcacagtcggcacactgctgatcgtgaaaaattacactggagaccgcttgaactttggcttggcgcgcgagcaagcacgtgccgagggtatccctgtggagatggtagtcatcggtgatgattcagcctttacagtgttaaaaaaggctggaaggaggggcctgtgcgggaccgttttgatccataaatag

SEQ ID NO: 26698 - DNA, 7854 bp, synthetic construct
  source 1..7854: mol_type = other DNA; note = Synthetic coding sequence
atgctgaccgacagcggcggcggcggcaccagcttcgaggaggaccttgactcggttgccccccggagcgcaccagcgggggcaagtgagcctccaccccctgggggagtcggtctcgggatccggaccgtacggctgtttggcgaggcaggaccagctagtggcgtggggtcctcaggaggcggcgggtcaggtagcggcacaggggggggagacgctgctttggatttcaaactggccgctgctgtgctaaggacaggcggcggcggcggggcaagcgggtccgacgaggacgaagtcagtgaggtggagagcttcatccttgaccaggaggatctggacaatccagttttaaaaacgacttcggagatctttctcagcagcacagctgaaggggctgatcttcggacagtagatcccgagacacaggccaggctcgaagcgcttctggaagcagccggaatcggcaaactgtcgacagctgatgggaaggccttcgcagatcccgaagtgttacgccgcctgactagctctgtttcttgtgcgctggacgaagccgcggccgcactgactaggatgaaggccgagaactcccataatgccggacaggtggacacacgctccctggccgaagcatgctcggatggggatgtgaacgccgtgcggaagctcctcgacgagggccggtctgtcaacgaacacaccgaggaaggggaatcactcctttgcctggcttgcagtgctgggtactacgaactggctcaggtgctgctggcaatgcatgccaatgtcgaagaccgcggcaacaaaggcgacatcacaccgctgatggcagcgtccagcgggggatacttagacattgtcaaactgcttcttttacatgacgcagacgtgaacagtcagagcgcgacgggaaatactgctttgacctacgcttgtgccggaggtttcgttgacatcgtcaaggttctactcaatgagggcgccaacattgaggatcataatgagaatggccataccccacttatggaagccgcctcagccggtcatgttgaggtggcaagagtactgttagaccatggcgccggaattaacacccactctaatgaatttaaagaaagcgcactgacactggcctgctacaagggtcacctggacatggtgcggtttctgttggaagccggcgccgatcaagaacacaaaacagacgagatgcataccgctctaatggaggcttgcatggacggacacgtggaggttgccaggcttttactggacagtggggcacaggtcaacatgcctgccgactcctttgaaagccccctgacactcgctgcctgcggcgggcatgtcgaactggccgccttgctgattgagcgcggagccaatttagaagaagtgaacgacgaaggttacaccccgcttatggaagctgctagagagggacatgaggaaatggttgccttattgcttgcgcagggtgctaacataaatgctcagacagaggaaacccaggagacagcgctcactctcgcttgttgtgggggtttctcggaagtggcagactttcttattaaagctggcgccgacatcgagcttggctgcagtacacccctgatggaagctagtcaggaaggtcatctcgagctggtgaagtacctcctggccagtggagctaacgtgcacgcaaccacagctacgggagatacggccctcacctacgcctgcgaaaacggccacaccgatgtggctgatgtcctcctacaggcgggcgctgacctggaacacgaaagcgaagggggacgaaccccgctcatgaaagctgcccgagcaggccatctgtgcacagtgcagtttttgatctccaaaggggcaaatgtgaatagggccacagcaaacaacgatcacaccgtggttagcctcgcctgtgcgggaggtcacttggctgtggtggaattgttgctagcacatggggccgatccaacccatcgccttaaggacggaagcacaatgctcattgaggccgccaaaggaggccacaccaatgttgtgagttacctcctggattatcccaacaatgtgctaagcgtgcctactactgatgtgtcccagttacctccaccctcgcaggaccaatcacaggtcccacgagttcccacacatacgctggccatggtggtcccgccgcaagagccggacaggaccagtcaggaaaatagcccagccttgcttggcgttcagaaaggaacatcaaaacagaagagttcaagtctccaggtggccgatcaagacttgttaccttctttccacccttaccagcccctcgaatgcatcgtagaggagacggagggtaagctgaatgaactgggtcagcgaatttctgcgatcgaaaaagcacagctgaaatcattagagttgattcagggcgagcccctgaacaaggacaagattgaggaactgaagaagaatagggaggaacaggtacagaaaaagaaaaagatcctgaaggagttacagaaagtggaaagacaattgcagatgaagacgcagcagcaattcactaaggagtacctggaaacaaagggccaaaaggatacagtttcactgcaccagcaatgctctcaccgcggcgtcttcccggagggagagggcgatgggagcctacctgaggaccatttctccgagcttcctcaggtggatacaatactgtttaaagataacgacgtggacgacgaacaacagagcccacccagcgcagagcagattgactttgtgcccgtgcagcctctctcctctcctcaatgcaacttttccagtgatctggggtcaaatggcacaaacagccttgagctgcagaaggtctcgggcaaccaacagatagttgggcagcctcagattgcaattactggtcatgatcaagggttgcttgttcaggaaccagatggcctcatggtggcaactcccgcccagacactcacggacactctagacgatttgatagccgccgtgtccactagagtaccaaccggaagcaattcaagttcacaaacaactgaatgtttgacacccgagtcctgctcacagaccacctcaaatgtggcatcacagtctatgccccccgtctacccaagcgtggatatcgatgctcataccgaaagcaaccatgacactgccctgacattggcttgcgccggcggtcacgaggaactggtgtcagttctgattgcccgtgacgctaaaatcgagcaccgagacaagaaggggtttacacctctcatactggccgctactgcaggacacgttggggttgtcgagatccttctagacaaagggggggatattgaggcacaatcagagcgaactaaggatacacctctctcccttgcatgtagcggtgggcggcaagaagtggtggacctcctgctcgccagaggcgccaataaggaacatagaaacgtatcagattataccccacttagtctggcagcctccggtggatatgttaacattatcaagatactgttgaacgctggagcagaaatcaattccaggaccggctcaaagctcggcatatcccccttaatgctcgcagccatgaatgggcacgtgccagcagtgaagctgttgttggatatgggtagtgatattaacgcacagatcgagaccaataggaatactgcgctgactttggcttgcttccagggtagagctgaggtggtcagcctcctgcttgatcgcaaagctaacgtggagcatagagccaaaaccggtctgacaccgttgatggaagctgcctcaggaggctacgctgaagtagggcgtgtgttgctcgataaaggggctgacgtcaacgcacccccggtaccttctagccgggacactgccctcactatcgcagcggacaaagggcattacaagttctgtgaactgcttattcatcgtggggctcatatagacgtcaggaataaaaaaggcaatacccccttatggttggcctctaatggagggcattttgacgtcgtgcaactgctggtgcaggcaggagccgacgtcgacgccgccgataacaggaagattacacctttgatgtcggccttccgcaagggccacgtcaaggtggtgcaatacctcgtcaaggaagtgaatcagttcccatccgatatcgagtgtatgagatacattgccaccatcactgataaagaattactgaaaaagtgccatcagtgtgtggagacgatagtaaaagccaaagaccagcaggccgccgaggctaacaagaacgcatccattctgctcaaggaactagacctggagaaatcccgagaggagtcacgtaagcaggcactcgctgccaaacgagaaaagaggaaagaaaaacggaagaaaaaaaaagaggaacagaagaggaagcaggaggaagacgaggagaataagccaaaggagaattccgaactgccagaagatgaggacgaagaagaaaatgatgaagacgtcgagcaggaggttcccatcgaacccccctcagccaccacaactactaccatcggcattagcgcgacgtctgcaacttttacaaacgttttcggtaagaagagggctaacgtggttacaaccccttccaccaataggaagaacaaaaaaaataaaacaaaggagaccccacccaccgctcacttgatccttccggagcagcatatgtctttggcgcagcagaaagctgataagaacaagattaacggggagcctcgagggggcggagccggtggcaactcggacagcgacaatctggacagtacagactgtaatagcgaatcttcatcagggggtaaatctcaggaacttaatttcgttatggatgtcaattcttccaaataccctagccttctgcttcatagccaggaagagaaaacttcaacggcgaccagcaagacgcagacgcgccttgaaggagaggtgaccccaaactcactttccacctcttataagacagtatctctgcccctctctagtcctaatatcaaactgaatcttacttctccgaaacgtgggcagaagagagaagaggggtggaaagaagtcgtcaggcggagtaagaagcttagcgtaccggcttctgtagtctcccgcattatggggcgtggagggtgtaatatcacagccattcaggatgtcacaggagcccacattgatgtggataaacagaaagacaagaatggagagaggatgatcactatcagagggggcacagagtccacaaggtacgccgttcagttaataaatgctttaattcaagacccggcaaaggaattggaagacctgattccaaaaaaccacatcaggacacctgccagtacaaagtctatacacgccaatttcagtagcggggtgggcaccactgccgccagctctaagaatgccttcccgctgggtgctcccactctggtgacgtctcaagccacgacactgagtacgttccagccagcaaacaagctgaacaaaaacgtccccacaaacgttcgctcgtcattccctgtgagcctgcctctggcctaccctcacccccactttgctctcctcgcagctcagacaatgcagcagatcagacacccgaggttgccaatggctcaattcggggggactttttcccccagtcccaatacctgggggccatttccagtgagaccagtcaatccaggaaatactaactcttcaccaaaacataacaacacttctcggttgcctaaccagaacgggacggtgctcccctctgaaagcgctgggctcgctacagcgagctgccctataacagtttcgagcgtcgttgccgcctcccagcagctctgtgtgaccaatacacgtaccccctcctctgtccggaaacagctcttcgcctgcgtaccgaagacgagccctcctgcgacagtcatttctagtgtgacctctacttgttctagcctgccatctgtgtcttccgcccccatcacctccgggcaggcccctaccacgttcctgccagcttccacgtcccaggcgcaactgtcgtctcagaaaatggagagttttagtgcagtgcctcctactaaagagaaggtgagcacccaggatcaaccaatggccaacctttgtaccccaagttctactgccaactcttgctctagcagtgccagcaatacccccggcgcacccgaaacacatccgtcttcaagtccaaccccgacaagcagtaatacacaggaggaggcccagccctcctctgtttcagacctgagccccatgagcatgccattcgcttctaattccgaaccagcccctctgacgctaacttctcccagaatggtggccgccgataaccaggatacaagcaatttaccacagctggctgtgccagcacctcgggtttcacaccgaatgcagcctagggggtctttttattcaatggtccctaacgcaacaattcatcaggatcctcagagcattttcgtgaccaaccctgttacactgactcctccacagggtccccctgctgctgtgcagttgtcttccgcagtaaatataatgaacggttcacaaatgcacattaaccctgccaataaaagccttcctccaaccttcggacctgccaccttgttcaatcacttctccagcctgtttgactcatcccaggtgcccgccaaccagggctggggggacgggcccctgagtagtcgggtggcgactgacgcatcctttacagttcagtccgctttcctggggaacagcgttctcggacatttagagaacatgcacccagacaactcaaaggccccagggtttcggccccccagccaacgcgtgtctacctcacccgtgggcctgccgtccatcgacccaagcggctccagtccgagtagcagcagcgcaccgcttgccagtttcagtgggatccctggaactagggtgtttctgcagggccctgcacccgtgggtacgccttcatttaatcggcagcacttcagcccgcatccttggacctccgctagcaacagcagcacctctgccccccccaccctggggcaacccaagggggtgagtgcgtcacaggatcgcaaaatccctccacctattgggaccgaaagacttgctagaatcaggcaggggggttccgtcgcacaggcacccgccggcacaagttttgtcgcacctgttggccattcaggaatctggagttttggcgtgaacgcggtgagcgaggggttgtctgggtggtcccaatccgtgatgggtaaccatccaatgcaccagcagctgtccgatccctcaactttttcgcagcaccagcccatggagagggatgatagcggtatggtagcccccagcaacatctttcaccagccaatggcctcaggattcgtggacttcagcaagggactgccgatctccatgtacggaggaaccataatccccagtcacccacagttggcagacgtccctggcgggcccctgtttaatggtctacataatcccgatccagcctggaatcccatgatcaaggtgatacaaaacagcaccgagtgtaccgatgcacagcaggccagtttgctgccttctgtgcctgccctgaagggcgaaattccctcaccccagctaaccaggccaaaaaagcgtatcggcagaccaatggtggcaagccccaaccagagacaccaggaccacctgagaccaaaggttcctgccggggtccaggagcttactcactgtcccgacactcctctgcttccaccatccgactcccgggggcacaacagcagcaactcacccagtctgcaggctggcggcgccgaaggagccggcgaccgtgggagagacacgcggtag

SEQ ID NO: 26699 - DNA, 753 bp, synthetic construct
  source 1..753: mol_type = other DNA; note = Synthetic coding sequence
atgggcgacatccccgccgtgggcctgagcagctggaaggccagccccggcaaggtgacagaggcggtgaaagaagcaattgacgcagggtatcgacactttgactgtgcctacttttaccacaacgagagggaggtcggcgcggggattaggtgcaaaattaaagagggagctgttcgccgggaagatctgttcatcgccactaagctgtggtgtacctgtcacaagaagtctctggtcgagacagcgtgtaggaaaagccttaaagcactaaaactgaactatctggacctttatttaattcattggccaatggggttcaaaccaccgcacccagagtggataatgtcctgctcggagctctcattctgtctgtcccatccgcgggtgcaggatcttccactagacgaatcaaatatggtcatcccctccgatactgacttccttgacacctgggaagccatggaggacttagtcatcaccggattggtgaagaatataggagtgtccaactttaaccacgagcagttggagcggctgctaaacaagccaggcttaaggtttaagcctctcactaatcaaatccttatacgcttccagatccagaggaatgtgatcgtgataccggggagcataactccttctcacattaaggagaatatccaggtgttcgactttgagctgacccagcatgacatggataacattctctccctgaatagaaacctgcggctggccatgttccccatgtag

SEQ ID NO: 26700 - DNA, 525 bp, synthetic construct
  source 1..525: mol_type = other DNA; note = Synthetic coding sequence
atgctgaccgagaacggccaggtgctgagctgcggcagcaacagctttggccagttgggggtaccacacggtcccaggcgctgtgtggtcccacaagcaatagagcttcataaagagaaagtggtgtgcatcgcggccgggctgaggcatgctgtcgccgccacagcaagcggtatcgttttccagtggggaaccgggctggcctcctgtggacgaagactctgtccaggtcagacactgcccctgtttttcaccgcaaaggagccgtcgagagtgacagggctcgagaactccaaggctatgtgtgtattagctggaagtgaccacagtgctagccttaccgatgccggagaagtgtacgtgtgggggagcaataaacatggacagttggctaatgaggccgccttcctccctgttcctcagaagatcgaggcccactgcttccagaatgaaaaagtgactgcaatttggtctggctggacccacctggtggcacaaacagggttactgtggctccgtgcctag

SEQ ID NO: 26701 - DNA, 228 bp, synthetic construct
  source 1..228: mol_type = other DNA; note = Synthetic coding sequence
atgaaccggcggcggaagttcctgctggccagcgtgctggccctgcagaacagctctttcatctatccctcatgtcaaaaatgctttagccggatcatactcgttagtaagcggagcaattgccctaaatgcggttcaaccggtgagagtggcaatgcaaactatcggtataagcttagtttgaaagttgccgaatcaaataagcttttcgtgattactgtcttctag

SEQ ID NO: 26702 - DNA, 252 bp, synthetic construct
  source 1..252: mol_type = other DNA; note = Synthetic coding sequence
atggtggccatggccgaggccgaggccggcgtggccgtggaggtgcggggtctgccccccgcagtccccgatgaacttctcactctatatttcgagaacaggagaaggtccggggggggacctgtgctttcttggcaacgcctcggctgtggaggagtgttgactttcagggagccagccgacgcagagagggtgttggcacaggccgaccacgaacttcacggggcacagttaagtctcaggcctgcctag

SEQ ID NO: 26703 - DNA, 528 bp, synthetic construct
  source 1..528: mol_type = other DNA; note = Synthetic coding sequence
atgctgagcgaggaggagaaggaggagctgaaggccgagctggtgcaactggaagatgagattacgaccctgaggcaagtgctgtctgcaaaggaacgacacctggtggagatcaaacagaaactaggaatgaaccttatgaacgagttaaagcaaaatttttcaaagagctggcacgatatgcagactacgacggcgtataaaaagactcacgaaactcttagtcacgcggggcagaaggctactgctgcctttagtaatgtgggcacagccatcagcaaaaagtttggcgatatgtcgtatagtattcggcactctatctctatgcctgccatgcgcaattctccaacatttaagtcattcgaggagcgcgtcgagaccactgtaacctccctaaagactaaagtagggggaacaaatcccaatggcggcagctttgaggaagtcttgtccagtacagcccacgctagtgcccaatctcttgcaggcgggtcacgccggacaaaagaggaggaactgcagtgctag

SEQ ID NO: 26704 - DNA, 231 bp, synthetic construct
  source 1..231: mol_type = other DNA; note = Synthetic coding sequence
atgaaccggcggcggaagttcctgctggccagcgtgctggccctgcaaaacagtagcttcatatatccctcttgtcaaaaatgcttctctcgtattattttagtgtccaagcggtcaaattgtcctaagtgtggtagtaccggggagagcggcaatgctaactacaggtataagctgtcgctcaaagtcgctgaatctaacaaattatttgtaatcaccgtattcggttag

SEQ ID NO: 26705 - DNA, 456 bp, synthetic construct
  source 1..456: mol_type = other DNA; note = Synthetic coding sequence
atgagcatccccttcagcaacacccactaccggatcccccagggctttggtaacttgctcgaaggactgacaagggagatcctgcgcgagcaacccgacaacattccagctttcgctgccgcttacttcgagagtttgctggaaaagcgggagaagactaatttcgatccagctgagtggggaagcaaagttgaggacaggttttataataaccacgcatttgaagagcaggagcctcccgagaaatcagacccaaagcaggaggaaagccaaatctccgggaaagaagaagagaccagtgtcactatcctggactcgagcgaagaagataaggagaaagaggaagtcgctgcagtcaagatccaagctgcctttcgggggcacatagcccgggaggaagccaagaagatgaagaccaattccctccaaaacgaggagaaagaagagaacaaatag

SEQ ID NO: 26706 - DNA, 270 bp, synthetic construct
  source 1..270: mol_type = other DNA; note = Synthetic coding sequence
atggaggccgccgacgccagccggagcaacggcagcagccccgaggctagagacgctaggagccctagcgggccgagcggcagcctggaaaatgggaccaaggcggatggcaaagacgctaagactactaacgggcacgggggcgaggccgcagagggcaagagccttggctctgcactgaaacccggcgagggcaggtctgcattgtttgctggcaatgagtggcggcgccccatcatccaatttgtggaaagcggagatgacaaatag

SEQ ID NO: 26707 - DNA, 1542 bp, synthetic construct
  source 1..1542: mol_type = other DNA; note = Synthetic coding sequence
atggaggtgggcatcaccatccagcacgcctacgagaagcagcacccctggatcgacttaaccagcatagggttctcgtacgtgattgatttcaacaccatgggccagatcaatagacagactcagaggcagcgaagagtccggcgacgactagacctgatataccccatggtgacaggtaccttaccgaaagctcaaagttggcctgtgtctccaggtccagctacctcccctccaatgagtccgtgtagttgcccgcagtgcgtgctcgtaatgagtgtgaaggccgcagttgttaacgggtccaccggaccgctgcaactcccggtaactcggaaaaacatgccccctcccggtgttgttaagctgccaccactccctggcagcggcgccaagccactggattcaacaggcactatcagaggacctctcaagaccgctccctcgcaagttattcgaaggcaggcctcctccatgcccaccggaaccacgatgggaagccctgcatcccctccaggaccaaatagcaagactggaagggtggctctggccactctcaatagaactaacctacaaaggttggctatagctcagagccgggtgctgattgccagcggcgttcctacagtccctgtaaaaaatctgaatgggagctcaccagtgaacccagcactggccggtatcactggtattctgatgagcgccgctggcctcccagtttgcctgacccggcctcctaagctggtactccaccctccacctgtgtcaaagtccgagatcaagagcatccccggtgtaagtaacacttcgcgaaagactaccaaaaagcaggctaaaaaaggcaagacgcccgaggaggtgctgaaaaagtatctgcagaaagttcgccacccacccgatgaggattgcactatctgcatggaaagactgactgctccatcaggatataaagggcctcaacccactgtgaaacctgatctggtgggtaaactctctcgatgcggtcatgtatatcacatctactgcctggtggccatgtataacaacggaaacaaggatgggtccctgcagtgcccaacatgtaaaaccatatacggcgttaaaacagggactcagccccccgggaagatggagtaccacttaattccgcactccctgcccggacatcccgattgcaagaccatcagaatcatctattctattccccccggcatccaaggccctgaacaccccaaccccggcaaatcattctctgccagaggctttcccaggcattgttatctgcccgatagtgagaaaggtcggaaggtcctgaaactattgctagtggcctgggaccgtagactgattttcgcgataggcacgtcctctaccaccggagagtcggacacagtcatctggaacgaagtgcatcataagaccgagttcggcagcaatttaactggccatggctatcccgacgctaactacttggacaatgttctagcggagctggccgcacaggggataagcgaagacagcactgcacaagaaaaagattag

SEQ ID NO: 26708 - DNA, 414 bp, synthetic construct
  source 1..414: mol_type = other DNA; note = Synthetic coding sequence
atgagcagcgtgcagagccagcaggagcagctgagccagagcgaccccagcccatcgcctaattcctgttcttccttcgaactgattgatatggatgccggcagcttgtatgaacctgtcagccctcactggttctactgcaagatcatagatagcaaagaaacatggatccctttcaacagcgaggatagccaacagctggaggaggcctattcttcaggcaaagggtgtaatgggcgtgtagtgcctactgacggtgggcgttacgacgtacacctgggggaacgcatgcggtatgcagtgtattgggatgagctcgccagcgaagttcggaggtgtacatggttctacaaaggagacaaggacaataaatacgtcccttactccgagtctttctcccaggtgctcgaatag

SEQ ID NO: 26709 - DNA, 120 bp, synthetic construct
  source 1..120: mol_type = other DNA; note = Synthetic coding sequence
atgttctggaagttcgacctgcacagcagcagccacatcgacaccctcctagaacgcgaagatgtcactttgaaagaactgatggatgaggaagacgtgttgcaggaatgcaaagcttag

SEQ ID NO: 26710 - DNA, 2157 bp, synthetic construct
  source 1..2157: mol_type = other DNA; note = Synthetic coding sequence
atgctgatgaccctggagatgaccgagctgaccgacccccaccacaccatgggcgactacaaagttgctcacccccaggatccccatcacccatccgaaaagcccgtgatacactgccacaaatgcggggaaccctgtaaaggggaggtgttaagggttcaaaccaagcactttcacatcaaatgctttacctgtaaagtatgtgggtgcgatctggctcaagggggtttctttataaagaacggggaatacctgtgtactctggattatcagaggatgtacggtacacgttgccacggctgcggggaattcgtggagggggaggtggtaacggctctgggcaaaacgtatcacccgaactgcttcgcttgtaccatttgcaaacggcccttcccccctggggatcgggtgacattcaacgggcgcgattgtctgtgccagctgtgtgctcagcccatgagcagcagtcctaaggaaacaaccttctcaagcaactgcgcagggtgtgggcgggacataaaaaatggtcaggccttgctagcacttgataagcaatggcatctgggctgctttaaatgcaaaagttgcggcaaggttctaacgggcgagtatatttccaaagacggggccccatattgcgaaaaggactatcagggcttgttcggtgtcaaatgtgaggcttgtcaccagtttatcactggcaaggtgttggaggctggcgacaaacactaccacccttcatgtgcccggtgttcacgctgcaatcagatgtttaccgagggagaggaaatgtacttgcaaggctccacagtgtggcaccctgactgcaaacaatctacaaagacagaagaaaaactcaggcccacgaggacgtcctcggaaagtatctactctagacctggctcgtcaatcccggggagcccagggcacacaatctatgccaaggtcgacaacgaaatcctcgactacaaagatctggccgctattcctaaggtcaaggcgatttatgatatcgaacggccagatcttattacttatgagccattctacaccagtggctacgacgacaagcaggaacgccagagccttggcgagagccctcggacgctatcccctacaccaagcgcggaaggctaccaggacgtcagggacaggatgattcatcgaagcacttcccaagggtccatcaactcaccagtttactcccgccactcctacacccctactacatcaaggtcacctcagcacttccacagaccgggaaacgaaccctcatctggtcgcaacagtccattaccatacaggcctgacagtcgccccttaacccctacatacgcacaggcacccaaacactttcatgttcccgatcaaggaataaatatctaccgtaagccaccaatctacaaacaacacgctgctctagctgctcagagtaagagttctgaggacattattaaattttctaaattcccagctgcacaggcgcccgatccgtctgaaactcctaaaatcgagaccgatcactggccagggccccccagcttcgctgtggtaggcccagatatgaaacgacggtcatcaggcagagaggaagacgatgaagagcttctgagacggcgacagttacaggaggaacagctgatgaagctgaatagcgggcttggccagctgatcttgaaggaagaaatggagaaagagtctagagaacgctcatccctgctagcaagtcgttatgacagccccattaatagcgcctctcatatccccagtagcaaaaccgccagcctgcctggatacgggcggaatggacttcatcggcctgttagtaccgactttgctcagtacaattcttatggtgatgtttctggtggtgtacgcgattttcagacactgcccgatggccatatgccggccatgcgaatggacaggggagtgtcaatgcctaatatgctggaacctaagattttcccatatgaaatgctgatggtcacgaaccgaggtcggaacaaaatcctacgcgaagtggatcggacgcggctggaaagacatttagcaccagaggtattccgggaaatattcgggatgagcatccaagaatttgataggctaccactttggaggcgcaacgatatgaagaaaaaggctaagctcttttag

SEQ ID NO: 26711 - DNA, 2148 bp, synthetic construct
  source 1..2148: mol_type = other DNA; note = Synthetic coding sequence
atgagccagagcggcgccgtgagctgctgccccggcgccaccaacgggagtctgggtcgaagtgatggggtcgctaagatgtcccccaaagacctcttcgaacagcggaaaaaatatagcaactccaacgtaattatgcacgagacctcgcaataccatgtccagcacctggccacttttatcatggacaagtcggaggccatcacgtcagtggatgatgctataaggaagctggtgcagctctcatcaaaggagaaaatctggacccaggagatgctcttgcaggttaacgatcagtccctgcgacttcttgacatcgagtctcaggaggaactggaggattttccactccctacagtacaacgtagccagactgtgctaaatcagttgaggtacccttctgtcctccttctggtatgtcaggatagcgagcaatctaagcccgacgttcatttctttcactgtgatgaggttgaggctgagctagtacacgaggacatcgagagtgccttagccgactgcaggctcgggaagaagatgagaccccagacattgaaaggccaccaggagaaaattcgtcagagacagagcattctgcctccacctcaggggccagccccaatcccatttcagcatcgaggtggggacagtccagaagccaaaaatcgggtcggccctcaggttccactgtccgagcccgggtttcggcgcagggagtcacaggaggagccacgggccgtgctggcccagaaaatcgaaaaggagacacagattctcaattgtgccctggacgatatcgaatggttcgtagctcgcttacagaaggctgctgaggccttcaaacaacttaatcagagaaagaaaggtaagaaaaaaggcaagaaggcccccgcagagggtgttttaacccttagagctaggccaccatctgagggggagtttatcgactgcttccagaagatcaaactcgcaattaacctcttggcaaaacttcaaaaacatatccaaaacccttccgccgccgagcttgtgcactttctctttggacccctggacctgattgttaatacatgcagcggccctgatattgcacgaagcgtttcttgcccattgctctcccgggatgctgtcgatttcctcagaggccacctggtgccaaaggagatgagcctgtgggaatctctcggcgaatcttggatgcggccacgctcagaatggcctcgcgagccccaggtgcccctttacgtccccaagtttcacagtggctgggagccgcccgtcgacgtcctgcaagaggcaccgtgggaggtcgagggacttgcgagcgcccctattgaagaggtgtcaccagtgtcaagacaaagcattaggaattctcagaaacactcgcctacatcggagcctacacccccaggggacgccctgccccctgtttccagcccccacactcatcggggctaccagcctaccccggccatggccaagtatgtcaaaatactctacgatttcacagcacgcaatgctaacgaactctcagtcctgaaagatgaagtcctggaagtgctggaggatggtagacagtggtggaagctacggtcacgaagcggccaggcaggatacgtgccatgcaacatactcggcgaggcacgacccgaggatgccggagcgccattcgagcaggctggacagaagtattgggggcccgcctcgcccacccataaactacccccttcttttcctggcaacaaggacgagttgatgcagcacatggacgaagtgaatgatgaacttatcagaaagatcagcaacatccgcgcccaaccccaaagacattttcgggtggagaggtcacagccagtgagccagcctctgacctatgaatccgggccggacgaggtcagggcctggctcgaagctaaggccttttcaccacggatcgtggagaacctcggcattctaacaggcccacagctgttttccctgaataaagaggaactgaagaaggtttgcggggaggagggcgtccgagtatattcccagttgactatgcaaaaggccttcttggagaaacagcaaagcggaagcgaactcgaggagttaatgaacaagttccatagtatgaatcagcggcggggcgaagactcatag

SEQ ID NO: 26712 - DNA, 360 bp, synthetic construct
  source 1..360: mol_type = other DNA; note = Synthetic coding sequence
atggagaccgacctgaacagccaggaccggaaggacctggacaagttcattaaattttttgcactgaagactgtgcaggtcattgtgcaagcccggctgggcgaaaaaatctgcaccagaagctcaagttctccgacaggcagtgactggttcaaccttgcaattaaggatattcctgaggtgactcatgaagctaagaaagcgttggccgggcagctgcccgcggtggggagatctatgtgtgtggaaatatctctcaaaacctcagaaggggacagcatggagctggaaatatggtgcctcgaaatgaacgagaaatgcgataaggaaattaaagtttcgtatacagtgtataactag

SEQ ID NO: 26713 - DNA, 420 bp, synthetic construct
  source 1..420: mol_type = other DNA; note = Synthetic coding sequence
atggccgacaccgacctgttcatggagtgcgaggaggaggagctggagccttggcagaagatcagtgatgtcatcgaggatagcgttgtcgaggactataacagcgtcgataagactacgacggtctctgtgtcccagcaaccagttagcgcacctgtgcctatcgccgcccatgccagcgtcgcaggacacctgtccacatcaaccacggtgagcagttctggtgcccagaacagtgactccaccaagaagactcttgtgaccctcattgcgaacaataacgcaggcaaccctttagtgcagcaggggggccagccccttattctgacacagaatccagccccaggcctcggtaccatggttacacaacccgttctgaggccggtgcaggtgatgcagaatgctaatcacgttacttag

SEQ ID NO: 26714 - DNA, 492 bp, synthetic construct
  source 1..492: mol_type = other DNA; note = Synthetic coding sequence
atgcacgacaagggcatcaccaccgccgccgtgtgcgtgtaccccgctcgagtttgtgacgcggtgaaggccctaaaagctgctggctgcaatatacccgtggcgagcgttgctgccggatttcctgctggtcagacccatttgaagacacggttggaagagatccgtctggcagtggaagacggtgccaccgaaattgacgtagtgatcaacaggtcgttagtgttaactggccagtgggaagccctgtatgacgaaattaggcagtttcggaaggcttgtggggaagcccaccttaagactatccttgccacaggcgagctgggtactttgacaaatgtgtacaaggccagcatgatcgccatgatggctgggtcagatttcatcaagacaagcacagggaaggaaacggttaacgccacattcccggtagccatcgtgatgctgcgcgcaataagagatttcttctggaagacgggcaacaaagtgtag

SEQ ID NO: 26715 - DNA, 456 bp, synthetic construct
  source 1..456: mol_type = other DNA; note = Synthetic coding sequence
atggccgacaccgacctgttcatggagtgcgaggaggaggagctggaaccatggcagaagattagcgatgtaatcgaagattcagtggtggaggattataacagcgtagataagacaactactgtgtcagtttctcagcagcccgtctctgcacctgttcccatagctgctcatgcttctgttgctgggcacctgtctacttccaccacagtcagcagctctggagcccagaactctgattcgactaaaaaaacgctggttaccctgatcgccaacaacaatgccggcaatccactggtgcagcaagggggccagcctctgatcctcacacagaatcccgccccggggctgggcaccatggtgacccaacccgtgctccggccagtgcaggtgatgcagaatgccaatcatgttacatctagtcctgtggcctctcagccgatatttatcacttag

SEQ ID NO: 26716 - DNA, 252 bp, synthetic construct
  source 1..252: mol_type = other DNA; note = Synthetic coding sequence
atgagccagagcggcgccgtgagctgctgccccggcgccaccaacggctcactcggcagaagcgacggggtggcgaaaatgtcgccgaaagacctctttgagcagcgaaaaaaatactctaatagtaatgtgattatgcatgaaacaagccagtaccacgtgcagcacctcgccacctttattatggacaagagcgaagccattacctccgtcgacgatgccataaggaaactggtgcagctgtccagttag

SEQ ID NO: 26717 - DNA, 366 bp, synthetic construct
  source 1..366: mol_type = other DNA; note = Synthetic coding sequence
atggccggccggcccctgcggatcggcgaccagctggtgctggaggaggactatgacgagacttacatcccttctgagcaggaaattctcgagtttgccagggagattgggatcgaccccatcaaggaaccagagctcatgtggctcgcccgcgaagggattgtggctcctttgcccggcgagtggaaaccttgtcaggatatcacaggtgacatttattacttcaacttcgccaatggacagagtatgtgggaccatccttgtgacgagcattaccggtccctggttattcaggagagggccaaactgagcaccagtggcgctataaagaaaaaaaaaaaaaagaaggagaagaaggacaaatag

SEQ ID NO: 26718 - DNA, 2997 bp, synthetic construct
  source 1..2997: mol_type = other DNA; note = Synthetic coding sequence
atgaaccggcggcggaagttcctgctggccagcgtgctggccctgcagaactcaagctttatctatccctcttgccagaagtgtttctcccgcattatcctcgtgtctaagcgctctaactgtccaaaatgcggctcaacgggagaatcaggcaacgcgaattaccgctacaagctctccctgaaggtggcagaatcaaataagctgttcgtgattaccgtgtttggctcctgtttggacactttttttggcttgaccgcaaccggtctccatcgctacatccaagaccctaataagatcccagaaactctggacaacgacacaacccagaatcttctcacgaaggcagtggagacctgctttgtcggccagagtttcatcttcggggtcacgaactttgagaaccaacccggccagggttccgacgcctctaacttcctacagcaatgttccgaccataagcgaaaagccaaagcccttgtggcatgccagatcgttcttcctgaccccgggatcgctggctttaccgtaattgactattttcatcagctactgcaaacctttaactttcggaagctacagtgtgactcacaggcccctaacaaccacctcctggcactcgatcactctaactccgaccttagttccatatacacaagcgactctacctccgactttttcaagtcatgtagcaaggatacatttagcaagttctggcagccttctctggagtttacatgtatcgtgtcacagctgacagacaacgatgactttagtgcttccgagcagtccaaggcgttcgggactttgcagcaaaatcgaaaaagtatcagtattgccgaagctaccgggtcgagctcatgtcacgaccccattcaggattcttggtctcttgtgtcctatatggataagaagagcactgccgagaaactgggcaaggagctcggactgcaggcaaaagagctgtccgctgttcactcaagtcatcacgaaattggagtcaacgactcgaacctattttccctggaaatgagggaacctctagaaagttctaataccaaaagctttcactcagctgtcgagatcaagaacagatcacaacacgaactgccgtgtttccagcaccacggaatcgatacacctaccagcctccagaagcgttcggcttgctgcccaccctctcttcttcgcctggaggaaaccgcatcatcctcccaagatggggatcctcagatctgggacgatttgcctttcagtgagagcctcaataagtttttagcagttctcgagagtgaaattgctgtcacacaagcagacgtcagcagtcgcaaacaccatgtggataacgatattgacaagttccacgccgaccacagtaggctctcggtcacaccgcagaggaccaccggcgcgctgcacactcctcctatcgccttacgttcatcacaggtcattgtgaaggctaactgttcaaaggatgacttcttgtttaactgtaagggaaatctgagtccaagcgtggagaaggaatcacagcctgataacaaagtcgaggctgtgtccgttaaccacaatggaagggacatgagcgagtacttcctccccaacccatacttgtctgcgttgtcaagctcctctaaggacctggagacaattgtcacgttgaagaagacaattcgcatcagcccacaccgcgagagcgaccacagtagcttgaacaacaagtatttgaatgggtgcggggaaatatcagtatccgaaatgaatgaaaagctgacaaccctgtgctaccgcaagtacaatgacgtgagcgatctatgtaagctagaaaacaaacagtactgcaggtggagcaagaaccaggacgactcattcactatttgcaggaaactgacctaccccctcgagacgctgtgcaactcacctaaccgctccacaaacactcttaaagaaatgccttggggccatatcaacaacaatgtcacccagagctattccatcggatacgaaggaagttatgacgcatccgctgaccttttcgatgatatagccaaggaaatggatatcgctactgaaattacaaaaaaatctcaggacatcctgctgaagtgggggacaagcctggcggagagccatccaagcgagagtgacttttctctgaggtcactgtcagaagatttcattcagccaagtcagaaattgtcactgcaatcactaagtgacagccgccacagccgtacctgtagccccaccccccatttccaatctgactccgagtacaactttgagaacagtcaggactttgtcccatgtagccagtctacccccatttcggggttccatcagacgcgcattcatggcattaacagagcatttaaaaagcctgtgttctatagtgatctggatggcaactatgagaagatccgaatatttcccgaaaacgacaaacagcaggcatctccttcatgtccgaaaaacatcaagacaccctctcagaagatcaggtcccctattgtctcaggagtgagccagccagacgtcttcaatcattaccccttcgccgagtgccatgaaaccgactccgatgagtgggtccctccaacgacacaaaaaattttcccatctgatatgctgggttttcaggggataggacttggaaagtgcctcgccgcgtatcattttccagaccaacaggaactcccgcggaaaaagttaaagcacatcagacagggtaccaacaagggccttattaaaaaaaaactgaagaacatgctcgcagcggttgtcactaaaaaaaaaacccacaagtacaattgcaaatcctctggttggatttcaaagtgtcccgatatccaagtgcttgcagccccccaactacatcctattctgggccctgattcgtgtagcgaggtgaaatgttgcctgccctttagcgagaaaggccccccctctgtttgcgagactcgctccgcctggtcacctgaactgttttcctag

SEQ ID NO: 26719 - DNA, 504 bp, synthetic construct
  source 1..504: mol_type = other DNA; note = Synthetic coding sequence
atgggcaccaccgcccccggccccatccacctgctggagctgtgcgaccaaaagctgatggagttcctttgtaacatggataataaggacttggtctggcttgaggagatccaggaagaagcggaacgaatgttcacccgtgaattttccaaggaacctgaactcatgccaaagacacccagccaaaagaaccggagaaagaagaggaggatcagctacgtgcaggatgaaaacagagaccctatcaggcggcgactgagcaggcggaagtcccgttcgagccagctttcttcccgccgattacggagtaaagattctgtggaaaagttggcaacagtggtcggtgaaaatggaagcgtgcttaggcgggtcacccgggctgccgcagccgctgccgcagccaccatggcactggctgccccatccagccctaccccggaatctccaaccatgctcacaaagaagccagaggacaaccacacacaatgccaactcgtgccttag

SEQ ID NO: 26720 - DNA, 615 bp, synthetic construct
  source 1..615: mol_type = other DNA; note = Synthetic coding sequence
atggaggcccaggcccagggcctgctggagaccgagcccctgcaggggacagacgaggacgcggtggcgtcggccgatttcagttctatgctctctgaggaggagaaggaggagctgaaggccgagctggtgcagctggaagacgagattacaactcttcggcaggtgttgagcgcgaaggagaggcatctcgtggagatcaaacaaaaactggggatgaatctgatgaatgagctaaagcagaatttctccaagagctggcacgatatgcagacaaccaccgcttataaaaaaacgcacgaaacattatcccatgcaggccaaaaggccacagcagcctttagcaatgtcggtactgctatctctaagaagttcggtgatatgtcatactctatcagacattcgatttcaatgccggcaatgcgcaatagcccaacatttaagagcttcgaagaaagagtggagactaccgtgacatctctgaaaaccaaggtggggggcacgaatcctaacgggggaagttttgaagaggtcctttcatccactgcgcacgcctctgcgcagtcccttgcaggggggtccagaaggaccaaggaagaagagctgcagtgctag

SEQ ID NO: 26721 - DNA, 1023 bp, synthetic construct
  source 1..1023: mol_type = other DNA; note = Synthetic coding sequence
atggccgccgcccgggacccccccgaggtgagcctgcgggaggccacccagaggaaactgcgaaggttctcagagctgaggggaaagctggttgcgaggggagagttctgggacattgtggccatcaccgcagcggatgagaagcaggaactggcctataatcagcagctctccgagaaactcaagcggaaggaactgcctctgggagtgcagtaccatgtgttcgtcgatcccgcgggagcaaaaataggcaatgggggctcaactttgtgtgcactgcagtgcctggaaaagctgtacggcgacaagtggaattcatttacgatcctcttaatccactccggcggttattcccagaggttacccaacgcttctgccctgggaaaaatctttacagccttacccttagatatcccggaatgttctggcaagacctcttgcattatccagagcattctggactcacgctgttcagtcgctcctggatcagtggtggaatatagcaggctggggcctgacgtctctgtcggtgaaaactgtatcatcagtggcagctatattctcacgaaagctgctctgcccgcacattcgttcgtgtgttcattgagcctcaaaatgaatcggtgcctgaagtatgcgaccatggctttcggagtccaagacaatcttaaaaaatccgtgaagacattgtcagatatcaagctcctgcagttctttggcgtctgtttcttgtcttgccttgacgtgtggaacttaaaggtaacagaagaactgttctccggtaataagacgtgcctatccttgtggaccgctcggatcttccctgtctgcagtagcctgtcagattccgtgatcacctcgttaaagatgctcaacgccgttaaaaacaaatcagcgtttagcctaaacagctacaaacttctctcaatcgaggagatgctgatttacaaggatgtggaagatatgataacttatagggagcagattttcctggagatcagcttaaagtccagtctgatgtag

SEQ ID NO: 26722 - DNA, 873 bp, synthetic construct
  source 1..873: mol_type = other DNA; note = Synthetic coding sequence
atggccgagctgaccgccctggagagcctgatcgagatgggcttccccagagggagggccgaaaaagcactagccttgaccggcaaccagggcattgaggcagccatggattggttgatggagcacgaggacgatcctgatgttgacgaaccactcgagacgccccttggtcatattttggggagggaacccacatcttctgaacagggtggcctggagggatcgggatctgctgctggggagggaaagcccgctctctccgaggaggagcgccaggagcagactaagcgtatgctggaactcgtagcccagaaacaaagggagagagaggagagagaggagcgcgaggccctggagagagagaggcagcgccgcaggcagggccaggagttatctgcagccaggcaaaggcttcaggaggatgagatgcgcagagctgccgaggagaggcgacgcgaaaaggctgaggagttggcagccaggcagagagtccgagaaaagatagaacgggacaaggctgagagagcaaaaaaatacggcgggtcagttgggagccagccaccccccgtggctcctgaacctggccctgtgccatcatctccctcccaggagcctccaacgaagcgagaatacgatcaatgtcgtatacaagtccggttacccgatggtacaagcctgacacagaccttccgggctcgcgaacagctggccgcagtgcgcctttatgtggagttgcatcggggagaggagttgggcggcggacaggacccagtccagctgctgtccggatttccaagaagggccttctctgaggccgatatggagagaccacttcaggaactgggtctagtcccttccgctgttctcatctag

SEQ ID NO: 26723 - DNA, 309 bp, synthetic construct
  source 1..309: mol_type = other DNA; note = Synthetic coding sequence
atgctgagcgaggaggagaaggaggagctgaaggccgagctggtgcagcttgaggatgaaataactaccctgagacaggtgctgtcagcgaaagaacggcacttggtcgagatcaagcagaaattgggcatgaaccttatgaatgaattaaagcagaacttctccaaaagctggcacgacatgcagacaaccactgcatataagaagacacacgagacgcttagtcatgctgggcaaaaagctacggccgccttttcaaatgtcggcaccgcaatctctaagaaattcggtgacatgaggaggaaatag

SEQ ID NO: 26724 - DNA, 279 bp, synthetic construct
  source 1..279: mol_type = other DNA; note = Synthetic coding sequence
atgctgagcgaggaggagaaggaggagctgaaggccgagctggtgcagcttgaggacgaaataacaaccctgaggcaggtactgtcagccaaggaaaggcacttagtagagattaagcagaagttaggcatgaatttaatgaatgagctgaagcagaatttcagcaaaagttggcatgatatgcagaccaccaccgcctacaagaagacccacgaaacactgtctcacgcagggcagaaagccaccgcagccttttcaaacgtgggaaccgctatttag

SEQ ID NO: 26725 - DNA, 3735 bp, synthetic construct
  source 1..3735: mol_type = other DNA; note = Synthetic coding sequence
atgctgatcaaggagtaccacatcctgctgcccatgagcctggacgagtatcaggtcgctcagctgtatatgatacagaaaaagagccgcgaagaatcttccggcgaggggtcaggtgtggagatcctggccaacaggccgtatacagacggccccggtggctctggtcagtatactcataaagtctaccatgtcggctcacacatccctggctggtttcgcgccctgctcccaaaggcagccttgcaagtagaagaggagagttggaatgcgtacccatatacccggacgcgttacacatgcccctttgtggagaagttcagtatcgaaattgagacatactatctgcccgacggcggccaacagcctaatgttttcaatctgagcggggcagaaagaaggcaacgtatactggacacaatcgacattgtaagagatgccgtcgctccaggggagtataaggcagaggaggatcctcggctctatcactccgtcaaaacagggcgcggtccgctctcagatgattgggctaggactgccgcccagacagggcccctgatgtgtgcctataaactctgtaaagtcgaattccggtactggggaatgcaggccaaaatcgagcagtttattcatgacgtgggcctgcgcagagtgatgctgcgcgcacaccggcaggcttggtgctggcaggacgagtggaccgagctcagtatggcggatatacgcgcgttggaggaagagaccgcacggatgctcgcacaaaggatggctaaatgtaacaccggcagcgaaggcagcgaggctcagcccccgggtaagccttccacagaggcccggtcagcagcaagcaacaccggcacccccgacggacctgaagcaccgcccggacccgatgcttctccggacgcctccttcggcaaacagtggtccagttcgtcgcggtcatcctacagctcccagcatgggggagctgtctctcctcagtccctgagcgagtggcgcatgcagaatatcgcaagggactctgagaattcctctgaagaagaattttttgacgctcacgagggcttctccgactcagaggaagtcttccctaaggaaatgaccaagtggaactcgaacgactttattgatgccttcgcttcgcctgtagaggccgagggaacccctgagcctggcgccgaggccgccaagggcatcgaggacggtgcccaggctccccgggattcagaaggactggacggagccggggaacttggggccgaggcatgcgccgttcacgcactgttcctgatcctgcatagcggcaatatcctagatagcgggcctggggatgccaacagtaagcaagccgacgtccagaccctgtcatcagcattcgaggctgtgacaaggatccacttccccgaggcactcggccatgttgctctgcgtctcgtcccctgccccccaatttgcgcggccgcctacgcactggtgagcaatctgtctccgtactcacacgatggcgactcccttagtcgctcgcaggatcatataccactcgctgcactcccactgcttgccacaagcagctcgcgatatcagggcgcagtcgcgacagtgattgcgcggacaaatcaggcctactctgcatttctgcgttccccagagggagccggcttctgcggccaggttgctttgataggggacggcgtgggaggaatccttggcttcgacgctctgtgccatagcgctaacgcaggtaccgggtccaggggtagcagtaggcggggttctatgaacaacgaattactctctcctgagttcgggcctgtgagggatccccttgccgatggagtcgagggtctcggccggggaagccctgagccaagcgccctccctccccagaggattccttcagacatggcaagtcccgaaccggagggatctcagaactcccttcaggcagccccagccaccacttcctcttgggagccccgtagggcgtcaactgcattttgccccccagctgccagttctgaggcccccgatgggccttcctccaccgcacgtctggatttcaaagtttccggcttcttcctcttcggcagcccattaggactcgtgctggcactgcggaagaccgtgatgcctgccctggaagcggcccagatgaggcctgcatgtgagcaaatttacaacctgtttcacgctgcagatccatgcgcaagccgactggaacccctccttgcacctaagtttcaggccatagcccctctgacagtcccccgataccaaaagttccctctgggcgatgggtccagcctccttctggcggacacactgcaaacccatagcagcctcttcctggaggaactagagatgttagtacctagcactccgacttctacgtccggggcattctggaaaggttctgagctggctacagaccctccggcccagccggccgcgccgtctactacttccgaggtagtcaaaatcctggagcgatggtgggggacaaagcgaattgattattctctgtattgtccagaagcactgactgccttccccaccgtcaccctcccccatctcttccacgcaagctactgggagagcgccgatgtggtcgctttcatcctgcgccaggtgattgagaaagaacgccctcaactggccgaatgtgaggaaccaagcatatattcacccgcctttccccgggaaaaatggcagaggaaaaggacacaggtgaagatccgcaacgtgacctcaaaccatagggcttccgacaccgttgtgtgcgagggccgacctcaggtgctcagcgggcggttcatgtacggtccccttgacgtcgtaacgcttacaggcgagaaagtagatgtgtatatcatgacacagcccctttctgggaaatggatccactttggaactgaggtgacgaacagcagcgggcggcttacgttccccgtaccaccagagagagctctgggcatcggagtatatccagtgaggatggtggttaggggagatcatacatatgcagaatgctgcctgacagtggtggcccgaggtacggaggctgttgttttctctattgatggctcgttcacggcatccgtctctattatggggtcagatcctaaagtaagggccggcgctgtcgacgtggttaggcattggcaggattccggatatttaatagtatacgtcaccgggcgacccgatatgcagaagcacagggtggtcgcatggctgtcacagcataacttccctcatggcgttgtgtcgttttgcgacggcctaactcatgaccctttgcggcagaaagctatgtttttgcaatcgctggtgcaagaagtcgagcttaacattgtggctggctacggctcccctaaagatgtggccgtgtatgccgcgctgggcctgtctccaagccagacctatattgtaggccgtgctgtcagaaagttgcaagcacagtgtcagttcctgtccgatggctatgtagctcacttgggccagctggaagcaggatcacatagtcacgcatccagtggtcctcccagagccgcacttggaaagtcctcgtacggagtagcagccccagtggactttctgagaaagcaaagccagctgctgagatctagaggtccttcccaagctgagagagaaggacccggcacaccacctaccaccctcgctaggggaaaagctcggtccataagcctgaagctggactcggaggaatag

SEQ ID NO: 26726 - DNA, 2676 bp, synthetic construct
  source 1..2676: mol_type = other DNA; note = Synthetic coding sequence
atggaccagcccgaggccccctgcagcagcaccggcccccggctggccgtcgctagagagctgctgctggcggcactagaggaattgagccaggagcagctgaagaggtttagacataagttgagggatgtggggcccgatggaaggtctattccttggggaaggttggaaagagctgatgcagtggaccttgcagaacaactggcccagttctatggccctgaacccgctcttgaagttgccaggaagaccctcaaacgggccgacgccagagatgtcgctgcccagctgcaggaaagaaggttgcagcgattgggccttgggagtgggaccttgctctccgttagcgaatataagaaaaaatacagagaacacgtgttgcagctgcacgcgcgcgtaaaagagcggaatgctcggtcagtcaagatcacaaagcggttcactaaactgctgattgccccggaatccgcggcaccggaggaagcaatgggccccgctgaagagccagaacctggtagggctcgaagaagtgacacacacactttcaaccgcctttttaggagagatgaggagggccgtaggcctcttaccgtagtactgcagggtcctgctggtattggaaaaactatggcagctaagaagatcctctatgattgggcagctggcaaactctatcagggccaggtggatttcgctttctttatgccctgtggagaacttctggaaaggccaggaactaggagccttgccgacctgattctggatcagtgcccagacaggggtgctcccgtgccacagatgctggcccagccacagcggttgctatttattttggacggtgcggacgagctccccgcattggggggtccggaggcggccccttgcactgatccttttgaggccgccagcggtgctcgagtgttaggaggccttctgagcaaagcacttttgcccactgccctcctgctggttaccacccgcgctgcagcccccgggaggttacagggcagactgtgttctcctcagtgcgccgaagtgagagggtttagcgacaaggataaaaaaaagtacttctacaaatattttcgtgacgagcgtcgcgcagaacgtgcctacagattcgtcaaggagaacgagactctctttgcactctgcttcgtgcctttcgtctgttggatagtgtgtaccgttctgcggcaacagcttgaactagggcgagacttgagccggactagtaaaacaacaaccagcgtgtaccttttgtttattacctctgtcctatcgtctgctcccgtggcggatggaccacggttacaaggcgacctacgcaacctttgcagactggcgcgggagggagttctgggaaggcgcgcccagtttgccgaaaaagagctggagcaactcgaactacgtggttctaaggtccaaactctgtttctctctaagaaagaattacctggggtccttgagacagaggtaacataccaattcatcgaccagtcattccaagaattcttggctgccctgagctacctacttgaggatggcggtgtgcctcgcactgctgctgggggcgtcggtacactgttgcgcggagacgcccagccgcactcacacctcgttttgaccacaagattcttattcgggctgttatccgccgaaagaatgagggacatagagcgccacttcgggtgcatggtttcagaacgagttaagcaggaagccctccggtgggttcaggggcaggggcagggctgtcccggggtcgcccccgaggtgacagagggagccaaggggcttgaagataccgaagagcctgaggaggaggaagagggtgaggagcccaactaccctctggagctcctttattgtctctatgaaacgcaggaggacgcttttgtgcgccaagctctctgtagattcccagaactcgccctgcagcgcgtacgattctgcagaatggacgtggccgtattgtcgtactgcgtgcgttgttgccctgcagggcaggccttgagactgattagttgcaggctggtggctgcacaggaaaagaaaaaaaagtcactaggaaaaaggctgcaggcaagtctagggggaggctctagtcaaggcactaccaagcagctcccagcatctctgctgcacccactcttccaggcaatgacagatcccctctgccacctgtcctcactgacactgtcgcattgcaaactccctgacgcagtctgcagagacttgtccgaagcactgcgagccgccccagccctgaccgagttaggccttctccacaaccgcctgtcagaagcgggcctgcgcatgctgagtgagggcctcgcctggccccagtgcagggtgcaaactgtgcgggtccagctcccagatcctcagcgtgggctccaatacttggtggggatgttgagacaaagtcctgccctgaccactttggacttgagtgggtgccagctcccagcacccatggttacctacctctgtgccgttctccagcaccagggttgcggactgcagaccctgtcactcgcttctgtcgagctgagcgaacagtcacttcaagaactgcaggcagtgaagagagcgaagcctgacttagtgatcacacatcctgccctcgacggacacccacaaccccctaaagagctgatcagtacgttctag

SEQ ID NO: 26727 - DNA, 240 bp, synthetic construct
  source 1..240: mol_type = other DNA; note = Synthetic coding sequence
atgagccagagcggcgccgtgagctgctgccccggcgccaccaacggttctcttggccgttccgacggagtggccaagatgtctcctaaggatctgtttgagcagagaaaaaagtattccaactctaacgttattatgcacgaaacttcgcagtatcacgttcagcatctcgcaacatttatcatggacaaaagtgaggcaattacaagtgtggatgatgcgattaggaagctcgtctag

SEQ ID NO: 26728 - DNA, 543 bp, synthetic construct
  source 1..543: mol_type = other DNA; note = Synthetic coding sequence
atgggcgacaagaagagccccacccggcccaagcggcagcccaagccttcatcagatgagggctactgggattgttccgtgtgtacatttcgaaacagcgccgaggcctttaaatgcatgatgtgcgacgtccgaaagggtacgtctacaaggaagcctcgccctgtgagccagctggtggcacagcaggtaacacaacaattcgtgcctccaacccagtccaagaaagaaaagaaggacaaagtggaaaaagaaaagtccgaaaaggaaactacttcaaaaaagaactcccataagaaaacaaggcctaggctgaagaacgtggatcgctcttctgcacagcatctggaggttaccgtgggtgacctgacagtgatcatcacggactttaaggagaaaacaaaaagcccacccgcttcaagcgccgcctccgccgaccaacacagccaaagcggctcttcctcagacaatacggaacgcggaatgtccaggtctagctccccgagaggcgaggcgtccagcctcaacggggagtctcactag

SEQ ID NO: 26729 - DNA, 2196 bp, synthetic construct
  source 1..2196: mol_type = other DNA; note = Synthetic coding sequence
atgggcagcggcgaggagcccggccagagcggcgccagcctgcggacaggcccaatggttcaggggagaggaattatgacaacggggagcggacaagaacccggtcagtctggtacaagcctgcgaactggcccgatgggctcactgggccaagctgaacaggtctcatccatgcccatggggagtctggagcacgagggactggtgtcactgcgaccagtgggcctgcaggagcaggaaggcccaatgtccctagggcctgtgggcagtgcaggcccagtagagacgagtaaaggcttgttggggcaggaaggtctggtggagatcgccatggacagtcctgagcaggaaggcctcgttggccctatggagatcacaatgggctctctggaaaaagccggacctgtctctccaggatgcgtcaaactggcaggtcaagagggactggtggagatggtgctgctgatggagccaggggctatgcgattcttgcagttatatcacgaagacttgttagctgggttgggtgatgtcgcactgttgcctctggaaggtccggacatgaccgggttcagattgtgtggggcacaggcttcatgccaggccgccgaagaattcctgagatcattactcggttcgatctcttgtcacgtcctttgccttgagcacccggggtcagctaggtttctgctcggtcccgaaggtcaacaccttctgcagggcctggaggcccaatttcagtgcgtgttcgggacagagaggctcgccacagccacactcgacactggactggaggaggttgaccccaccgaagctctgccagtcttgcccggtaatgcgcacacactgtggactccggatagcactgggggtgaccaggaggatgtgtcgcttgaagaggtaagggagctcctggcaaccctggaagggctggacctggacggggaggactggctccctcgggagcttgaggaggaggggccccaagagcagccagaggaagaggtaactccgggccacgaagaagaggagcctgtggcccccagcacggtggctcctcggtggctcgaggaggaggcagctctacagctggccctgcaccgctcccttgaaccccagggacaggttgccgaacaggaggaggcagccgccctgcgccaggcccttacacttagcctcctcgaacaaccacccttagaagctgaggagccacctgacggcggcaccgacggcaaagcacagctggtagtgcattctgccttcgaacaggacgtggaggagctcgaccgcgccctgcgcgcagccctcgaagtgcacgtacaggaggaaaccgtaggcccgtggcggagaaccttgccagctgaactgcgagctcggctcgagaggtgtcacggcgtcagcgtggccctgcgaggcgactgcacgatccttcgcggctttggagcccatccagcccgggcagcacggcacttggtggcccttttggcaggtccatgggatcagagcctcgcgtttcctctagccgcatcaggaccaacgctagcgggtcagaccctcaaaggcccttggaacaatctcgagaggcttgccgagaacacaggtgaatttcaggaagtggtgcgtgccttctacgacactctggacgctgcaaggagctccatacgggtggtccgcgttgagagagtgagccatcctcttctccagcagcagtatgaactttatagagaacggcttcttcaaagatgcgagcggcggccagtggagcaggtgctctatcatgggactaccgctcccgctgttcctgatatatgcgcacacggctttaaccgatccttttgcgggcggaatgcgaccgtctacggaaagggagtgtactttgcaagacgcgcatcgctgtccgtccaagaccggtactccccccccaatgccgatgggcataaagccgtgttcgtagccagggtactcaccggagattacgggcagggtcggaggggcttgagagcacctccccttcgcggtcctggccatgtgttgctgcgatacgacagtgccgttgactgcatctgccaaccttccatttttgtcatttttcatgacacacaggccctacccacccacctgataacttgtgaacatgtaccacgcgcgtctcctgatgacccatccggcctgcccggacggtccccagacacgtag

SEQ ID NO: 26730 - DNA, 1083 bp, synthetic construct
  source 1..1083: mol_type = other DNA; note = Synthetic coding sequence
atgcaggtgtacgagggcctggacatcatcaccaacaaggtgagcgcacaggaacaaaggatctgcagacaccacatgattagtttcgtggaccctttggtgactaactacaccgtggtggacttcagaaaccgggccactgccctgatttacctgcccgagacaaaattcctgttattatgggaagagcccattataaccctgaatttatgttctggcaagttcttatccatcccccgctccctgcaggtgttcgaggaaaccggtatcagccattccgagttcctgcaccgtcaacataccgaggagggcggggggcccctcggcgggcccttaaagttcagtaacccatgtatcctctggctccacgccgaccaggcagttctcgatgagcggttggataagagagtggacgatatgctcgcagctgggctgttagaagagcttagagatttccatagaaggtataaccagaaaaatgtctctgaaaacagccaggattaccagcatggcattttccaatctattggttttaaagagttccatgagtacctgattaccgaggggaaatgcaccctcgagaccagcaatcaactgctcaagaaagggatcgaggccctgaagcaagttacaaaacgctatgcccggaagcaaaaccggtgggtcaagaaccgatttctgtctaggcctgggccgatagtgcctccagtctacggcctggaagtttccgacgttagcaaatgggaggagtctgtgctggagcctgctctggagatcgtgcagtcctttatccagggccacaagccgaccgctacacctatcaagatgccatataacgaagccgagaataaaagaagctatcacctttgtgacctgtgtgacaggattatcattggggatagagagtgggccgcccatatcaaatcaaaatcccaccttaaccagctgaagaaacgtagaaggttagattcagacgcagtcaacactattgagagccaatctgtgagtccagatcataacaaggagccgaaggaaaagggtagccctggccagaatgaccaggagcttaagtgttccgtgtag

SEQ ID NO: 26731 - DNA, 828 bp, synthetic construct
  source 1..828: mol_type = other DNA; note = Synthetic coding sequence
atgagcgccgaggtgaaggtgaccggccagaaccaggagcagttcctgcttctggctaaatcagctaaaggggctgccctagccactttgatccatcaggtgctggaggctcctggtgtctacgtcttcggcgaactgctggacatgccgaacgtgcgtgagctggctgagagcgattttgccagtactttcaggctgcttaccgtgttcgcctatggaacctacgcagattacctggcagaggccaggaatttgccccccctgactgaggcccaaaagaataaattgcgccacctgtcagttgtcaccctagcagctaaagtaaaatgcatcccgtacgccgtgctgctggaagctctcgccttaaggaatgtacgccagcttgaagatcttgtcattgaggccgtgtacgccgacgtactgagaggaagcctggaccagaggaaccaacggctggaagtagactacagcatagggcgagacattcagcggcaggatctctctgcgatagctcggaccctccaagaatggtgtgtgggttgtgaggtagttctgtcaggtattgaggagcaggtttcccgcgctaaccagcacaaagaacagcaactggggcttaagcagcaaatcgaaagcgaggttgccaacctgaagaaaaccattaaggttactaccgctgctgcagccgctgccacatctcaggatcctgaacaacatctgacagaacttagggaacccgccccggggacaaaccagcgacagccttccaagaaggccagtaagggaaaaggactgagaggcagcgctaaaatttggtccaagtcgaactag

SEQ ID NO: 26732 - DNA, 1692 bp, synthetic construct
  source 1..1692: mol_type = other DNA; note = Synthetic coding sequence
atggagaccgccaagcagaaggccctggaggtggccaaccggctgtaccaaaaagatttgcgcgccccggacgtcgttatcggcgcagacactatcgtcaccgtcgggggactaatactggagaagccagtggacaagcaggatgcttacagaatgctatcccggctctccggaagggaacattccgtgttcaccggtgtggctatagttcactgttccagcaaggaccaccagctcgataccagagtcagtgagttttacgaggaaaccaaagtcaagttctccgagttatctgaggagctgctctgggaatacgtgcacagtggcgaacccatggataaagcgggtggatacggtatacaggcactgggaggaatgttggtggaatcagtgcacggagactttcttaacgtagtaggtttccccctgaaccacttttgcaagcagctcgtcaagctgtattatcctcctcgccctgaagatctgcggaggagtgttaaacatgattccatccctgccgctgacactttcgaagatctgagcgacgtggagggcggaggctccgaacccacacagcgggacgcaggatcgcgggacgagaaggctgaagcaggggaagctggacaagcaacggccgaggcggagtgccatcgcactcgtgagacacttccaccttttccaacccgactgctggagctgatcgagggtttcatgcttagcaaaggtcttttaacagcttgtaagctgaaagtctttgacttactgaaggacgaggccccacagaaggctgccgatatagcctctaaggtggatgcatccgcctgtggaatggaaaggctgcttgatatctgtgctgccatggggttgttggaaaaaaccgagcaaggatactcgaacacagaaacagctaatgtatacctcgccagtgatggtgaatacagtctacacgggttcatcatgcacaacaacgacctcacttggaacttattcacctacctggagtttgccattagggagggcaccaatcagcaccacagagccctggggaaaaaggccgaggacctgtttcaggatgcatactaccagtctcctgaaaccagactcagattcatgagagccatgcacgggatgactaaactgacggcctgtcaagttgccaccgcattcaacctttcccgattcagctctgcatgcgacgtcggtggatgtaccggcgccctagcaagggagctggctagggaataccccaggatgcaggtaaccgtgttcgatctccctgacattatagaactcgccgcccattttcaaccaccaggcccccaggccgtccagattcactttgctgcaggcgattttttcagggatcctcttccctctgcggaactgtacgtcctgtgccgaattctacatgactggccagacgacaaggtgcataaactcctttcaagggtcgctgaaagctgtaagcccggtgctggtcttctgttggtggagaccttgttggacgaggaaaaacgcgttgcacaaagagccctgatgcagagtttaaatatgcttgtccaaaccgaggggaaagagcggagtctgggtgaataccagtgcctccttgagttgcatggtttccatcaggtgcaggtggtacacttaggaggcgtgctggatgccatactggcaactaaggtggcaccctag

SEQ ID NO: 26733 - DNA, 828 bp, synthetic construct
  source 1..828: mol_type = other DNA; note = Synthetic coding sequence
atgagcgccgaggtgaaggtgaccggccagaaccaggagcagttcctcctgctggccaagagtgcaaagggagccgcgctggctactctgattcatcaagtcctcgaggctcctggagtctacgtgttcggtgagctgctggacatgcccaatgttcgcgaattggcagagtccgatttcgcttccacttttcgcttgttgacagttttcgcttatggcacatacgcagattatcttgcggaggctcgcaatttgcctccccttaccgaagctcaaaagaacaagttgagacacctttctgttgttacattggcagccaaggtgaaatgtatcccctatgcagttctccttgaggccctggctctcaggaatgtccgtcagttagaagatctggttatcgaggccgtctatgccgacgtcttgcgcggatccctggatcaacgtaatcagcggctcgaagtagattattccatcggtcgtgacattcagcggcaggacctttctgcaatcgccaggaccttacaagaatggtgcgtgggttgtgaggttgttttgagtggcatcgaagagcaagtatccagggccaaccagcacaaagagcagcagctcggactgaagcagcaaatcgaatctgaggtcgcaaatttgaaaaaaacaatcaaagtaactacggctgctgcagctgcggcaacatctcaggatcccgaacaacatttaacagagttgcgggaacctgctcctggcacaaatcagcggcagccgtcgaagaaggcctctaagggcaaagggctgcgggggtcagcgaagatctggagcaaaagtaattag

SEQ ID NO: 26734 - DNA, 999 bp, synthetic construct
  source 1..999: mol_type = other DNA; note = Synthetic coding sequence
atggagtacctgggcggcggcagcgccctggacctgctgaagcccggaccactggaggaaacgtatattgcaaccattctgagggaaattctgaaaggcctggattacctccattcggagcggaagatccatcgcgatataaaagcggctaacgttctgcttagcgaacaaggggacgtgaagctcgccgactttggggtggctggtcaattgactgacacacagatcaagcggaacacatttgtaggtactcccttttggatggccccagaagtgatcaaacagagcgcatatgatttcaaggcggacatctggagcttaggaatcacggccattgagctcgcaaagggagagcctccaaattcagacctgcacccgatgagagttctgtttctgatccctaagaactctcctccaacactggaggggcaacatagcaaacctttcaaagaattcgtggaggcttgcctcaataaggatcctcgcttccggcctacagccaaggagctgctcaaacataaattcatcactcggtacacaaagaaaacaagctttctgactgaattaatagatcgctataagagatggaagtccgaaggccatggggaggaatcaagttctgaagacagcgatatcgatggtgaggccgaagacggcgaacaaggacccatctggacctttcctcctaccattcgccccagtccccatagcaagttacataaggggacagcattgcactcaagccagaaaccagccgagcccgtgaagagacagcctaggtcgcagtgtctaagcacactcgtgagacctgtatttggcgagctcaaagaaaaacataaacaaagcggcggcagcgtcggagcactggaagaactagagaatgcatttagtttagctgaagagagctgccccggcatctctgacaagctgatggttcacctggttgagcgagtgcagcggttctctcataacaggaaccatctcacctccacgagatag

SEQ ID NO: 26735 - DNA, 279 bp, synthetic construct
  source 1..279: mol_type = other DNA; note = Synthetic coding sequence
atgaacttcacccccacccacacccccgtgtgccggaagcggaccgtggtaagtaaacgcggggtcgcggtgagcgggcccacaaagagaagaggcatggccgatagcctggagagtacgccgctaccttccccggaggatcgcctcgctaaactgcacccttccaaagaactgcttgaatactaccaaaaaaagatggctgaatgcgaagcagagaacgaggacttgctgaagaaactcgagctgtataaggaagcatgcgaaggtcagcataagtag

SEQ ID NO: 26736 - DNA, 429 bp, synthetic construct
  source 1..429: mol_type = other DNA; note = Synthetic coding sequence
atggcccagaaggagaacagctacccctggccctacggccggcagaccgcgccgtccggattgagcaccctccctcagcgtgtgctcaggaaagagcccgtgacacccagcgcattggtattaatgagccgctctaacgtgcagcctactgctgctcccgggcagaaagtgatggagaattcgagtggcaccccggacattttgactcggaggcacttcacaatcgacgatttcgagatagggcggcctctgggcaagggaaaattcggaaatgtttatctagcacgggagaagaaatcccacttcatagtcgccctgaaggtgctcttcaaatcgcagatagaaaaggagggcgtggaacaccagctgcgccgggaaattgaaattcaggcccatttacaatcttggagaagttggcagatgctgtag

SEQ ID NO: 26737 - DNA, 501 bp, synthetic construct
  source 1..501: mol_type = other DNA; note = Synthetic coding sequence
atggaccaggaggacagcgagagcaagaccgtgagcgagcacggcgagcgggattggatgacagccaagaagttttggaaaccgggcgattctctggcccccccagaggtagactttgatagactgctggctagtctccaggaccttagtgagcttgtggtcgagggcgatacccaggttacacccgtgcctgggggcgcgcggctacggacccttgaacccattcccctgaagctgtaccgaaatggcatcatgatgttcgatgggccgttccagcctttttatgacccaagcacacagaggtgtctgcgggatatcctggacggcttcttcccaagcgagctgcaacggctatatcccaacggcgttccgttcaaagtgatcagctgctccagcaaccacacgttcggcgacttcgaaggatccggcgatactcaaccaccacaaacaccacccattctaagggggtctaggtgcacgccttgggggacccccgtgtag

SEQ ID NO: 26738 - DNA, 1473 bp, synthetic construct
  source 1..1473: mol_type = other DNA; note = Synthetic coding sequence
atgcagagcctggacgacgccaccaagcagctggacttcacccggaagaccttggccgaaaagaaacaggaacttgataaactgaggaacgaatgggcaagccacacggctgcactgaccaataagcatagccaggaactaaccaacgagaaggaaaaggcgctgcaggcacaggtccaataccagcagcagcatgagcagcagaagaaggacctggagattctgcaccagcagaacatccatcagttgcagaacaggctgtcggaacttgaggccgctaataaggatctgacagagagaaagtataaaggcgatagcacaattagagaattaaaagctaagttgagcggcgtggaggaggaactgcagcgcacaaagcaagaagtgctatctctgagaagggaaaattccaccctggatgttgaatgccatgaaaaggagaaacatgttaatcagctacaaaccaaggtagcagtgctggaacaggaaataaaagataaggaccagctcgtcttacggacaaaagaagcatttgacacaattcaggagcagaaggtggtattagaagaaaacggcgaaaagaatcaagtccagctcgggaaactggaggctaccattaaatctctctccgccgaattgctgaaggccaacgaaattatcaaaaaactgcaaggcgacttgaaaactctgatgggtaaacttaagctaaagaacactgtgaccatccagcaggagaagctcctggctgaaaaggaagagaagctacagaaagaacaaaaagaactacaggacgtcggacagagcttgcggatcaaggaacaggaagtctgcaagcttcaggaacagctcgaagcaaccgttaagaagctggaggagagcaagcaactgcttaagaataatgaaaagctcattacttggctcaacaaagagctaaacgagaatcaactcgtgaggaagcaggacgtcttgggaccctcaacaacgcccccggcgcactcctcgagcaacacaatccgcagcggcatttccccaaatttgaacgtagtggacggccgactgacctatcctacttgcggaattggctaccctgtttcttctgctttcgcattccagaacaccttcccccactccattagcgcaaagaatacaagccatcccggaagcggcactaaggtgcagtttaacttgcaattcaccaaaccaaacgccagtctgggagatgtgcagagcggtgctaccattagtatgccttgctccaccgataaggagaacggggagaatgtgggtctcgagtctaagtacctcaaaaagcgcgaagacagcatccccttaagaggcctttcacagaatctgttctccaactccgatcatcagcgggacggaactctgggagctctgcacacatccagcaagcccactgcattaccttctgcatccagcgcatactttccaggccaactgcccaacagctag

SEQ ID NO: 26739 - DNA, 3015 bp, synthetic construct
  source 1..3015: mol_type = other DNA; note = Synthetic coding sequence
atgctgcggaccgccggccgggacggcctgtgccggctgagcacctacctggaggaactcgaggccgtggagctgaaaaagtttaagctctatttggggaccgccaccgagctgggcgaaggcaaaatcccctggggctctatggagaaggctggacctctcgagatggcccagcttctgatcacacacttcggcccagaagaggcttggcgactggccctgtctacatttgaacgcattaataggaaagatctgtgggagcgcgggcagcgtgaggatctggtccgcgataccccccccgggggcccctcttcccttggaaaccagtctacctgtctgttagaagttagcctcgtcactcccagaaaggacccacaagagacttaccgagattacgtgcgcagaaaatttcgattaatggaggatcggaacgccagattgggcgagtgcgttaacctgagccacagatacacaaggctgctgctcgtgaaggagcattccaaccccatgcaagtgcagcagcaactgctggacacagggagggggcacgcacgaacggttgggcaccaggcatccccaattaagatcgaaaccctgtttgagcccgacgaggagcggcctgaaccccctcgtaccgttgtcatgcagggcgctgcgggcatcgggaagtcaatgctcgctcataaagtgatgctcgactgggcggacggcaagctttttcagggaagattcgactatctgttttacatcaactgtagagagatgaaccaaagcgccacggagtgctctatgcaagatctaatcttctcttgctggccagaaccctcagctccactccaggaactgattcgggtgccagagcggctactgttcataatcgacggtttcgatgagctaaagccctccttccatgatccccagggaccttggtgcctttgctgggaggaaaagagacccaccgaacttttattgaatagcctcattcgaaagaaattattaccagagctgtccttgttaatcaccacaaggcctaccgccctggagaagctgcataggctgcttgagcatccccgccatgtcgagattctggggttcagcgaagcagagcgaaaagaatatttctataagtacttccacaatgctgaacaggccgggcaagtgttcaactacgtcagggataatgagcccctgtttaccatgtgtttcgtcccattggtgtgctgggttgtctgtacgtgtctgcagcagcagctggaggggggtggactactgagacagacatccagaaccacaacagctgtatacatgctctatctcctgagcctcatgcaacctaagcccggtgcccctcgtttgcagcccccacctaaccagcgagggttgtgttccttggcggccgatggcctctggaaccagaagatcctttttgaggagcaggatctacgcaagcacgggttagacggggaggacgtctcggcattcttgaatatgaatatctttcagaaagacatcaattgcgaaagatattactccttcattcacctgagtttccaggagttctttgctgcaatgtattacatcctcgacgagggcgaagggggggcggggccggatcaggatgtgacacgcctcttaacggaatatgcatttagcgagcgctctttccttgccttgacttcacgttttctctttggactcctgaatgaagaaactagatcacacctggagaaaagcctgtgttggaaagtaagccctcatatcaagatggatctgttgcagtggattcagtcaaaagcccagtcagatggctccaccctgcagcaaggttccctggagttcttctcctgcctctatgaaattcaggaggaggagttcatccagcaagccttgtctcactttcaggtgatcgtggtttccaacatcgcgagtaaaatggagcatatggttagcagcttttgtctgaaacggtgtcgaagtgctcaggtcctgcatctctacggagctacctacagcgcagatggcgaagatcgggctaggtgcagtgctggagcccataccctcctggtccagctgcccgaacggactgtcctgcttgacgcatatagcgaacacctggccgccgcactttgcactaacccaaatctgattgagttaagcctgtaccgcaacgctctggggagccgcggggtgaaattactctgccagggcttgaggcatcctaactgcaagctacagaacttacgccttaaaagatgtcggatatccagcagtgcatgtgaagacctcagtgctgctctgatcgctaataagaatctgacccgcatggacctcagtggtaacggggtaggattccctggtatgatgctactgtgtgagggtctcagacacccccagtgcagactgcagatgatccagctgcggaaatgtcagttggagagtggcgcatgccaggagatggcttctgtactcggcaccaacccccacctcgtggagttggacttgactggaaatgcattagaagaccttggccttcggcttctgtgtcagggtctgagacacccggtgtgtaggctgagaacactgtggctcaaaatctgtcgtctaactgccgcggcgtgcgacgagctggcgagtaccttgagtgtgaaccagagtcttagggagcttgacctgagtctgaacgaattaggggatctaggggtgctattattgtgtgaggggcttagacacccaacttgtaagctacagacgctaaggctcggaatttgcagactcggatcagccgcgtgtgagggactgagcgtggtcttgcaggctaatcataatctgcgagaactggatctctccttcaatgacctaggtgattggggtctgtggctgctggccgaaggtctacagcatccagcctgcaggctccaaaaactctggctgtttggaatggaccttaataagatgactcattccagattagcggctctcagggtcacaaaaccctatctggacattgggtgttag

SEQ ID NO: 26740 - DNA, 2517 bp, synthetic construct
  source 1..2517: mol_type = other DNA; note = Synthetic coding sequence
atgaccggcgccgagatcgagcccagcgcccaggccaagcccgagaagaaagctggcgaagaagtgatcgctggcccagaacgagaaaacgacgtgccgctagtggttcggcctaaagtccgcactcaagccactaccggcgcccgccctaagactgaaacaaagtctgtgcctgctgctagacccaagactgaagcacaggcgatgtccggagcccgtccgaaaactgaagtccaggtgatgggcggcgcccgcccgaagaccgaggctcaggggattactggagccaggccaaagaccgatgcacgagctgtgggcggcgctcgatcaaaaacggacgccaaggccatccctggcgcgagaccaaaagacgaagcgcaggcctgggcccaaagcgagttcggcacagaggccgtctctcaggctgagggagtttcacagacaaacgccgtggcttggccattggccaccgctgagagcgggagcgtgactaagtccaagggcctgtcgatggatagggaactcgtcaacgtagacgcagaaactttcccaggtacacaggggcagaaaggaattcagccttggtttggcccaggggaagagacaaatatgggctcgtggtgttactccagacccagagctcgggaggaggcgtccaatgagtccgggttctggtccgcggatgagactagcactgcatcatcgttctggacgggagaggagacttccgtgagatcttggcctcgtgaggaatccaacacccgatctagacacagggcaaagcaccagaccaatcccaggagtcgcccacgttccaaacaggaggcatatgtcgattcatggtccgggagcgaggatgaagccagcaatcccttcagcttttgggtgggcgagaacacgaataatttgttccggcccagggtacgagaggaggctaacataagatcaaagctgcgcaccaacagggaagattgctttgagtcagagagcgaggatgaattttataaacagtcctgggtgctacccggtgaggaagccaactctcgttttagacaccgggataaggaagatcccaacactgccctgaagctcagggctcagaaagatgttgattcggacagggtgaaacaagagcccaggtttgaagaagaggttattatcgggtcatggttttgggccgagaaagaagctagccttgagggaggagcaagtgcgatctgcgagagcgaacccgggacggaggaaggggctatcggagggtctgcatactgggccgaagagaaatctagcctgggggctgtagcccgggaggaggcaaagccagagagcgaggaagaggccatcttcgggagctggttttgggatcgcgacgaggcctgtttcgatcttaacccttgtcccgtctacaaagtcagcgatcggttcagggacgccgcagaggagctcaatgccagttctagaccccagacctgggacgaggtcactgtggaattcaagccgggactgttccatggagtgggctttaggtccaccagcccctttggtataccagaagaagcgagcgagatgcttgaagccaaaccaaagaatcttgaactcagtccagaaggagaggaacaagagagcttgctacagcctgatcagccaagtcccgaattcactttccagtacgatccctcttacaggtcagtgcgggagatccgggagcacctccgcgctcgcgaatcagctgagtctgagtcatggtcatgtagctgcatccagtgtgagcttaagataggatccgaagaattcgaagaatttctgctgctgatggacaaaatcagagacccatttatccatgagatcagtaaaatcgctatgggtatgcgcagtgcaagccagtttacacgcgactttatacgggactcaggcgtcgtatctctgatcgagacactcttaaactatccctcttctcgcgtgaggacttcctttctagaaaatatgatacatatggctcctccttatcctaacttaaacatgatagaaactttcatatgtcaagtatgcgaggaaactctggcacacagtgtagactctctggagcagctcaccgggatccgcatgttgcggcacctgaccatgaccattgactatcacaccctgattgccaattacatgtcagggttcctgagtcttcttacaaccgctaacgcaagaactaagttccatgtgctgaagatgctgcttaacctcagcgaaaaccctgctgtagcaaagaaactgttttccgcgaaagccctgagcatatttgtgggcctttttaatatcgaagaaaccaatgataacattcaaattgtgattaaaatgtttcagaatatcagcaacattatcaaatcgggcaaaatgtcactaatcgatgatgacttctcgctggaaccacttatttctgctttccgggaattcgaagagctagcaaaacaactgcaggcccagattgacaatcaaaacgacccagaagtagggcagcagtcctag

SEQ ID NO: 26741 - DNA, 165 bp, synthetic construct
  source 1..165: mol_type = other DNA; note = Synthetic coding sequence
atgggcaacagcgacagccagtacaccctgcagggcagcaagaaccattccaataccataacgggagccaagcagattccttgtagcctaaagatacgcggtatccacgctaaggaagagaagtcattacacggatgggggcacggttctaacggcgctggttag

SEQ ID NO: 26742 - DNA, 1269 bp, synthetic construct
  source 1..1269: mol_type = other DNA; note = Synthetic coding sequence
atggccagcctgagccgggccctgcgggtggccgccgcccacccccgtcagtccccaaccagaggaatggggccctgcaatttatctagcgccgcaggaccaaccgctgagaagagtgttccgtaccaacgtactctgaaggaggggcagggtacatcagtcgtcgcccagggcccatcaaggcccttgccctcaactgcaaatgtcgtagtaatcggcgggggctccctgggctgccagactctgtatcacctggccaaactgggaatgagcggcgctgttttactggagcgagaacggctcacatccgggaccacttggcatacagctgggctactttggcaactgaggccctcggatgttgaagtcgaactgctggcccacaccaggagagtggtctctcgggaactggaagaagagaccggactccacacgggatggatccagaatggaggcctgtttatagcaagcaaccgccagaggctggacgagtataaacgtctcatgtcactgggcaaagcatacggcgtggagagccatgtgctctcccccgccgagacaaagaccctgtaccccctcatgaatgttgatgacctgtacggcacactgtacgtccctcacgacggaacaatggatcctgccggcacttgtactactttagcgcgggcagcctcggccaggggagcccaagtgatagagaactgccccgttacaggcatcagagtgtggaccgacgacttcggggtgcggagagtggcaggcgtggagacacagcatggatcaatccaaactccttgtgttgttaattgcgcgggtgtgtgggccagtgccgtaggacgaatggcaggggtgaaggtccctttggtcgccatgcaccacgcatacgttgtgacggagcggatagagggcattcagaacatgcccaacgttagagatcatgatgcctctgtttatttgcgccttcagggggacgctctgtccgtgggagggtatgaggccaatcccattttctgggaagaggtctctgacaaatttgctttcggactcttcgacctcgactgggaggtctttacacagcacatagagggcgctattaatcgagtgccagtgctcgaaaagacaggcattaagtcaacagtgtgcggacctgagtcatttactcccgaccataaacccctgatgggggaggctcccgagttgcggggattcttcctaggctgtggattcaatagcgctggggagagtggtcaggcgctcctcgctccgtag

SEQ ID NO: 26743 - DNA, 327 bp, synthetic construct
  source 1..327: mol_type = other DNA; note = Synthetic coding sequence
atgagcatgctgaagcccagcggcctgaaggcccccaccaagatcctgaagccgggtagcaccgccctgaagacacctacagccgttgtcgcccccgtcgagaaaacaattagcagcgagaaagctagcagtactccatccagcgagacgcaggaagagttcgttgatgacttcagagtgggcgagcgcgtctgggtaaacggtaacaaacccggcttcatccaattcctgggagagactcaatttgcgcccggtcaatgggctggaatcgtgttagacgaaccaattggcaaaaacgatggctcggtggccggagtccggtattag

SEQ ID NO: 26744 - DNA, 2148 bp, synthetic construct
  source 1..2148: mol_type = other DNA; note = Synthetic coding sequence
atgaagcggggccggctgcccagcagcagcgaggacagcgacgacaacgggtctctgagtaccacatggtcccagaatagcaggtctcaacataggaggagcagctgctctaggcacgaagaccggaagccttcagaagtgtttcgtactgatctgataactgcaatgaagctgcatgactcctaccagctgaaccctgacgagtattacgtgctggccgacccgtggcgccaagagtgggaaaagggcgtgcaggttcctgtcagtccaggaaccatcccacaacccgttgcccgcgttgtcagtgaggagaaatccctgatgttcattcggcccaagaaatatattgtaagcagtggctctgagcctccagagcttggctatgttgatattcggacattagcagacagcgtgtgtcgctacgacctcaacgatatggatgcagcttggctggagctcaccaacgaggagtttaaggagatggggatgcccgagttggacgagtatacaatggagagggttctggaggagttcgaacagcgctgctacgacaatatgaaccatgctatcgagaccgaagagggtttgggtattgaatacgatgaggacgtggtgtgcgatgtttgccagtcacccgatggggaggatggcaatgaaatggtgttttgcgataaatgcaacatttgcgtgcaccaggcctgttacggcattttgaaggtgccagaaggttcctggttatgtcggacctgcgctctcggcgtgcagcctaagtgtctcctgtgccctaagaaggggggagctatgaaaccaacaagaagcggcacaaaatgggtccacgtttcttgcgcattgtggatacccgaggtctccatcggatccccagagaaaatggagcctatcactaaggtgtcccacatcccaagttctaggtgggcactggtttgttcactgtgcaacgaaaagttcggagcatctatccagtgctcggtgaagaactgcagaaccgccttccatgtcacctgcgccttcgacaggggactggagatgaagacaatcttggccgagaacgatgaggttaagtttaagtcgtattgcccaaagcattccagccacaggaagcccgaggagagcttgggcaagggagcggcacaggagaacggggcacccgaatgtagccctcgaaatccactcgaaccgttcgctagccttgaacagaatagagaagaggctcatcgagtatccgtgcggaagcagaaactgcagcagctggaggacgagttctacacttttgtgaacctattagatgtagcacgagctcttcgcctgcctgaggaggtggttgacttcctctaccagtactggaagctgaagcgaaaagttaacttcaataaaccgttgatcacgcccaaaaaagatgaagaggataacctcgcaaaaagagagcaagatgtcctgtttcggcggctccagctgtttacccacctgagacaggacctggagcgggtgcgcaaccttacctacatggtaactcgaagagagaaaattaagcgatcagtgtgtaaagtccaagaacagatattcaatctctacactaagctgctggaacaagagagggtgtctggggtgccttcctcgtgcagctcgtcctcactggagaatatgttgctgtttaactcccccagcgtgggccctgacgctcctaaaattgaagacttgaaatggcacagcgccttttttcggaagcaaatgggaacaagcctggtccactccttgaagaagccacacaagagagatcccttgcagaacagccccggctccgaaggtaaaactttgctgaagcagcctgacctttgtggacgccgcgagggaatggttgtgcctgaatcatttctcggcttggagaagaccttcgccgaggcacgtctgatatctgcacagcagaagaatggcgtggttatgcctgatcacggaaaacggagggataaccggttccattgtgatctgataaagggagacttgaaggacaaatctttcaagcagtctcacaaaccactgcgctccaccgacgtttctcagaggcatctggataacactagggccgctgcaatttggcgttttcgagttatctggcagggtcccgctgcctag

SEQ ID NO: 26745 - DNA, 162 bp, synthetic construct
  source 1..162: mol_type = other DNA; note = Synthetic coding sequence
atgggccggcggagcaccagcagcaccaagagcggcaagttcatgaaccctaccgaccaggctcgtaaagaggccagaaagagagagctgaaaaagaataagaagcagagaatgatggtacgcgcagccgtgttgaaaatgaaggaccccaagcagatttag

SEQ ID NO: 26746 - DNA, 1035 bp, synthetic construct
  source 1..1035: mol_type = other DNA; note = Synthetic coding sequence
atgaccacccggagcgtgctggacgtggagaccttcgtggccgacattctcaaaggtgagaatctaagcaaaaaggcaaaagaaaagcgcgagtcactgattaagaaaattaaggacgtcaaatctatttatctgcaggagttccaggacaagggggatgcggaggacggtgaagaatacgatgaccccttcgctggccccccagataccatatccctagcgagcgaaagatacgacaaggacgacgaagctccgagtgatggggcacagttcccgcctatcgcggctcaggatctgccttttgtcctcaaggcaggataccttgagaagaggcgaaaggaccattcattccttggcttcgaatggcagaaaaggtggtgcgctctttcaaaaactgtgttttactactatggaagcgataaggataagcagcaaaaaggcgagtttgccattgacggctactccgtgcgcatgaacaacaccctgagaaaggatggcaaaaaggattgctgcttcgagatctccgcacccgataagagaatataccaatttacagcagcgagtcccaaagacgctgaagaatgggtgcagcagctgaaattcgttttacaggatatggaaagtgatatcatacctgaagactatgatgaaagaggtgaattgtatgatgacgttgaccatccacttcctatttcaaatcccctcacaagctctcaaccgatagacgacgaaatctatgaggagctcccggaagaggaggaggacagcgcacctgtaaaagttgaagaacagcggaaaatgagccaggatagcgtgcaccatacatcgggcgacaaaagcactgactacgccaatttctatcaggggctatgggactgtacgggggcgttttcagacgagctgagcttcaagagaggggatgtcatatacatcctctccaaagagtataaccgttacggatggtgggttggagagatgaaaggagctattgggctcgtgcctaaggcatatattatggaaatgtacgatatctag

SEQ ID NO: 26747 - DNA, 2868 bp, synthetic construct
  source 1..2868: mol_type = other DNA; note = Synthetic coding sequence
atggaggtgggcagcgaggaggagaagtgggagaagctggacgccgaatttgatcactttgttgtagatatgaaaccatttgtcctcaaactgccccatcggactgaacgacagcgatgcgcgctgtggattcggaagctctgtgagccctcaggaaccggtgcaggcatcatgggcagaaaaaatcggaatctctatgcaaagctccttttgcatatgctcaagagaggcgcacttgaaggaccctttactcatagaccagagcccggcacattgaagatccttccatcttatatgtctatctacttcgacgagccgaacccggcaagggcaaagggctcctctcccgagggtttacctgcctgggtcctcggcgagttagagacctctgaacataaattaaatgagagctggaagctcagctctggcgaggataacacgctggtacagtcgcccactgacgtgtactcaagggaacagtataccggcaaattgcgcgtaagatcacactcattgtcgcctacccacagagaagatgggcagaacatcacacctaagatatgcgaggtgtactcgaagaagagtccggtgtctctcgatgacagtgatatcgaggcgagactcaactcttggaatctcgggatcgaaaatccacgatacttacgccagaagcccatcccggtgtccctcatgacccccaagtttagtctgcgaaaaagcagttcattccatgatgatcattttcttagtaggatcagagaaaaagagttggacatgaaaacaaagatgatggaggcaaagtttcacgaggaaaaacttaagcttcagcagaaacatgacgccgacgtgcagaagatcctcgagaggaaaaacaatgaaatcgaagagcttaagactctctaccgctccaaacagcacgagaccgaagagacgattagaaagctcgaaaagaaagtgcagactctcatccgcgactgtcaggtgattcgcgaaaccaaggaggaccagatcgctgagctcaaaaaaatttgcgagcagagtaccgagagccttaacaacgactgggaaaaaaagctgcacaatgctgtagccgagatggaacaggagaagtttgaccttcagaaacagcacacagaaaatattcaggagctactggaagacacaaatgtccgattaaacaagatggagtcagagtatatggcccagacccagtccacaaaccacatgattaaggagctagaggccagagtgcagcagcttactggagaagccgagaactccaatctacagcgtcagaagctgatccaggaaaaggccgagctggagagatgctaccagattacctgtagcgagctgcaggaggtaaaagctcgcaggaacactctgcataaggaaaaagaccaccttgttaacgactacgagcagaatatgaaactgctccagacaaagtacgacgccgatataaatttactaaagcaggaacacgccctgtcagcctccaaagcttcttctatgattgaggagctggaacagaacgtttgccagctcaaacagcagcttcaggaatcagagttgcaacgaaagcaacagctgcgagaccaggagaataagttccagatggaaaaatcccacttgaaacacatctatgaaaaaaaggcccacgacctccagtccgagctagataagggcaaagaggacacgcagaagaaaatacacaagttcgaagaggccctgaaagaaaaagaggagcagctgacccgggtcaccgaagtgcagcgactgcaagcccaacaggccgacgccgcgctcgaagagtttaagcggcaggttgaactcaattccgaaaaggtctacgctgagatgaaagaacagatggaaaaggtcgaagccgatctgacaagaagtaaatcactgcgtgaaaagcagagcaaggaatttttgtggcagctcgaggacattcggcagcggtacgaacaacagatagttgagctgaaacttgagcacgaacaagagaagactcacctgcttcaacagcacaacgccgaaaaagactctttggtgagagaccacgagcgcgagatcgaaaatcttgagaaacagctgagagccgctaacatggaacatgagaaccaaatccaggagttcaagaagagagacgcgcaggttatagctgacatggaagctcaagtacacaagctaagggaagaacttatcaatgtgaattcacagcgaaagcaacagttagtcgagctgggtctcctccgcgaggaggaaaagcagagggccactcgcgaacacgagattgtggtaaacaaattgaaagccgagtctgaaaagatgaaaatcgagctgaagaagacacacgctgcagaaacggaaatgacgctggagaaggcaaatagcaagctgaagcagatcgaaaaagaatatactcaaaagctcgccaaatcctctcaaatcatagccgaactccagactaccatttcttcgcttaaggaagagaactctcagcagcaattggccgccgagaggcgcctgcaggatgtgagacagaagttcgaagacgaaaagaagcagcttataagggataatgaccaggcgataaaagtgctccaagatgaactggaaaacaggtccaaccaagtgcgatgtgccgagaaaaaactacagcacaaggagcttgagtcacaggagcaaatcacatacatccgtcaagaatacgaaactaaactcaagggactaatgccagcctcgctcagacaggaactggaggatactatctcttcactgaagtcccaggttaattttctccagaagagggccagcatcctgcaggaagaactaacaacataccaggggcggcggtag

SEQ ID NO: 26748 - DNA, 834 bp, synthetic construct
  source 1..834: mol_type = other DNA; note = Synthetic coding sequence
atgctgagccagaaggaggtggccgtggccgacgccaagaagagccttgaactgaaccccaacaattccaccgcaatgctgaggaaaggaatctgtgaataccacgagaagaattatgcagcagccttggagacattcacggaggggcagaagctggactctgctgacgccaatttcagcgtgtggataaagcgctgtcaagaagcccaaaacggtagcgaatcagaggtgtggacccaccagtcgaagatcaagtatgactggtatcaaactgagtcccaggtggtgatcactctgatgatcaagaatgttcagaagaacgatgtcaacgtagaattctcggagaaagagctgagcgccctggtgaagttgccttcgggagaggattataatctgaagctcgagctgctccatccaattatccctgagcagagtacgtttaaggtcctctccaccaagattgagattaaactcaagaagcccgaagctgtgcgctgggagaaactagaaggtcaaggagatgtccctactccaaaacagttcgtcgctgatgtgaagaatctgtatcccagctcaagtccatatacccgaaactgggacaagctagtgggtgaaattaaagaagaagaaaagaacgagaaactggagggcgacgctgccctgaatcgcttatttcagcagatatacagcgatgggagtgacgaggtgaagagggctatgaacaaaagcttcatggaaagcggcggaacggtgctatccaccaattggtccgacgtggggaaaagaaaggtggaaattaacccgccagatgacatggaatggaagaaatactag

SEQ ID NO: 26749 - DNA, 807 bp, synthetic construct
  source 1..807: mol_type = other DNA; note = Synthetic coding sequence
atgggcagcgccaagagcgtgcccgtgacccccgcccggccccccccacacaacaagcacctggcaagagtagccgaccctaggtccccctcggcggggattctgcggacacctattcaggtcgagtcctctccccagccaggcctaccagccggcgagcagctcgagggcctgaagcacgcgcaagacagtgacccccgtagtccaaccctaggaatcgctcggacccctatgaagacctccagcggtgatcccccgtccccgttagtgaagcagttatctgaagtttttgaaactgaggactccaagagcaaccttccccctgaaccggttctgcctccggaggccccattgtctagcgagctcgacctgccactcggcactcaactgagcgtggaagaacagatgccaccatggaaccaaaccgaattcccttccaagcaggtgttcagcaaagaggaggcaaggcaaccaacggaaaccccagtggcctcgcagagcagcgacaagcccagcagagaccctgaaacacctaggagttccggctcaatgaggaatcgatggaaaccgaactcttctaaagtattgggaagaagcccattgacaatccttcaggatgataactcacctgggaccctgactctacgacagggtaagagaccatctcctttatctgagaacgtttccgagcttaaagagggagctatcctaggcacaggtcggctgctgaaaacaggtggccgggcatgggagcagggacaggaccatgataaggaaaatcagcacttcccccttgtggagtcatag

SEQ ID NO: 26750 - DNA, 1140 bp, synthetic construct
  source 1..1140: mol_type = other DNA; note = Synthetic coding sequence
atggtgttcaagctgaagaccaaggaggagcagcacagcatgctggggtctggcttcaaagccgagcggctacgcgtgaaccttcggcttgtgattaatagattgaaattgttggaaaaaaagaaaactgagctcgctcaaaaagccagaaaagagattgctgattatctggctgccggcaaagatgaacgggcacggattcgcgtggaacatatcatcagagaggactatcttgttgaagctatggagatcctcgagctgtattgtgatctattgctcgctcgattcggcctcattcagtccatgaaggagttagactcaggtcttgccgagagtgtcagcacactgatttgggccgccccacgcctgcaatccgaagttgcagaactcaagatcgtagcagaccagttatgtgcaaagtatagcaaagagtacgggaaactgtgtcgcaccaaccagatcggcacagtgaacgatcgcctcatgcataagctgagcgttgaagccccaccaaagattctggtggaacggtaccttatcgaaatcgccaaaaactataacgtgccttacgagcccgacagtgtcgtcatggcagaagcccccccgggcgtcgaaaccgacttgatcgacgtcgggttcaccgatgatgtcaaaaagggaggacccggaagaggtggctccggcggcttcacggccccagttgggggccccgacggcacagtacccatgcctatgcccatgccgatgcccatgccaagcgctaacactccctttagctatcccctaccaaaaggccccagcgactttaacgggctgcccatgggcacctaccaggctttcccaaatattcacccaccacagattcctgccactcccccatcttatgaatctgtggatgatatcaatgctgataaaaacataagttccgcccaaattgtcggtcccgggccaaagcccgaggcctccgctaagttgccctccagacccgctgacaattacgacaacttcgttctgccggagctgccttccgtcccagacaccttgcctacagcttctgcaggcgctagcaccagcgcatccgaggacatcgattttgacgatcttagtagaagattcgaggagctgaaaaaaaaaacctag

SEQ ID NO: 26751 - DNA, 903 bp, synthetic construct
  source 1..903: mol_type = other DNA; note = Synthetic coding sequence
atggcccggcccctgagcacccccagcagcagccagatgcaggcccgcaagaagcacagagggatcattgaaaaaaggcgacgggatcgtattaattctagtctgtctgagctgagacggttagtcccaacagcttttgagaaacagggcagctccaagctcgagaaggcagaggtactgcagatgacggttgaccatctgaaaatgctgcatgccacaggcggtaccggtttcttcgatgcccgagcacttgcagtcgatttccggtccatcggtttcagagagtgtttaactgaggtgattcgctatctgggggtccttgagggcccttctagcagagccgaccccgtccgcataagactgttaagccacctaaattcctatgccgcagagatggaaccttccccgacaccaaccgggcccttggcctttccggcttggccgtggagctttttccactcatgccctggactgcctgcgctgtcgaatcagttagctatcctggggagggttccttcgcccgttctccctggcgtcagctctcctgcctaccccatccccgcactcaggacggcccccctgaggcgcgctaccggcatcattctccccgcccgccgcaacgtgttgccgtcacgtggagccagtagtacccggagagcaaggcctctggagagaccggccacacccgtcccagttgccccctcatcccgcgccgcccgtagttcccacattgccccattgctccagagcagttccccaacaccgccgggccccacaggttcggcagcctatgtggctgtacccacacccaacagttcaagtccgggccccgccgggcggcctgctggagccatgctctaccattcctgggtgtctgagattaccgagatcggtgcattctag

SEQ ID NO: 26752 - DNA, 318 bp, synthetic construct
  source 1..318: mol_type = other DNA; note = Synthetic coding sequence
atgagcgtggtgccccccaaccggagccagaccggctggccccggggtgtcactcagttcggcaacaaatacattcaacagactaagcccctgacccttgagcggaccatcaacctttaccctctcacaaactacacctttgggacgaaggagcccctgtacgagaaagactcttctgtggccgcacgatttcaacggatgcgggaagaatttgataaaatcggaatgcgaaggaccgtggaaggcgtgctaatcgtgcacgagcatcggttgccccatgtgctacttctttctcgcttcaatttcatttataattag

SEQ ID NO: 26753 - DNA, 588 bp, synthetic construct
  source 1..588: mol_type = other DNA; note = Synthetic coding sequence
atgggcaacagcgacagccagtacaccctgcagggcagcaagaaccatagtaataccatcacaggagccaaacaaatcccctgctctctcaagattcgggggatccacgccaaagaggaaaaaagcctgcacgggtggggccacggttccaatggtgcaggctacaaatcacggagtctggcgaggagttgtctgtcacatttcaagtctaaccagccttacgcatcacgccttggcggccccacctgcaaagtgtcccgaggcgtggcctattccacacatcgcaccaatgcacctggaaaggactttcaaggcatcagcgctgccttcagcactgagaatggattccacagcgtaggccatgaactggccgacaaccacatcacctccagggattgtaatgggcatctgttaaactgttatggcaggaatgaaagtattgctagtacccctcccggcgaggaccggaaatctcccagggtacttatcaaaacgctgggtaagctggatggttgtctaagggtcgagtttcataacggagggaatccttctaaagtgccagcagaggactgtagtgagccagtgtag

SEQ ID NO: 26754 - DNA, 1581 bp, synthetic construct
  source 1..1581: mol_type = other DNA; note = Synthetic coding sequence
atggtgcccggcgaggagaaccagctggtgcccaaggaggacgtgttctggcgttgtaggcagaacatttttgacgagatgaagaagaagttcttacaaatagaaaacgccgctgaggaaccccgtgttctctgcattatacaagacaccactaacagcaaaaccgtgaatgagcgcataacactgaatcttccagcaagcactcctgtgcgtaaattgttcgaggacgtagccaacaaggtaggctatatcaacggaaccttcgatctggtgtggggtaacgggattaataccgccgacatggcaccactggaccacacctctgacaaatccctgctggacgcgaacttcgaaccaggcaagaaaaacttcctccatctaactgacaaagacggagaacagccacagatcctacttgaggacagttcagccggggaagattccgtacatgaccgtttcattggacctctcccccgcgagggctcggggggtagcacgagcgactatgtgtcacagtcctatagctactctagcatcctgaataagagtgagaccgggtacgtcgggcttgtgaaccaagccatgacgtgctacctgaacagcctcctccagacccttttcatgacgccggagttccgaaatgcactctacaaatgggaattcgaggaatcagaagaagaccctgtcaccagtataccttaccagctccaaagactttttgtgctgttacaaacttctaagaagcgggcaatcgagactacagatgtaacacgctcctttgggtgggattccagcgaagcttggcagcagcacgacgttcaggagttatgtcgggtcatgttcgacgcactggagcagaagtggaagcagactgagcaggctgacttgattaacgagctgtatcagggaaagctaaaagattacgtcagatgcttggaatgcggatacgaaggctggagaatcgatacatatctggacatccccctcgtgattcgtccgtatggatcctcacaggccttcgcctcagtcgaggaagccttgcacgcctttatacagcctgaaattttggacggacctaaccagtacttctgcgaaaggtgcaaaaagaagtgcgatgcgcggaaaggcctacggtttctccactttccctaccttttgacactacagctcaaaaggtttgatttcgattacacgactatgcatcgcattaaattgaacgatcggatgacgttcccagaggagctggacatgtctacatttatagacgtcgaggacgagaagtccccacagactgaaagctgcacggactccggagctgaaaacgaaggtagttgccatagtgatcagatgtccaatgacttctccaacgacgacggagttgatgaaggaatttgcttggagactaactcaggcaccgaaaagatctcgaaaagcggccttgagaagaactctctgatttacgagctcttcagtgtgatggtgcactccggatccgcagcgggggggcattattatgcttgcatcaagtctagcgtgatgagctcaggtacagctagcatgattaacatgtcggccggttag

SEQ ID NO: 26755 - DNA, 963 bp, synthetic construct
  source 1..963: mol_type = other DNA; note = Synthetic coding sequence
atgggcaaggagcaggagctgctggaggccgcccggaccggccacctccccgccgtcgaaaaactgttatcagggaagcgcctttcttccggcttcgggggtggtggtggtggcggctcgggagggggcggtggcggtagtgggggggggggcgggggcctggggtcaagctctcatcccctgtccagtctcctatccatgtggcgaggcccgaatgttaactgcgtagactccacagggtatacaccacttcatcacgcagcccttaacggccataaggacgttgtggaggtcttgctgcgaaacgacgctttgacaaatgtggccgattccaagggctgctatcccttacatttggccgcatggaagggcgatgcccagatcgtcagactgctgatccatcaaggcccctcccacacacgcgtcaacgagcagaataacgacaacgagacagctctgcactgtgccgcccagtatggtcacactgaggtcgtgaaagtcctgctggaagagctcaccgatcccacgatgcgcaacaacaagttcgaaacaccgctggacctcgctgctttgtatgggcgactggaggtcgtgaagatgctgctgaatgctcatccgaatctgctctcctgtaacaccaagaagcacactcctctgcacctggccgcgagaaatgggcacaaagccgttgtgcaggtgctgttagatgctggcatggattccaattaccagaccgagatgggcagtgccttgcatgaggctgccctgttcggcaaaacggacgtggttcaaatcctccttgccgccggtactgacgttaacatcaaagacaaccacggcctgactgccctcgacaccgttcgcgagctgccatcgcagaaatcccaacagatcgctgctctgattgaggacctggatacactccagttctattttatttcttgccctttccagggtctgtag

SEQ ID NO: 26756 - DNA, 660 bp, synthetic construct
  source 1..660: mol_type = other DNA; note = Synthetic coding sequence
atggtgatccacaagaacccccccgacacccccaccgagagccagttcacccgtttcctgtgtagcagtcccttagaggctgagacaccccctaacggtcccgattgcggctatggcagttttcatcagcagtactggttggatggcaagatcatcgctgtgggggtcattgatattctgccgaactgtgtttcatctgtatacctctactacgacccggactattcttttttgagtttgggcgtctattctgcgttgcgtgagattgcatttactcggcagttacacgagaaaacgtcgcagctctcttactactatatgggtttttatatacatagctgccctaagatgaaatacaaaggccagtacaggccctcagacctcttgtgtccggaaacgtacgtgtgggtcccaattgagcagtgcttgccctcactcgaaaattctaagtactgtagattcaatcaggaccctgaggcagttgacgaagatcgcagcaccgagcctgatcggctacaagtattccacaagcgggcaatcatgccttacggcgtctacaaaaaacaacagaaagacccatctgaggaggcggccgtgcttcaatatgcatctttggtgggccagaagtgcagcgagcgaatgctgttgttccggaattag

SEQ ID NO: 26757 - DNA, 1791 bp, synthetic construct
  source 1..1791: mol_type = other DNA; note = Synthetic coding sequence
atgcagcagaaggagctgggcaccttcgcccagagcagcatcgccctgcatcaccagtacaaccccaagttccagacacttttccagccttgtaacttgatgggggctatgcagctaatcgaggatttcagcacccacgtgagcattgattgttcgccccataaaacagtgaaaaagactgccaacgaattcccgtgtctgccaaagcaggtggcctggatattagccaccagtaaagtctttatgtatcccgagctgctccccgtatgttccctgaaggcaaagaacccccaggataaaattctgttcaccaaggccgaggacaataagtatctcctaacatgtaaaacagcaagacagctaaccgtccgcattaaaaacctgaacatgaatcgcgctcccgacaacatcattaaattttataagaaaaccaagcagcttccggtgctgggtaagtgttgcgaggaaatccagccccaccagtggaaacctcccatcgagcgcgaggagcacagactgcctttttggctcaaggcctcactcccttccatccaggaagagttgcggcacatggcagacggtgcgcgggaggtcggaaatatgacaggcactactgaaataaactcagaccaggggctcgaaaaggacaactccgagctgggctcggaaaccagatatcccttgttgttgccaaaaggagtggtgctgaaattgaaaccagtcgccgatcggtttcctaaaaaagcttggagacaaaaacggagcagcgttttaaaacccctgctgatacagcccagtccaagccttcagccttcattcaatcctggaaagactcccgcccagagcacacacagtgaagctcccccaagcaagatggtgctgcggatccctcatcctatccagcctgctactgtcctccaaacagtgccaggggtgcctcccctgggagtgagcggtggtgaaagctttgagtcccctgctgcactccccgccatgccaccggaagcccgcaccagctttccattgagcgagagccagactcttctgtcgagtgccccagtgcctaaggtgatgatgcctagtccagcttcgtccatgtttaggaagccctatgtgcggagacgaccatccaagagacgcggtgcccgtgctttccgctgtataaagcccgctcccgtcattcaccctgcgtctgtgatttttacagtccctgctactaccgtcaagatcgtctcactcggtggaggttgcaatatgatccagcccgttaatgcagccgttgcgcaatcccctcagaccatacctatcgccacactcttagtcaaccctaccagctttccttgccctctaaaccaacccttggtggcttcaagtgtgtcccccctgattgtgagcggcaattccgtgaatctcccaatccctagcacacctgaggacaaagcacacatgaatgtggatatcgcttgcgccgttgcggacggggaaaacgcttttcagggactcgaacccaaactggagccccaggaactgtctcccctttcggccaccgtgtttcctaaggttgaacacagccccgggccaccgcctgtggataagcagtgccaggagggcttgtctgaaaacagtgcctaccgatggacagtggttaagaccgaagaggggcgtcaggccctcgaacccttaccccaaggaatccaagaatccctgaacaactcaagtccaggtgatctagaagaagttgtcaaaatggaacccgaagacgctaccgaagagatttcaggctttctttag

SEQ ID NO: 26758 - DNA, 912 bp, synthetic construct
  source 1..912: mol_type = other DNA; note = Synthetic coding sequence
atggccgacaagagcaagttcatcgagtacatcgacgaggccctggagaaaagcaaagaaaccgctctcagccatctgttcttcacataccaggggatcccataccccattactatgtgcacgagcgagactttccaggctcttgatacttttgaggccagacacgatgatatcgtgctggcatcctatccaaaatgtggcagcaattggattctgcacattgtctccgagctgatttatgccgtatccaaaaagaagtataagtacccagaatttcccgtcctggagtgcggagacagcgagaagtaccagcgaatgaagggtttcccctccccaagaattctggctacgcatttgcactatgataaacttcctggtagtatctttgaaaataaggcaaagattctcgtgattttccgtaatccaaaggataccgccgtatcctttctgcacttccacaatgacgtcccagatatcccttcttacggctcttgggacgaattcttcaggcagtttatgaaaggacaggtctcgtggggacggtatttcgacttcgccattaattggaacaaacatctcgacggagataacgtgaagtttatattatatgaggatctgaaggagaacttagccgcaggtataaaacagatcgccgagtttctgggattctttcttaccggcgagcagatccagaccatctctgtacagtcaactttccaggctatgcgcgctaaaagtcaggacactcacggggctgtcggaccgtttctgtttcggaagggagaagtgggcgactggaagaatttattcagcgaaattcagaatcaggagatggacgaaaaattcaaggagtgtctcgcaggcactagccttggcgctaagcttaaatatgagtcatattgtcagggatag

SEQ ID NO: 26759 - DNA, 366 bp, synthetic construct
  source 1..366: mol_type = other DNA; note = Synthetic coding sequence
atgggcgtgcccgagatccccggcgagaagctggtgaccgagcggaacaaaaagagactcgagaaggaaaaacacgaaaaaggagctcagaagacagattgccagaaaaacctcggaacggtgggcgctgtggccctcgactgcaagggcaatgttgcctacgcgaccagtacaggggggattgtcaataagatggtagggcgagtaggggatagtccctgtctggggcgcactaaaggatgtttgctacctctccctttattctcaagaccccaggccttcttgaccttgtattccctccctttatccgtgtcttgttgcgtgccttttctgctgttggtgcagctacaggacgtctgggagtag

SEQ ID NO: 26760 - DNA, 579 bp, synthetic construct
  source 1..579: mol_type = other DNA; note = Synthetic coding sequence
atgaccctgggcagcaagagccagcagccccccgaggacatcaaggccctgagctggaaccgccaagctcagcatatcctttcttccgcgcaccctagtggcaaagctgtggtctgggacttgcgaaaaaatgaaccaatcataaaggtgagcgaccactcaaatcggatgcattgtagtgggctagcctggcatccggatattgcaacacagttagttctctgttccgaggatgaccgcctccccgttatccagctctgggatctcagatttgcaagcagccccctcaaggtgctggaaagccacagtcggggcatcctgagtgtgtcttggagccaagccgacgccgagctgttgctaacctccgcaaaggacagccaaatcttgtgtagaaatttgggtagcagtgaagtagtatacaagttacccacacagtcctcttggtgttttgatgttcagtggtgcccacgcgatcctagcgtttttagtgcggcctcgttcaatgggtggatcagcctctacagtgtcatggggaggagttgggaggtgcaacacatgagacaggctgataaagtgtag

SEQ ID NO: 26761 - DNA, 621 bp, synthetic construct
  source 1..621: mol_type = other DNA; note = Synthetic coding sequence
atgaaggacgtggacaacctgaagagcatcaaggaggagtgggtgtgcgagactgggagcgataatcagccgttgggcaacaaccagcagagtaattgtgagtacttcgtggattccctatttgaggaagcccaaaaagtgagctctaaatgtgtgtctcccgcagaacagaaaaagcaggtagatgtgaacatcaagctatggaaaaacgggttcactgtgaacgacgattttcgtagctactctgatggagctagtcaacagtttttaaatagcatcaagaagggcgagctgccttctgagctgcaaggcatttttgataaggaggaggttgacgttaaagtggaggataaaaaaaacgagatatgtttgtcaaccaaacccgtgtttcaaccctttagcgggcagggccatagactgggacgggtgtctcatattaaggacttcatcgagaagtatcagggctctcagcggtccccccccttttctttggctacagccctgcctgtactgcgattgcttgatgagacactgaccctggaagaggcagatcttcagaacgctgttatcattcagcggttacagaagacagcgtctttcagagagctgtccgagcactag

SEQ ID NO: 26762 - DNA, 1359 bp, synthetic construct
  source 1..1359: mol_type = other DNA; note = Synthetic coding sequence
atgcggggctgcagctacggcctgtgccggcggggcctgctgttctgtgtcattctcgatgatcagagtggaaagaagtccgttaacgataaaaatctgaagaaaaccgtagaggatgaggaccaggatagtgaggaggagaaagacaatgactcgtacattaaggagaggagcgatatcccgtccggtacgagtaaacatcttcagaagaaggctaagaagcaggctaagaagcaggccaagaaccaacgacgacaacagaaaatacaaggcaaggtgttgcatctgaatgacatctgcaccatcgaccaccccgaagactccgaatacgaggccgaaatgtcgttgcaaggggaggtgaatattaaatctaatcatattagccaggagggagtgatgcacaaagaatactgcgttaatcaaaaagacctgaatggacaagccaaaatgatcgagagcgtgacagacaaccaaaagagtaccgaggaggtggacatgaaaaacatcaatatggataatgacttggaagtcctgacatcgagtccgacaagaaatcttaacggagcctacctgacagaaggcagtaatggagaggtggatattagtaacggcttcaagaacctgaacctgaatgccgcactgcatcccgatgaaattaatatcgagattctcaacgactcacatactcctggcactaaggtgtatgaagtggtgaacgaggacccagaaaccgcattttgcaccctggctaatcgagaggtctttaatacagacgaatgcagcatccagcactgcctgtatcagtttactcggaacgagaagctaagagacgctaataagttgctttgcgaggtctgtactcgacggcagtgcaacggacccaaggccaacattaagggtgagcggaagcatgtgtatacgaatgcgaagaagcaaatgctcatctcattggcccctcccgtgttaactcttcatcttaagagattccaacaggcaggctttaatctccggaaagtgaataaacatatcaagttccccgagatccttgacctggctcccttctgcaccctcaaatgtaaaaatgtcgcagaagaaaacaccagagtcctatattctctgtatggagttgtcgaacactcaggaaccatgcggtctggccactatacagcttatgctaaagctcgcaccgccaacagtcatctgtctaacctggtactccacggtgacatcccacaggactttgagatggaaagtaaaggtcagtggttccatatttctgatacacatgtccaagccgttccaactaccaaagtgttgaactcgcaggcgtacctgcttttttatgaacgtattctgtag

SEQ ID NO: 26763 - DNA, 450 bp, synthetic construct
  source 1..450: mol_type = other DNA; note = Synthetic coding sequence
atggagcggatcgagggcgccagcgtgggccggtgcgccgccagcccttacctgcgccctttgactctccattaccgtcagaatggggctcaaaagagttgggattttatgaagacgcacgactctgtgactgtcctgctgtttaatagcagccgtcggagcctagtgctggtcaagcagttccggccagcagtctacgcgggggaggtagagaggaggtttccagggagcttggcagctgtggatcaggatggacctcgggaacttcagcccgctctcccaggcagcgccggcgtaaccgtggaactgtgtgcagggctagtggaccagcccggtttgagtctagaggaagtggcctgtaaggaggcttgggaagagtgcgggtaccatctagccccatccgatctgagaagggttgccacctattgggatgctaccatgggtagttag

SEQ ID NO: 26764 - DNA, 489 bp, synthetic construct
  source 1..489: mol_type = other DNA; note = Synthetic coding sequence
atgaacagcaacgccagcgagcacaccggcatgctgcggacctgctggtcacactctcactgggatcctttttctagcgggagcgtgacagctatgtgggcaacccactctcctacttcaaaagcgtgggccggtattcagggaagaggaagatgggctctcggtttcccctggcggggtcaaggggttctccacgtcatcgcttcccagaaagcagctgtgacggaggccgttgatctgcgtacgggcgcggcctcacaggcaatgtccgaggcctttgttaggtcagggatgttctatctgcgtccagcattcgtccttctgtgctacaagtgggggaagctgaggcacagtgaggtgtccaatctcctaggagtggcctggccagtttctgaagaagcatgtatgggcacttgggggtccctggcagtcgccgtgaccttaccagcccaggggctgggtacctgggggcgcgatgagggtgagtag

SEQ ID NO: 26765 - DNA, 1320 bp, synthetic construct
  source 1..1320: mol_type = other DNA; note = Synthetic coding sequence
atggtgcccagccgggaggccctgctgggccccggcaccaccgccatccgctgccccaagaagttgcagaaccagaattacaaaggccacggccttagtaaggggaaagaaagggaacagcgggcgagtatccggtttaaaacaaccctaatgaacaccctcatggacgtgctgagacacagacctgggtgggtcgaggtgaaggatgagggggagtgggacttctattggtgtgatgtgtcgtggctgcgggaaaattttgatcacacatacatggatgaacatgttcgaattagtcattttaggaaccactacgaactgacgcgcaaaaattacatggtaaagaatttgaaacgattccggaagcagctggaacgcgaggcgggcaagttggaagcggccaaatgcgacttttttcctaagacctttgaaatgccatgcgaataccacctatttgttgaggaattcagaaaaaatcctggcatcacatggataatgaagcccgtcgctaggtctcaagggaaagggatctttttatttcggagactgaaagacattgtggattggcggaaagatactaggagcagtgacgatcagaaggacgatataccagtcgagaattacgtagcacagagatacatagagaatccttatttgatcggcggccgtaagttcgacctgcgggtctatgtgctggtcatgtctgtgtttgccgaatgtctgctgtggtctggtcataggcggcaggatgtgcacctgaccaatgtggcagttcaaaaaactagccctgattaccaccctaagaaaggctgtaagtggactctccagagatttagacagtatctggcgtccaagcatggtcccgaggctgtggaaacactgttcagggatatcgacaacattttcgtcaagtctcttcagagtgtacagaaggtaatcatatcagataaacactgtttcgagctctatgggtacgatatccttattgaccaggaccttaagccatggctgctggaagtcaatgcgagccccagtcttaccgcatcttctcaggaggattatgagcttaagacctgtctgctcgaggacaccttgcacgtggtcgatatggaagcgcgcctgaccggaagggaaaagagagtgggtggtttcgacctaatgtggaatgacggacccgtgtctagggaggagggtgcgcctgatctgagcggtatgggaaattttgtaacaaatactcacttaggctgtgtcaacgacagaaagaaacagctgaggcaattgttctgttcactgcaggtgcaaaaaaaggcatcatcctag

SEQ ID NO: 26766 - DNA, 867 bp, synthetic construct
  source 1..867: mol_type = other DNA; note = Synthetic coding sequence
atggccaagtggggcgagggcgacccccggtggatcgtggaggagcgggccgacgctaccaacgtcaacaattggcactggaccgaacgcgatgcctcaaattggtctactgataaactcaaaaccctgttccttgccgtgcaggtgcaaaatgaagagggaaaatgcgaggtcacagaagtgagcaaactcgatggcgaagcgtccatcaacaacaggaaagggaagcttatattcttctatgaatggtctgttaagctgaactggactggaacaagtaagagcggcgtgcagtacaagggccatgtggaaatccctaacctgtccgacgagaactcagtcgatgaggttgagattagtgtatctctagcaaaggatgagcccgatactaatctggtggctctgatgaaggaagaaggggttaagctgttacgcgaagccatgggaatttacatcagcacactgaagacggaattcacacaggggatgatcctccccacaatgaacggcgaatctgtggatcctgtggggcaaccagctctcaaaacagaagagaggaaggccaagcctgccccgtccaagacccaggctaggcctgtgggggtgaaaatccctacctgtaagattaccctcaaagaaacatttctgacctctcccgaggagttgtacagggtttttacaacacaggagctcgtgcaggccttcacccatgcaccggccactcttgaagctgatcggggcggcaaattccacatggttgatggcaatgtttcgggggagttcaccgatctcgtgccagagaaacatatcgttatgaaatggaggttcaaatcttggccagagggatcccactgccacagtgggtag

SEQ ID NO: 26767 - DNA, 1053 bp, synthetic construct
  source 1..1053: mol_type = other DNA; note = Synthetic coding sequence
atgcccagcttcatccggcacggccccaccatcccccggcggaccgatatatgtctgccagatagctctccaaatgcatttagcacatcaggcgatgttgtgtctaggaaccaaagtttcctgaggacacccatccagaggacacctcatgagatcatgagaagggaatccaatcgtctttctgcgcctagttacttagctagatcactggccgatgtacccagggagtacggatcttcacagtcgtttgttacagaggtgagcttcgcagtggaaaacggcgatagtggctccagatactattatagcgacaatttctttgatggtcagagaaagagacctctaggcgaccgagctcatgaggattaccgctattatgagtacaatcacgacctgtttcagcgaatgccccagaatcagggacgccacgcctctgggatcgggcgagtagccgcaacaagcctaggtaatcttacgaaccacggcagcgaagacttgcccctgcctcctggatggtccgtggactggactatgcgtggacgaaagtactacatcgatcataacacaaacacaacccattggtctcatccactggagcgcgagggcctcccgcccggctgggaacgggtggaatcatcggagttcggcacctactatgttgaccatacaaacaaaaaggcccagtacaggcacccgtgtgctccctcagtccccagatacgaccagcccccgcccgtaacttatcagccccagcagaccgagcggaatcagagtctgcttgttcccgccaacccatatcacaccgcagaaatccctgattggctccaagtgtacgctagagcccccgtcaaatatgatcacatcctgaagtgggaacttttccagcttgcagatctggacacttatcagggaatgctgaaactactgttcatgaaagagttggagcagatcgtgaagatgtatgaggcatacagacaagccctgctgaccgaactagagaacaggaagcagcgtcagcagtggtacgcccagcaacatggcaaaaatttctag

SEQ ID NO: 26768 - DNA, 537 bp, synthetic construct
  source 1..537: mol_type = other DNA; note = Synthetic coding sequence
atgaccttccgggagggccaccagtgggagaagatccccctgagcggcagtaaccaggagatccgaaggcaaaaggagaggataaccgagcaacccctgaaagaggaagaagacgaggatcggaaaaacaagggacaccaggccgccgagatcgagtggctcggcttccgcaagccatcacaggctgatatgctgcattccaaacatgacgaggagcagaaagtttgggacgaggagatcgatgacgatgacgatgataattgtaacaatgacgaggatgaggtgagggtgatcgagttcaaaaaaaagcatgaggaagtaagccagttcaaagaagaaggtgacgcgtctgaggatagccccctgagcagcgcgtcctcccaggctgtgactcccgatgagcagccaacccttggtaaaaagtcagacataagccgcaacgcgtatagcagatacaataccatttcgtaccgaaaaatccgaaagggcaacacaaaacagaggattgatgaattcgagagcatgatgcacctgtag

SEQ ID NO: 26769 - DNA, 312 bp, synthetic construct
  source 1..312: mol_type = other DNA; note = Synthetic coding sequence
atggccgccttcaagctggacttcctgcccgagatgatggtggaccactgctccttgaactcttccccagtaagcaagaagatgaatggaacactggatcaccctgatcagcccgacctcgatgcgataaaaatgtttgtcggacaggtgcccagaacatggagcgagaaggatctgcgagagcttttcgaacaatatggcgctgtgtacgagattaacgtgcttagagatcggtcccagaatcctccacagtcaaaggggtgttgctttgtcaccttttatacgcggaaagcggccctcgaggcacaatag

SEQ ID NO: 26770 - DNA, 1917 bp, synthetic construct
  source 1..1917: mol_type = other DNA; note = Synthetic coding sequence
atgccccccatcaacctgcaggagaagcaggtgatctgcctgagcggtgatgatagcagtacatgcattggaattctggccaaagaggtggagattgtcgcatcttccgactcctcaattagctcgaaagctagaggctctaataaggtgaaaatccaacccgtcgcaaaatatgattgggagcagaaatattactatgggaatctcatcgccgtgtcaaactcatttctggcatacgcaatccgggccgccaacaacggatctgccatggtgagggtaatctcggtctccaccagcgaaagaaccctgctgaaaggatttacaggtagcgttgctgatctggcttttgctcatctcaattccccacagcttgcctgccttgatgaggccgggaaccttttcgtgtggcgattggccctggtaaatgggaaaatccaggaagagatcttggtccacatccgtcaaccagaaggtactccgctaaatcattttcgccgcatcatctggtgtcctttcattcctgaagaatcagaagattgttgcgaagagtcttccccaactgtggcattgttgcacgaggatagagcggaagtctgggatcttgacatgctccggtcgagccattcgacctggcctgtggacgtgtctcaaattaagcagggctttatcgttgtgaaggggcattctacttgtctgagtgagggggccctgtcaccagacgggacagtcttagcgaccgcctcacacgatggctatgtcaagttttggcagatttatatcgaaggccaggatgagccaaggtgcttgcatgagtggaaaccccacgatggccgccccctctcctgtttattgttttgtgacaatcacaagaagcaggatccagacgtgccattctggcgctttctgatcactggggccgatcagaacagggaattaaaaatgtggtgtaccgtgtcttggacgtgcttgcaaacaatcaggttcagtccagatatcttctctagcgttagtgtgccaccctccctgaaggtctgcctggatctgtccgccgagtatctcatcctgagcgacgttcagaggaaggtgctctacgtcatggaacttctccaaaaccaggaggagggtcatgcatgcttttcttccatctccgagtttttgctgactcatcccgtgttgtctttcggtattcaggtcgtctcccggtgcagactcaggcacaccgaggtgctgcctgcagaggaggaaaacgatagtctgggagctgacggcacccacggagccggcgcgatggagagcgctgccggagtgttgattaaactcttctgcgtacacacgaaggctctccaagatgtgcagatacgtttccaaccacagcttaaccctgacgtggtggcccccctgccaacccacacagcccacgaggattttaccttcggtgagtctcggccagaacttggttccgagggtctaggctctgctgcacacggctctcagccagacttgagaagaatagtggagcttccagcaccagccgactttctgagcctatcttccgagacaaagcccaagctaatgaccccagacgcctttatgaccccctccgcttcattacagcagattacggcctcgccaagcagttcaagctctggttcctcctcttcttctagctcatctagttcttcattaacagcggtttccgctatgtcctcaacgtccgctgtcgatcccagcttgacacggccacctgaggagctaactctatcaccgaagctgcagctggacgggagcctgaccatgtcatcatctgggagtctgcaggcatcaccgcgcggtcttctgcctgggttacttcccgcacctgcagataagcttactcctaaggggcctggacaggtttgcgactgggtgtgcgtgtag

SEQ ID NO: 26771 - DNA, 495 bp, synthetic construct
  source 1..495: mol_type = other DNA; note = Synthetic coding sequence
atgcggatcctgatcctgggcctggacggcgccggcaagaccaccatcttgtatcggctgcaagtcggggaagttgtgaccacaattccaacaataggattcaatgtcgagaccgtcacttacaaaaacctcaaatttcaggtctgggatctgggcggccagacatccatcaggccctactggcgttgctattacagtaataccgatgccgttatttatgtggtggattcctgtgaccgcgaccgcatcgggatttccaaaagtgaactggtggccatgctagaggaagaggagttgcgaaaagccatcttggtcgtgttcgcaaataaacaggatatggaacaggctatgactagctctgaaatggctaacagcctcggactccctgcccttaaagatcggaaatggcagatttttaagacttcagcaactaagggaacaggactcgacgaagctatggagtggctggtggagactttgaagagcagacaatag

SEQ ID NO: 26772 - DNA, 1944 bp, synthetic construct
  source 1..1944: mol_type = other DNA; note = Synthetic coding sequence
atggcccagggcagcgtgagcttcaacgacgtgaccgtggacttcacacaagaggagtggcaacatttagatcatgcccagaagacactctatatggacgttatgctggagaactactgccacctcatctccgtgggttgccatatgaccaagccagacgtaatcctgaaattggagagaggagaagaaccttggacctcatttgcaggccacacatgtttagaggagaactggaaggcagaggacttccttgttaaatttaaagaacaccaggaaaagtacagccggagtgtagtgagcatcaatcacaaaaaattagtcaaggagaaatcaaagatttatgaaaaaaccttcaccctggggaagaacccagtgaacagtaagaacttgccacccgagtatgacacacacggaagaattctgaagaacgtcagcgaactgattatctccaatcttaatcccgctagaaaaagattatcagaatataacggttacggaaaatcattgctgtcaacaaagcaggagacaacacaccccgaggttaagtctcacaaccagtctgcccgggccttttcacacaacgaagtactgatgcagtaccagaagactgagacacctgcccagtctttcggatataatgactgcgagaaaagttttctgcagcgggggggccttattacacactccagaccatacaaaggtgagaatccctcagtctataataaaaaacgcagagccacaaatatcgagaagaagcatacatgtaatgaatgtggcaagagcttttgcaggaaaagtgtgcttatcctgcaccagggaatccattcggaagagaagccatatcaatgtcaccagtgtggtaacgcattcagacgaaagtcatacctgatcgaccatcaacgtactcacacaggggagaagccgttcgtttgcaatgaatgtggaaagtcattccgattgaaaactgcgcttacagaccaccagaggactcacacaggtgagaaatcttacgaatgtctccaatgccgtaatgcctttaggcttaagtcccacttaatccgacaccagcggacgcacacaggagaaaagccttacgaatgcaatgactgtggcaagtcctttagacagaaaactaccttatctcttcaccagcggatacacacaggcgagaaaccatacatctgcaaggagtgtggtaagtcatttcaccaaaaagcaaatctcacagtccaccagcgtacccacacaggggagaagccttacatctgtaacgagtgcggcaagtcattttcacaaaagacgacattagccctgcacgaaaagacccacaacgaggaaaaaccatacatctgttccgagtgcggcaagagctttcgccagaaaactacactcgtggcgcatcaacggactcacactggcgaaaagtcatacgagtgtcctcactgcggtaaagctttccgtatgaagtcataccttattgatcatcaccgaacccatacaggagagaagccatatgagtgcaatgagtgcggaaagtccttctcacaaaagaccaacctgaacctgcaccaaagaatccatacaggggaaaaaccttatgtctgtaacgagtgcgggaaatcgttcagacagaaggccaccctgactgtgcaccaaaagattcacacgggacagaagtcatacgagtgtccccagtgcggcaaggcgttttctcgaaagtcatatctaatccaccatcaacgcacacataccggcgaaaaaccatacaagtgttctgaatgtggaaagtgcttccggcagaagacgaacctgatcgtgcaccaaagaacccacactggcgagaaaccatatgtttgcaacgaatgcggcaaatctttcagctacaagcgaaacctgatcgtccaccagcgcactcacaaaggagagaatatagagatgcagtag

SEQ ID NO: 26773 - DNA, 3570 bp, synthetic construct
  source 1..3570: mol_type = other DNA; note = Synthetic coding sequence
atgaagctggagtgcatccccgcccccatcacccccagcaccgtgccctcctttccccccaccccccctaccccccccgcctctcctcctcacacacctgtgattgtccctgccgctgcaaccactgtgagctctccttcagccgctatcaccgtccagagggtacttgaggaggacgagtctatcagaacctgcctgtccgaggatgctaaggaaatccagaataaaatagaggtggaggctgacggacagaccgaagagatcctggattcccaaaacctgaacagcaggcgtagcccggtgcccgctcagattgcaatcaccgttcctaaaacttggaagaagcccaaggatcggacgaggacaacagaggagatgctagaggccgaactggagcttaaggccgaggaagagttatccatcgataaggtgctcgagtccgaacaggacaagatgagccaggggtttcaccctgagcgggaccctagcgatttaaagaaggtcaaggccgtggaagaaaacggcgaagaggcggaaccagtgcgaaacggcgccgagagcgtgtctgagggggaaggcattgacgctaatagcggctccaccgattccagcggggacggcgtcacttttccttttaaacccgagagctggaagcctactgacacagaagggaagaaacaatatgacagggaatttctcctggatttccagttcatgccggcctgcatccagaagcctgagggtctcccccccatctcagatgtagtgctcgataaaattaaccaacccaaactccctatgcggactctggatccccggatcctgccgaggggcccagactttacgcccgccttcgcggatttcggaagacagacccctgggggacgtggggtgccactactgaacgtggggagccggagatcgcagccaggccagagacgcgaaccccgtaagatcataacggtgagtgtgaaggaggacgttcacctcaagaaggcagaaaacgcctggaaaccatcacagaaaagagattcccaggctgacgaccctgagaacatcaagacacaagagctgttccggaaagtgcgctccattttgaataaactgacaccgcagatgtttaatcaactaatgaaacaggtaagcggtctgaccgtggatacagaagaaagactgaaaggcgtgattgatctggtctttgaaaaagccatcgacgaaccttccttttccgttgcctatgcaaatatgtgtcggtgcttggtcactctcaaggtaccgatggctgataaacccggtaacaccgttaatttcagaaaactgctcctcaatcggtgtcagaaggaatttgagaaggataaggctgatgacgacgtattcgaaaagaaacaaaaggagcttgaggcagcctccgcccctgaagaacgtacaagactccatgacgaacttgaagaggctaaagacaaagcgaggcgccgcagtatcggcaatattaaatttatcggggaactgttcaaactaaaaatgctgactgaggcaattatgcacgattgtgttgtcaaactgttgaagaaccatgacgaagagtccctggagtgcctgtgccgcctgctgactactatcggcaaagacctagactttgaaaaggccaagccgcggatggatcagtactttaatcagatggagaaaatcgtcaaggaaagaaaaacgagctctcgcataagattcatgctccaggacgtgatcgacctgagactgtgcaattgggtttctcggagagcagatcagggacctaaaacgattgagcagattcataaagaggcgaaaatagaggagcaagaggagcagaggaaggtccagcaacttatgacaaaggagaaacgccgccccggcgtgcagcgcgtggacgaaggcgggtggaatacggtgcaaggagctaaaaattcaagggtgcttgatccatccaaattcctgaagatcaccaagcccaccattgacgagaagatacagcttgttccaaaagctcagttaggctcttggggtaagggctcctcaggtggggctaaggctagtgaaacagatgcattgcggtctagtgcctcctctctcaatagattttcagccctgcaacctcctgccccatcaggaagtactccctctacaccagtggagtttgattcaagacgaacacttacttccagggggagcatggggcgagaaaaaaatgataagccgctgcccagcgccaccgcgagaccgaataccttcatgagaggcgggtcaagcaaagacctgctggacaatcaatcccaggaggaacagcgacgggagatgctcgagacagtgaaacaactcaccggaggagtggatgtggagcgaaactctaccgaggccgagaggaataagacccgggagtcagctaagcctgagatctccgcaatgagcgcacacgacaaagccgccctatccgaggaagagctcgagcgcaagtccaaatccataattgacgaatttctccacatcaacgattttaaagaggccatgcaatgcgtggaggagttaaacgcccaaggcctactccacgtgtttgtacgggtaggcgtggagtcgactttggaaaggagtcagatcactagagatcacatgggccagttactctaccagttggtgcagtccgaaaagctgagcaaacaggatttctttaagggtttctctgagactttggagctggccgacgatatggctatcgatattcctcacatctggctatatttggccgagctcgtcactcctatgcttaaggagggtggtatctcgatgagggaactcaccattgaattcagcaaacccttgctccccgtaggtcgggccggcgtgttgcttagcgagatcctgcacctgctttgcaagcaaatgtcacacaagaaagttggcgccttgtggcgcgaagccgatctgtcctggaaagactttcttccagagggtgaagacgtacacaattttctcctggagcagaagctcgattttatcgagtcagactccccctgtagctctgaagccctgagtaagaaagagctatctgcggaagagctctacaaacgcttggagaaactcattatcgaagacaaggccaatgacgaacagattttcgactgggtggaggctaacctggatgaaatccagatgtcatcgccaacttttttgcgggcccttatgacagccgtatgtaaggccgctatcatcgctgattcctctacattccgcgttgacacagctgtgattaaacagcgggtcccaatactgctgaagtacctggactccgacaccgagaaggaactacaggctctgtacgccctacaagcttctattgtaaaactggaccagcccgcgaatctgctgagaatgttcttcgactgcctgtacgacgaagaagtcataagtgaggacgccttctataaatgggaatcctctaaagacccagcagaacagaatggaaaaggcgtagccctaaagagcgtcactgcctttttcacctggctacgcgaggcggaggaagagtccgaagataattag

SEQ ID NO: 26774 - DNA, 591 bp, synthetic construct
  source 1..591: mol_type = other DNA; note = Synthetic coding sequence
atgtggagcgtgctgcaggacggccccatcagccgggtgatcgtgttttctctctcagcagccaaagaaacaaaagatcggcctctgcaggacgaatactccgtgttggtcgcatccatgcttgaaccagcggtagtgtatcgtgatctcctgaatcggggattagaggaccagctgttgctgccaggatccgaccagttcgactccgttttatgtagtcttgtgacggacgtcgacctagatggcaggccggaggtccttgtagcaacctacggtcaagagctcctatgctacaaatacagggggcccgagagcgggttgccagaggcccagcatggctttcatttgttatggcagcggtcattcagctcaccccttttagccatggcccacgtggacctgaccggggacggcttgcaggagctggccgtggtgtcattaaagggggttcatatcctccagcactccttgatccaggcctccgagctggtgctcactcggctaaggcaccaagtggagcagcgtaggcgtaggctacagggcctggaagatggagctggggccggccccgccgaaaacgctgccagctag

SEQ ID NO: 26775 - DNA, 1056 bp, synthetic construct
  source 1..1056: mol_type = other DNA; note = Synthetic coding sequence
atggtgagccacaccttccacatgcggaccgaggagagcgacgcctctcaggagggggacgatttacccaagtcctcggctaacacaagtcacccgaaacaagatgacagtccaaagtccagcgaggagactattcagcccaaagagggcgatattcccaaggccccagaggagactattcaaagcaagaaggaagacctacccaagtccagtgaaaaagccattcagcccaaggagtctaacatacctaagagttccgctaagcctattcagcccaaactgggaaacatccctaagacatccgttaaaccttcccagcccaaggaaagcgacatccctaagagtccagaagaggcaatccagccgaaagaaggggatataccaaagagcctcgaggaggccattcaacctaaagaaggggacattcccaagagccccgaggaaaccattcaaccgaagaaaggggatattccaaaatctcctgaagaagccatccagccaaaagaaggggacatccctaaatctcccaaacaggccatccagccgaaagagggcgacatccccaaatcactcgaggaagctattccacctaaagagatagacatacccaagtcccccgaggagacaatccagccaaaagaggacgacagccctaaatcgctggaggaagccaccccaagcaaggagggtgatatcctgaagccagaggaggagaccatggagttcccagaaggagacaaagttaaagtgatactcagcaaggaagattttgaagccagtctgaaggaggcaggagaacggctggtggccgtggatttctccgccacttggtgcgggccttgtcgtacgattaggccatttttccatgcattgtctgttaagcacgaagatgtcgttttcctggaagttgatgccgataactgtgaagaggtggtgagagaatgtgctatcatgtgtgtgcccacatttcagttctacaagaaagaagaaaaggtcgacgagctttgtggcgcactgaaggagaaactagaagcggtgatcgccgagctcaaatag

SEQ ID NO: 26776 - DNA, 1473 bp, synthetic construct
  source 1..1473: mol_type = other DNA; note = Synthetic coding sequence
atgcccgacggcaagatccagaagctgatcatcaccgaggagaccgccaaaatcagaccattcgccgtagccgcagttctgaggaatattaagttcaccaaggaccgttatgactctttcatagagctacaagagaaactgcatcagaacatttgtcgtaagagagcgttagttgctataggtactcatgatctcgacaccctatcaggcccattcacctacaccgcaaagcgccctagcgacattaagttcaaaccactgaataaaacaaaggagtatactgcctgcgagctcatgaatatctacaaaacagacaaccacctaaagcactacctgcacattattgagaacaaaccgctgtaccccgtgatctatgattccaacggagttgttctcagtatgccacccatcatcaacggtgaccatagcagaattactgtcaacacacggaacatcttcatcgaatgcactggaacagattttaccaaagccaagattgtgctggacatcatcgtcactatgtttagtgagtattgcgagaatcaatttaccgtggaagctgccgaggttgtcttccccaacggaaagagccatacgttccccgaactggcctacagaaaggagatggtccgggcagacctgatcaacaaaaaagtcggcattcgcgaaacccccgagaatctcgcgaaactgctgactcggatgtatcttaagagcgaggtgataggcgatggcaaccagatagaaatagagatcccccccactagggctgatatcattcatgcctgcgacattgtcgaggatgccgccattgcctacggttataacaacattcagatgacgctccccaagacgtatactattgcgaatcaatttcctttgaataagctgacagaactcctgcgacacgacatggccgccgctgggtttaccgaagccctgaccttcgctctctgctcacaggaggacatagccgataagttaggtgtggacatctccgcgaccaaagctgtgcatatatccaatccaaaaacagccgagttccaggtggcccggaccactctactgcctggtctgctgaagaccatcgcggcaaatcgaaagatgcctttgccacttaagttatttgagattagcgacatcgttataaaggattcaaacaccgacgtaggagcaaaaaattaccgtcacctatgcgctgtgtattacaataaaaatcctggcttcgaaattatccacggactgctggaccgcattatgcaactgctcgatgtgccccccggtgaagacaaaggggggtatgtgatcaaagcctcagaaggcccggcgttctttcccggccgctgtgcagagatcttcgccaggggccagtccgtgggaaaactcggagtgctccacccagacgtgatcaccaaatttgaacttaccatgccatgctcttcccttgagatcaacgtgggaccttttctgtag

SEQ ID NO: 26777 - DNA, 1458 bp, synthetic construct
  source 1..1458: mol_type = other DNA; note = Synthetic coding sequence
atggccgccgagctgtacgcccccgccagcgccgccgccgccgacctcgcgaactcaaatgcaggggctgccgtgggccgcaaggcgggtccaaggtcccctcccagcgcgccagccccggccccaccgccacctgctcctgccccaccaacgctcggaaacaatcaccaagagtctccaggatggcggtgctgtaggcccactctgagagaaagaaatgccctgatgttcaataacgaactgatggctgacgttcacttcgtggtgggaccgccaggggccactagaaccgtcccagcacacaagtacgtactcgctgttggtagttcagtgttttatgctatgttctacggtgatctcgccgaggtgaagtccgagattcacatcccggacgtggagcctgcagcctttctaatcctgctgaagtacatgtacagcgacgagattgacctggaggcggatactgtcctggctacactatatgcggccaagaaatatatcgtgccagccttagccaaagcctgtgtaaactttctcgaaacctctctcgaggcaaagaatgcatgtgtcctgctcagtcagtcgagactctttgaagagccagaactcactcagagatgttgggaggtgatcgatgcacaagccgagatggcgctacggagcgaggggttttgtgaaatagaccgtcagaccctggagataatagtcactcgcgaggctctgaacacgaaggaagcagtcgtgttcgaagcagttctcaattgggccgaggctgaatgcaagcggcaaggcctgccaatcacacctcgaaacaaacggcatgtactcgggcgggccctgtacctggtgaggatccccaccatgactctggaagaatttgcaaatggtgcagctcagtccgatatactgacactcgaagaaacacattccattttcctgtggtataccgccacaaacaagcccaggctggactttcccctgaccaagagaaaaggcctggcccctcagcgatgtcatcggttccaaagctccgcctaccggtctaaccagtggcgctacaggggccgctgtgattccatccaatttgctgtggaccgcagggtgtttattgctggcctggggctgtatggcagcagcagcggcaaggcagagtattcagtcaaaatcgaattgaaacgcctgggggtggtgttggcgcagaacctgactaaatttatgagcgacgggagctcaaacacgttcccggtttggtttgaacacccggtgcaggtggaacaggacactttttacaccgcctctgcggttcttgacggatccgaactgtcctacttcgggcaggaaggaatgacggaagttcaatgcggcaaggtcgctttccaattccaatgttctagcgactccacaaacggcacaggcgtccagggcgggcagattccagagctgattttctacgcctag

SEQ ID NO: 26778 - DNA, 204 bp, synthetic construct
  source 1..204: mol_type = other DNA; note = Synthetic coding sequence
atggccctgctggccgagcacctgctgaagcccctgcccgccgacaaacagatagaaaccggaccctttcttgaggccgtgtcacaccttcctccattttttgactgtcttgggtcacctgtgtttacacccatcaaggcggatatatctggcaatattacaatgcggaagctgagacttagaggtgtggagggcctggcctag

SEQ ID NO: 26779 - DNA, 816 bp, synthetic construct
  source 1..816: mol_type = other DNA; note = Synthetic coding sequence
atctgcgagcggatccggagcaccgtggacgagaaggagcagaagcaactcctgatggacctggatgtcgtcatgaggagctccgactgcccttatatagtccagttctacggtgctctattccgggaaggggactgttggatctgtatggagcttatgagcacctcctttgacaaattttacaaatacgtttacagtgtcttagatgacgttattcccgaagaaattctcggaaaaatcactctggccacagtgaaggcacttaatcacctcaaagagaaccttaagatcatccaccgggacattaagccctccaatattctgctggataggtctggaaatattaagttgtgcgattttggcatctcagggcaactggtcgatagtatcgccaaaacacgggatgccggctgtcgaccttatatggcccctgaaagaatcgacccctcagcaagccgtcagggatacgatgtgagaagtgacgtctggagcttaggcattaccttgtatgagctcgccaccggccgatttccctaccctaaatggaatagcgtgtttgaccaactaacccaggtcgttaagggggaccccccccagctaagtaattcagaggaacgcgagtttagcccctctttcataaatttcgtgaacctgtgcctcaccaaggacgagagcaaacggccaaaatacaaagaactgcttaaacatcctttcatactgatgtatgaggagcgggccgtggaggtcgcttgttacgtctgcaaaattctggaccagatgccagcaactccgtctagtccaatgtatgttgactag

SEQ ID NO: 26780 - DNA, 291 bp, synthetic construct
  source 1..291: mol_type = other DNA; note = Synthetic coding sequence
atgagcgagaaggtggactggctgcagagccagaacggcgtgtgcaaagtggacgtgtacagcccaggggacaatcaggcccaagattggaagatggacacctccaccgatcccgtcagagtcttgtcctggttacgacgggacctcgagaagtcgaccgctgaatttcaagacgtccggttcaaacccggggagtctttcggaggcgaaacctctaattccggtgaccctcacaaaggattttctgttgactattataatacaacaacgaagggaacccccgagcggtag

SEQ ID NO: 26781 - DNA, 792 bp, synthetic construct
  source 1..792: mol_type = other DNA; note = Synthetic coding sequence
atgctgagcagcaagggcctgaccgtggtggacgtgtaccagggctggtgcggcccatgtaagcccgtcgtttcattatttcagaagatgcgcatcgaagttggactagatcttctacatttcgccctggccgaggccgatagattggatgtccttgagaaataccggggtaaatgcgagccgacgttcttgttctacgcgatcaaggacgaagctctgtcagacgaagacgaatgcgtatcccacggcaagaacaacggtgaggatgaagacatggtctcaagcgaacgcacatgtactttggccattatcaaacccgacgcagtggctcatggtaagaccgatgagatcattatgaagatccaggaggccggttttgagattctgaccaacgaggaacggaccatgacggaggctgaagtgcggcttttctaccagcacaaagcaggtgaagaagcttttgagaaactggtacatcatatgtgttcaggcccaagccatctgctgatccttactcgcaccgaaggatttgaggacgtcgtgactacttggcggacagtgatgggccctagagacccaaacgtggccagaagggagcaacctgagtcacttcgggcacagtatggcacggagatgccctttaacgcagtgcacggatctcgtgatagagaggatgccgacagagaactggctttgctcttcccgagcctgaagttctccgacaaggataccgaggcacctcagggcgagagctctacacagcccagactgaaaatcaccgatctggattag

SEQ ID NO: 26782 - DNA, 867 bp, synthetic construct
  source 1..867: mol_type = other DNA; note = Synthetic coding sequence
atgagcagcagcatgtggtacatcatgcagagcatccagagcaagtacagtttaagcgaacgcctgattagaacaattgccgccatcagatccttccctcatgataacgtggaagacctgatacgcgggggtgccgatgtgaactgcacccatggaactctgaagccgctgcactgtgcctgtatggtcagcgatgcagattgcgtggaactgcttctcgaaaagggggcagaggttaacgcccttgatgggtacaaccgcacagctctgcattacgccgctgaaaaagatgaagcctgcgtggaggttttgctcgaatacggggctaaccccaatgctctagacggtaatcgcgacaccccccttcactgggccgctttcaaaaataatgccgaatgcgtgagagccctgctcgagtctggagcgtcagttaatgctctcgattataacaacgatactcccctttcgtgggccgcaatgaaaggtaacttggagtcagtcagtattttgctggattatggcgctgaagtgagagtgatcaatctgatagggcagactccaatatcccgcctcgtggcattgcttgttcgcggactggggacagagaaggaagattcttgtttcgaactgctgcacagagctgtcggccattttgaactacgtaaaaatggcactatgccaagagaagtggcacgcgacccgcagctctgcgagaaattaacggtcctatgtagtgcccccggcacattgaagacattggcccgttatgctgtccgtcgatccttgggcctccagtatctcccagacgccgtcaaggggctcccactgcctgcttccctgaaggagtacctcctgttgctcgagtag

SEQ ID NO: 26783 - DNA, 549 bp, synthetic construct
  source 1..549: mol_type = other DNA; note = Synthetic coding sequence
atgcccatcccccccccccccccccccccccccggcccccccccccccccaaccttccaccaggctaataccgaacagcccaaactgagccgagacgaacaacgcgggcggggtgctctgctccaagatatttgcaaaggcactaagctcaagaaagtcaccaatataaatgatagatcggcacccatcctcgagacacccccacctcccccacccgtcatacggaatggggcacgggacgccccccccccaccacctccgtaccgcatgcacgggtctgaacctccaagccgcggcaagcctccaccacccccaagtcgcacccccgctggcccaccgcccccaccacctccccccctgagaaacggacaccgggacagcatcaccacagtgaggtccttcttggatgactttgagagcaagtattcctttcacccagtcgaagatttccccgcgccggaagaatacaaacacttccagagaatatacccgtccaaaactaatcgggcagcacgcggagcacctccactgccgcccatccttcgctag

SEQ ID NO: 26784 - DNA, 999 bp, synthetic construct
  source 1..999: mol_type = other DNA; note = Synthetic coding sequence
atggaccagcccgccggcctgcaggtggactacgtgttccggggcgttgaacatgcagttagggtcatggtgtcgggccaggttctagaattagaggtggaggacaggatgaccgcggaccagtggcgcggggaattcgatgcaggatttattgaagatctaactcacaagactggtaacttcaaacagtttaatatcttttgtcacatgttagagtcagccctgactcagagcagtgagtcagttactttggatcttctgacctacaccgatctggaatccctgcgcaatcgcaagatggggggtagacccggctcactggcccccagaagcgcccagctgaattcaaagcggtatctgattttgatttatagtgtggagttcgatcgaattcactatccactacctctcccgtatcagggtaagccagaccctgtcgtgctgcagggcattatcagaagcctgaaagaggaattgggtcgtctgcaggggctcgacggacagaataccagggacacaagagagaacgaaatatggcatctcagagagcagcagcagcaaagaaacaggctcggatccggaggttctggagatggcccgtccgtcagttggagtagacagacacagcccccagctgccttgaccggacggggggacgctcctaaccggtcgagaaatcgcagcagttcagtggattccttcagatcgcggtgctcctctgcctctagctgttccgacctggaggatttctccgagtctctgtctcgtggtggacataggagacgcggcaagcctccttcccccaccccgtggtctggatctaacatgaagagtcctcctgtagaacgatctcaccaccagaagtcccttgccaattcaggggggtgggtgccaattaaagaatactcttctgaacaccaggctgccgacatggcggaaattgacgccaggctcaaggctctgcaggagtacatgaacagacttgacatgcgaagctag

SEQ ID NO: 26785 - DNA, 516 bp, synthetic construct
  source 1..516: mol_type = other DNA; note = Synthetic coding sequence
atgagcagcaagcggaccaagaccaagaccaagaagcggccccagagagccacttcaaacgttttcgccatgttcgatcagagccagattcaggagttcaaggaggctttcaacatgatagatcagaaccgagatggctttattgacaaggaggacctgcatgatatgctggcctctcttgggaaaaacccgactgatgagtacctcgatgccatgatgaatgaggcaccaggacctatcaactttaccatgttcctgacaatgttcggcgagaagctgaacgggacagaccccgaggacgttattagaaatgcattcgcctgctttgacgaagaggccactggcaccattcaggaggattatctgcgagagctgttgacgaccatgggagaccgatttactgacgaggaagttgacgaactctatagagaggctcctattgataaaaaagggaatttcaattacattgagttcacacgtatcttaaagcacggggccaaggataaggatgactag

SEQ ID NO: 26786 - DNA, 2391 bp, synthetic construct
  source 1..2391: mol_type = other DNA; note = Synthetic coding sequence
atgagcctggacgacaacctgagcggcaccagcggcatggaggtggacgaccgggtcagcgctctcgagcaacggctgcaattacaggaagacgagttagcagtgctgaaggccgcactcgctgacgcactgcgaaggctcagggcatgcgaagaacagggggctgccctccgagccaggggtacccccaaaggaagagcccctccccgcctgggcaccaccgcctccgtttgtcaactcctcaagggcttgccaacccgcacacccttgaatgggtctggccccccgcgtagggtggggggatacgcaaccagcccatcgagtcccaagaaggaggcgactagcggacgctcgtccgtgcggcgatatctctccccagaaagactggctagcgtacgccgggaagatcctcgttctcggactacatctagcagctcaaattgctctgcaaagaaagaaggaaaaacaaaagaggtgatcttctccgtagaagacggatccgtgaaaatgttcctcaggggacgccctgtccctatgatgatccctgacgagctggcccctacatattctctagacacgaggagcgagctgcctagctgtaggctgaaactggagtgggtctacggctacaggggcagggactgcagagctaacttgtatctgctgcctaccggagagattgtgtacttcgtggcaagtgtggccgtcttatacagtgtcgaggagcagaggcaacggcactatcttggacacaacgacgacatcaaatgcctcgctatccatcccgacatggtaacaattgctacaggccaggtggccggcacaaccaaggaagggaaaccactgccgccacacgtgagaatttgggatagcgtgtctctgagtaccttacatgtgttaggtctcggagtcttcgatagggcagtgtgttgtgtgggattttctaaaagtaatggggggaatctgctttgtgctgtggatgagagcaacgaccatatgctgagcgtgtgggattgggccaaggaaacaaaggtggtggacgtgaagtgctctaatgaagccgtactggtcgccaccttccatcctactgatcccacggtcctgataacatgtggcaagagtcacatctacttttggaccctcgagggaggatcactcagcaagagacagggcctgtttgaaaagcacgagaaacctaagtatgtcctttgcgttacttttctcgaagggggagacgtggtgacaggtgattctggaggtaacctctacgtctgggggaagggaggcaataggatcactcaggccgtcctgggtgctcatgatggcggcgtgttcggtttgtgtgccctgagagatgggaccctggtgtctggcggggggcgcgaccggcgtgttgtgctgtgggggtccgactactccaagcttcaggaagtggaagtgcccgaggattttggacctgtcagaaccgttgcagagggccacggagacacgttatacgtgggaaccacccgtaactcaatcctccaaggatctgtgcatacaggcttcagcctgctggtccaggggcacgtagaggagctttggggattggccacgcacccttcaagagcacagttcgtcacatgtggccaagacaaattggttcacttatggtcaagtgactctcaccagcctctatggtcaaggatcattgaggatccagctaggtcagccggatttcaccctagtggctctgtgctcgcagtcgggactgtaacagggcggtggcttctgctggacacggagactcacgatctagtcgctatacatactgatggaaatgagcaaatcagtgtggtgagtttttctcctgacggggcatacctagccgtcggttcgcatgataacttagtgtatgtgtacactgttgatcagggcggtagaaaggtcagtcgactaggcaaatgttcaggacatagcagtttcatcactcatctggactgggcccaggatagcagttgcttcgttactaattctggggattatgagattctctattgggatccagccacgtgcaagcagataacatcagcagatgccgttagaaacatggaatgggccaccgccacatgtgtgctcggcttcggcgtctttgggatttggagcgaaggtgccgacgggacagacatcaatgccgtggctcgatctcatgacggcaagctgctcgcctctgctgatgacttcggtaaagttcacttgttcagctatccctgctgccagccacgcgctctctcccacaaatatggcgggcatagctctcatgtgaccaatgtggcatttctttgggacgattcaatggccctgaccacaggcgggaaggatacttctgtgctgcagtggcgcgttgtctag

SEQ ID NO: 26787 - DNA, 1059 bp, synthetic construct
  source 1..1059: mol_type = other DNA; note = Synthetic coding sequence
atggccctgctgggccaggccctgaagtggcagcagcaccagggcttactgcccccggggatgactatagatttatttaggggaaaagccgccgtgaaagacgtggaagaggagaaattccctactcagctgtcaagacatatcaagttcggtcagaaaagccatgtggagtgcgcccgattctcgcctgacgggcagtacctcgtgactggatccgtggacggtttcatcgaggtatggaattttaccacagggaagattcgaaaggaccttaagtatcaggcgcaggacaactttatgatgatggacgatgccgtactgtgcatgtgtttctccagggacaccgagatgctggctaccggagcacaggatgggaaaattaaggtctggaaaatccaatcagggcagtgcttgagacgattcgagcgcgcccattctaaaggggtgacctgtctgtccttttcaaaggactcatcccagatcttgagtgcttccttcgatcagacgattcgcatccacggactaaagtccggcaaaaccctcaaggagtttagggggcattcgtcctttgttaacgaagccaccttcacacaggatggacactacataataagcgcgagctctgatggaacggtgaaaatctggaatatgaaaaccaccgagtgttcaaacaccttcaaatcactgggatccaccgccggaacagatatcacagtaaactctgtgatccttctgccaaagaacccagagcattttgtggtttgcaaccggagtaacacagtggtgattatgaacatgcagggccaaatcgtacgatcctttagctcaggaaagcgcgaggggggcgattttgtttgttgcgcgctatcccccaggggggaatggatttactgcgtgggcgaagactttgttctgtattgcttcagtacggtgactggtaaacttgaacgcaccctgacggttcacgagaaagacgttatagggattgctcaccatcctcaccaaaaccttattgccacgtatagcgaagatggactgcttaagttgtggaaaccttag

SEQ ID NO: 26788 - DNA, 951 bp, synthetic construct
  source 1..951: mol_type = other DNA; note = Synthetic coding sequence
atgcagagctgggtgctgatcagcaaggagctgatcagcctgctgcaccttagtttgctgcacctggaggaagataagaccaccgtgtcgcaggaaagtagacgggcagagacactggtgtgttgttgtttcgacctgctcaaaaagctccgggctaaactgcaaagtctcaaagcggaaagggaagaggcccggcaccgggaggagatggcgctcaggggtaaggatgctgccgagattgtgttagaagctttctgcgcacacgcgagccaaagaatcagccaactagagcaagatctggcatcaatgcgcgagttccgagggttgctcaaggatgcacaaacccagctggttgggctccatgctaagcaggaggaactagtccagcagaccgtgtcactgacgtcaaccctacaacaagactggcgctcaatgcaactggattacaccacatggactgccctgctcagccggagcaggcagctgactgagaagttaaccgtaaagtcccagcaggcgctacaggagcgcgatgtggctattgaggagaagcaagaggttagccgggtgctggagcaagtttctgcccagctggaagagtgcaaggggcagaccgaacagctggagttggaaaacagcaggctggctaccgacctcagggcccagctccagatcctcgccaatatggattcccaactgaaggaacttcagagtcagcatacccactgcgcccaggacttggcaatgaaggatgagctactgtgtcagcttacacagagcaatgaagagcaggcagcccagtggcaaaaagaggagatggccctcaagcatatgcaggctgaactgcaacagcagcaggctgtgttagccaaggaggttcgagatttgaaagagacactggagttcgccgatcaagagaaccaagtcgcacacttagagcttgcctggtag

SEQ ID NO: 26789 - DNA, 597 bp, synthetic construct
  source 1..597: mol_type = other DNA; note = Synthetic coding sequence
atgaccctgcggtgcctggagcccagcggcaacggcggcgagggcaccagatctcagtggggcactgccggttctgctgaggagccgtctccccaggctgccaggctcgcaaaggctctgcgagagttgggccaaacaggatggtattgggggtccatgacagtcaatgaagcaaaggagaaactgaaagaggcccctgagggaacttttcttatacgggattcttctcacagcgattacctcttgacaatttccgtgaagacttcagcaggtccaactaacctgcgaatcgaatatcaggatggtaagtttagactcgattctatcatttgcgtgaagtctaaactcaaacagttcgatagcgtggtgcatctaatcgattattacgtacaaatgtgcaaagataaaaggacaggcccagaggcccctaggaatggcactgttcacctgtacctcacaaagcccctgtacacctccgccccctccctccagcacctgtgccgcctgaccatcaataagtgtaccggtgccatctggggtctccccctgcctaccagattaaaggattatctcgaagagtacaaattccaagtgtag

SEQ ID NO: 26790 - DNA, 591 bp, synthetic construct
  source 1..591: mol_type = other DNA; note = Synthetic coding sequence
atggtgccccggccctggagcggcagccccggccccggcgagtgcctccactctcttctctctgagagactgtggatctgtcgtgatattagcgcccaaagaagatccgctccaggaagccccagaccctccgactgccagcagctttctttcctccctgggaatcagcctacgtttttgtgcttacaggccctcgcagctctggtgcctggggtgacccaggtggacaataagagcggatttctgcagaagagaccccaccgccaacatccaggaattctcaagctgccccacgtccggctgccacaggcgcttgccaacggagcacagctgctgctacttgggtcagcggggcctacaatggagaatcaggtccagacactaactagttacctttggagccggcacctccccgtggaaccggaggaactccagagaagggcaaggcacctggaaaagaagttcctcgaaaatcccggacctgatttccaatcattattttcaccccagacttacctccgccaacggcggaacttcgtggagcaatgctacacgcactatgtgaagctgccaaccatcgggaagaactag

SEQ ID NO: 26791 - DNA, 1131 bp, synthetic construct
  source 1..1131: mol_type = other DNA; note = Synthetic coding sequence
atgcccgacgtggtgcagacccggcagcaggcctaccgggacaagctggcccaacagcaggccgcagcagcagctgcagccgcagcagcagcctctcagcaaggatcagccaagaacggagagaacacagctaacggagaggaaaacggcgcgcacacaatcgcccggatatggaacctcagcgaaaatagcaccagcggaagcacccagctcgtgctacgtcattgcatccgagaagggggccaggacgtgcccagtaacaaggacgttactagtctggactggaactctgaggggacactcctggcgacaggctcgtatgatggctttgcccgtatttggaccaaggacgggaatctggcttccaccttgggtcaacacaaaggcccaatctttgccctaaagtggaacaaaaagggcaactttattcttagcgctggagttgataagactacaataatctgggatgcacataccggagaggccaagcagcagttccctttccactccgcacctgccctggatgtcgactggcagtcaaacaacacctttgcaagctgcagtaccgacatgtgtatccatgtttgtaagttggggcaggaccgcccaatcaagacatttcaaggacacactaacgaagtaaatgccataaaatgggatcccactggcaacctcctggcttcctgctccgacgatatgaccttgaagatctggtcgatgaaacaagataattgtgttcatgatctccaggcacacaacaaggagatatatactattaaatggagtccaactggacctggcaccaataaccctaatgctaatctcatgctggcttcagcatcttttgactcaactgtcaggctgtgggatgtcgacaggggcatttgcatccatacacttacaaaacatcaggaacctgtctattctgtggcattttctcctgacggccggtatcttgcaagcggctcgttcgataagtgtgtacacatctggaacacccagactggtgccctggtgcattcttatagagggacaggaggcattttcgaggtgtgctggaatgcggccggagataaagtcggcgcatcagccagcgacggatccgtttgcgtgctcgatctgcgcaagtag

SEQ ID NO: 26792 - DNA, 1116 bp, synthetic construct
  source 1..1116: mol_type = other DNA; note = Synthetic coding sequence
atgcacatcaagagcatcatcctggagggcttcaagagctacgcccagcgcactgaagttaatgggttcgacccgttatttaacgcaatcaccggactgaatgggagtggcaaatctaacatcctggactcaatctgttttctcctcggaatctctaaccttagccaggttcgtgctagtaacctccaggacttagtgtataagaatggccaagccggtataacaaaggcctccgtttcaattacttttgataactcggacaagaaacagagtccgctggggttcgaagtgcacgacgaaatcacagtgaccagacaggtagtgattggggggcgaaacaaatatttgatcaacggcgtgaacgcgaataacacaagggtgcaggatctattctgcagcgtgggcctcaatgtgaataacccccatttcctgatcatgcaaggacgaatcacaaaggtgctgaatatgaagccacccgaaattctgagcatgattgaagaagccgccggaacacgaatgtacgaatacaagaagattgcagcacagaaaacaattgaaaaaaaggaagctaaacttaaggaaataaagacaatcctcgaggaggagatcaccccaactatacaaaagttaaaagaggaaaggtcttcttacctcgaataccagaaggtcatgcgtgagatcgagcacttaagtcggttgtatattgcttatcagttcctgcttgcagaggacaccaaagtccgcagtgcagaggaattaaaggaaatgcaggacaaggtaatcaagctccaagaggaactatcagaaaatgacaaaaaaattaaagctttgaatcatgaaatcgaagaactggagaaacgtaaggacaaagaaaccgggggcatcctgcgaagcctggaggacgctcttgccgaagcccaacgtgttaacaccaaaagccagagtgcctttgacttgaaaaagaagaacctagcttgcgaagaaagcaaacggaaggaactggagaagaatatggtggaggattctaagaccctggccgcaaaagaaaaggagaagataaagagaaaagctttctggaagagtgccggcagctgcttggtgatattagtggactag

SEQ ID NO: 26793 - DNA, 507 bp, synthetic construct
  source 1..507: mol_type = other DNA; note = Synthetic coding sequence
cacaagctgcagagcggcatcggccggctgatcctgaaggaggagatgaaggcccgatcctcgtcatatgctgacccttggacccctccgcggtcgagtacaagcagccgggaagccttacacactgccggctacgagatgagtctgaacggcagtcctaggtcccattaccttgctgattccgaccccctcatctccaaatcagcttccttgcccgcctaccgcagaaatggcctccatcggacgccttcagcagacctgtttcactatgactccatgaatgcagtaaattggggaatgcgcgagtacaagatttacccctatgagctactcctcgtgactactagagggcgcaatcgactgccaaaggatgtggataggacccggttggagcgtcacctctcgcaggaagaattctatcaggtctttggcatgacaatcagcgagttcgatcgactggcactctggaagcggaatgaactgaagaagcaagctaggttattctag

SEQ ID NO: 26794 - DNA, 1770 bp, synthetic construct
  source 1..1770: mol_type = other DNA; note = Synthetic coding sequence
atgagcgtgagcgtgcacgagacccggaagagccggagcagcaccggttcaatgaatgtcactctgtttcacaaggcctcccacccagattgcgtcctggctcacttaaatacactacgcaaacactgcatgttcactgatgtgacactttgggcgggcgatagagcttttccatgtcacagggcagtgctcgccgcttcctctagatattttgaagccatgttctcccacggtttgcgcgaaagcagagatgacacggtgaacttccaggacaacctgcatcctgaggtattagaactgctgctcgattttgcctacagctcccgcatcgctattaatgaggaaaatgcagagtcactgttggaggcaggtgatatgctccagttccacgacgtgcgggacgctgctgctgagtttctagagaaaaacctctttccgtctaattgccttgggatgatgcttttatctgacgcgcaccaatgtcggagactgtacgaattcagctggaggatgtgtcttgtccactttgagacagtccgtcagagcgaggactttaacagcctatctaaggatactctgcttgatctcattagtagcgacgagctagaaactgaagatgaaagggtggtttttgaggcaattcttcagtgggttaagcatgatctggagccccgaaaagtccacctgcccgaacttctccggagcgtgcgtcttgctctgcttccctccgattgtcttcaggaggctgtaagctcagaggccctgcttatggccgacgagcgcaccaagctgatcatggatgaagctctgaggtgcaaaacccgcatcttacagaacgacggcgtggtcaccagcccatgcgctcgcccccgtaaagccggccacactctcctaattttaggaggccagaccttcatgtgtgataagatttatcaagttgatcacaaggccaaagagatcatcccgaaggcggacctccctagtccaagaaaggagtttagcgcatccgctattgggtgtaaagtatacgtcaccggcgggagaggaagtgaaaatggggttagcaaggatgtatgggtgtatgacacagttcatgaggagtggtccaaggcggcacccatgctgatcgccaggtttgggcatggctccgcagagctagagaattgcctctatgttgttggagggcacacttcactggccggtgtgttccccgccagcccaagtgtgtcattgaaacaagtcgaaaaatacgacccgggggcaaacaaatggatgatggtggcgcccctcagggacggagtgagtaatgccgctgtggtatccgccaaactcaagctgtttgttttcggcggcacatctattcatagggatatggtctccaaagttcagtgttatgacccaagcgagaaccgttggaccattaaagccgagtgcccacagccctggcggtacacagcagccgccgttttggggtctcagattttcattatggggggcgatactgaatttacggccgcctcagcttatagattcgactgcgagaccaaccaatggacccggatcggagacatgactgcgaaaagaatgtcctgtcatgccctggcttcggggaacaaactgtacgtggtcggcggatactttggtactcaaaggtgtaaaactttggattgctatgatccaactagtgatacttggaattgcatcactacggtcccctactctctgataccaactgcatttgttagcacttggaagcacctgccagcatag

SEQ ID NO: 26795 - DNA, 1287 bp, synthetic construct
  source 1..1287: mol_type = other DNA; note = Synthetic coding sequence
atgagcatgctgaagcccagcggcctgaaggcccccaccaagatcctgaagcctgggtcgaccgccttaaagactccgaccgctgtcgtcgcccctgtggagaaaactataagcagcgagaaagcttcctcaacaccctcatccgaaacccaggaggagttcgtggacgattttagggtaggggagcgcgtgtgggtcaacggaaacaagccgggtttcattcagttcctgggggagacccagttcgcaccgggccaatgggccggtatcgtcctggatgagccaatcgggaaaaatgatggctcggtcgccggagtccgatactttcagtgcgaacctctgaagggcatctttactcgcccaagtaagctgacaaggaaagtgcaggccgaggacgaggcaaatggcctgcagaccacccccgctagtcgtgctacttccccattatgcactagtaccgcttcgatggtttcctcttcacctagcaccccctctaatatcccccagaaaccgagccagccggcggccaaggagcctagcgcaacaccccccatcagcaacttgactaagacggcctctgagtccattagtaatctgtcggaggccgggtcaattaagaagggcgagagggagttgaaaattggagatagagtcctggtgggcggcacaaaggcaggagttgttcggttcctcggggaaacggatttcgcaaagggcgagtggtgtggcgtggagctcgacgaaccgctagggaaaaacgatggagcggtcgcgggcactcgatattttcagtgtcaacccaagtacggtctgttcgctcccgttcataaagtgactaaaatcggcttcccctctacaactcccgctaaagccaaggctaacgctgtgaggcgtgttatggcaactactagtgccagcctcaagagaagcccatcagcctccagcctgagtagcatgagcagtgtcgcatcctcagtatccagcaggccaagtcggaccggcttgcatgtgctggagctcgaggcgaaaatggatcagctccgtactatggtggaagccgcggatcgcgaaaaggtggagctcctaaatcagctagaggaggaaaaacggaaagtagaggatcttcagtttcgtgtcgaggaggaatcaataactaaaggtgacttggagcagaaatctcaaataagcgaagatcctgaaaacgtaagaggccatcttaccgtttggatatttcccctattaaccaagattgaccaccggctgaaatgtcttttaatatactcgtag

SEQ ID NO: 26796 - DNA, 3483 bp, synthetic construct
  source 1..3483: mol_type = other DNA; note = Synthetic coding sequence
atggtggtgaccctgggccccggccccgactgcctgatcctggaggcctcaagacagccccagttggtgcccaagcccgagcgcatggcaagtgatggcgctagcgcactgcccggccccgacatgagtatgaagccttctgcagctccaagcccgagccctgctttgccttttctccccccaactagtgacccaccagaccacccccctcgtgagccaccccctcaacccatcatgccatctgtgtttagtccggataatccattaatgctttctgcctttccctcctcgctcctggtgactggcgacgggggcccttgtttgagtggagcaggcgccgggaaggtgatagtgaaagtgaagaccgaaggcggttctgctgaacctagtcaaactcagaattttatcctgacacagaccgcattgaattccacagcccccgggactccatgtggcggactagaaggccccgccccgccatttgtgaccgcttccaatgtgaagaccatactgccatctaaagctgtgggagtgagccaggagggtccacctggcctgcctccccagccccctccacccgttgcacaacttgtgccaattgtgcctcttgagaaagcatggccgggcccacatggcactacaggggaagggggacccgtcgccaccctgtccaagcccagcctgggagatcgctcgaagataagcaaagacgtttacgaaaactttcggcagtggcagcggtataaggcccttgcacggcgccatttgtcacaaagtcccgatacggaggccctaagttgcttcttgatccccgtgctccgctcactggcacgcctgaagcccacgatgaccctagaagaaggcctacctctggccgtgcaggagtgggaacatacaagcaacttcgatcgaatgatattttacgagatggcagagcgctttatggagttcgaggccgaggagatgcagattcagaatactcagttgatgaatggctctcagggcctttccccagccacccctttgaagttggatccacttgggcctctggcctctgaggtctgccagcagccagtgtatatcccaaaaaaagcggcttcgaagacccgagcacctcggagaagacagagaaaagcccagcgaccgccagccccagaggcaccaaaggagattcctccggaagccgtgaaagaatatgtggacattatggagtggctagtgggcacacatctggcaactggagagtctgacgggaaacaggaagaagagggacagcagcaagaagaggagggaatgtatccggatccaggattactttcatacattaacgagttatgttctcaaaaagtgtttgtcagtaaggtcgaggctgtgatacacccacaatttctcgctgacctcctctcacccgaaaaacaacgcgacccgctggcgctgatcgaagaactagaacaggaggagggactgactctagcgcagctcgtccagaagaggctgatggccctggaagaagaggaggacgctgaggctcccccctctttctcgggagctcaactcgacagctctccttctggcagcgtggaagatgaggacggagacggacgtttgaggccatcccctggcttacaaggagctggaggggcagcatgcctgggtaaggtatcatcgagtggcaaacgagcgcgggaggttcacggggggcaggagcaggcacttgatagcccccgcggtatgcacagagacgggaacactctgccttcgccaagtagctgggaccttcagcctgagttggccgcgccgcagggcacgccagggccactgggggtcgagaggaggggatccggcaaagttatcaatcaggtgagcctgcaccaagatggtcatctggggggggccggaccacctggtcactgtctcgttgctgaccggaccagcgaagctctgcccctgtgttggcaaggggggttccaacccgaatctacaccaagcctggacgccggactggcagagctcgcaccactgcagggacaggggctggagaagcaggtcctcggactgcaaaaagggcagcagactgggggacggggcgtgctgccacaaggtaaggagcccctggctgtcccctgggaaggaagttcaggcgctatgtggggtgatgacaggggtacgcctatggcccagagctatgaccagaatccctcaccaagagctgccggggaacgcgacgacgtgtgtttgtctccaggtgtctggttgagtagcgaaatggatgccgttggactggaacttccggtgcagatagaagaggtgatagagagcttccaggttgagaaatgcgtgactgaatatcaagaaggctgtcagggacttgggtcccgtggaaatatttcgctggggccgggggagaccctggtcccgggcgataccgaatccagcgtcatcccttgcggcggaaccgtggcagctgccgccctggagaaacgaaattactgctcactgcctggccccctgcgggccaatagtccgccccttcgtagcaaagaaaatcaggaacaaagctgtgagaccgtgggacatccatccgacctatgggcagagggttgctttccgttactggagtccggcgacagcacactgggaagtagtaaggaaactcttccccctacatgccagggcaacctattgattatgggaacagaggacgcttcctctttgcccgaagcttcgcaggaggcaggctcaaggggcaacagcttctccccacttcttgaaaccattgagccggtgaatattttggatgtcaaggatgactgtggccttcagctgagagtgtcagaggacacatgtccccttaacgttcactcttacgatccccagggcgaaggccgcgttgacccagacttgagcaaacccaaaaacctggcccccctgcaagagagccaggaatcgtacacaacaggaacgccaaaagcaacctctagccaccagggcttggggtcgaccttaccccgtcgtgggaccaggaacgctattgtgccacgcgaaacttcagtgtccaaaacccaccgctctgccgaccgcgccaaagggaaagagaaaaaaaaaaaggaagccgaagaggaggacgaggagctgtccaacttcgcctacttgctcgcctccaaactgagcctaagtccccgagaacatcccctttctcctcatcacgcctccggcggccaaggtagtcagcgggcctctcatctactgccagcgggagctaaaggcccttctaaattaccttatccagtcgccaagtctggaaaacgcgcactcgctggagggcctgcgccaaccgagaagacaccacactctggagcccagctgggagtgcctcgcgagaagccactggctctcggtgtggtgagaccttctcaacccaggaaacgccggtgtgattcctttgtaacaggcaggcgaaagaaacgcaggcgctcccagtag

SEQ ID NO: 26797 - DNA, 1548 bp, synthetic construct
  source 1..1548: mol_type = other DNA; note = Synthetic coding sequence
ctgaacagccagtgccggaacaagaaccccttcgccgccggcccccgcccgcctcaccatcagtttttccagaggccacaaattcaacccccccgggcaacaataccaaattcctccccctctattcgcccgggggcccaaacacccactgccgtctatcaggccaaccagcacatcatgatggtgaaccatctgcccatgccataccccgtcccgcaaggcccacagtactgcattcctcaatataggcacagtggtcctccatacgtcggacctccccagcagtatcctgtgcaaccgccgggacctgggcctttctaccccggcccaggcccaggggactttccaaacgcctatggtactccattttacccctcacagcccgtgtatcagtcagcccctattatcgtgccgacacaacagcaaccaccgccagctaagcgcgaaaagaagaccatcaggataagagatcccaatcaagggggcaaagacatcactgaggaaattatgagtggaggcggttctagaaatccaacccctcccatcggtaggccaacctcgacccctactcccccacagcagctgccgagtcaggtgccagaacattcacccgtggtgtacggtaccgtggaatccgcacatctcgccgcttctacaccagtgaccgctgcatccgatcagaaacaggaagagaaaccaaaacccgatcccgttctgaagagccctagccccgtcctgaggctggtgctctccggtgaaaagaaggaacaggagggacaaaccagcgagacaaccgcaatcgttagcattgcagaactgccccttcctccatctcccacgaccgtgtcttcagtggcgaggagcacaatcgctgcgcccacaagttccgccctgtcttcacagccaatttttacaacagcaatcgacgaccgctgtgagctgtcatctccaagagaggatacaattcctattccttcattaacttcctgtacagaaaccagtgatcctctacccacaaacgaaaacgatgacgacatttgtaaaaagccttgcagcgtggccccaaatgacatccccctcgttagcagcaccaacctgattaacgagatcaacggagttagcgaaaagctgagtgctaccgagtccatcgtggagattgtgaaacaggaggtgctgccgctgaccttggaactcgagatcctggaaaacccgcccgaggaaatgaaacttgagtgtattccggccccaatcacccccagtaccgtaccctcattccctcccacaccccctacgcctcctgccagcccgcctcacacgcccgtgattgtgcccgccgccgccacgacagtgtcctctccttcagcagcaatcacagtgcagcgtgtcctcgaagaagacgagagtatcagaacatgcctttccgaagatgccaaagagattcaaaataagatcgaggtggaggcagatggacagacagaagaaattttagactcacagaacttgaactccagaagaagcccagtgccagagacaagtaatgagtgttag

SEQ ID NO: 26798 - DNA, 204 bp, synthetic construct
  source 1..204: mol_type = other DNA; note = Synthetic coding sequence
atggccctgctggccgagcacctgctgaagcccctgcccgccgacaagcagatcgagacaggcccgttcctggaggcggtgagccacttaccacctttcttcgactgtcttggatctccagtgttcacccccattaaagctgatatcagcggtaacatcactatgcggaaactgcggctgcgaggtgtggaaggcctagcttag

SEQ ID NO: 26799 - DNA, 2418 bp, synthetic construct
  source 1..2418: mol_type = other DNA; note = Synthetic coding sequence
atgatgcagaacgtgcacctggcccccgagaccgacgaggacgacctatactctgggtataacgattacaaccctatttatgatatagaagagctagaaaacgatgccgcctttcagcaggccgtacgcacgagtcacggaaggcgccctcccagcaaaacttcactcgcgtcctccattggccgacctatgactggcgccatccaggatggggttactcggcccatgacagccgtgagggctgctgggtttaccaaggcagccctgcgcggctcagcattcgacccactttcccagtctcgcggaccagcgagcccactggaagcaaaaaaaaaagactcacctgaagagaagatcaagcagctcgagaaggaggtgaatgagctcgtggaggagtcttgcattgccaatagttgcggagatctcaaactggccctggagaaggcaaaggacgcgggccgcaaagaacgcgtactggttagacagcgggagcaggtgacaacacccgaaaacatcaacctggatctgacatatagcgtcctgttcaatttggcgtcacagtattctgttaacgaaatgtacgccgaggctctgaatacctatcaagtcattgtcaagaataaaatgtttagcaacgctgggatcctcaagatgaacatgggcaatatctacctgaaacagcgtaattattctaaagcaatcaagttctatcgtatggcactagatcaggtgccctcagttaataagcaaatgcggatcaagattatgcagaatatcggcgtcacctttatccaggctggacagtatagcgatgctataaacagttacgaacatatcatgtccatggcacccaaccttaaggcaggatataacctcacaatctgttattttgccatcggagatcgcgaaaaaatgaaaaaggcctttcagaaactgataactgtgcctctcgagatcgacgaagataaatatattagtccgtctgatgacccacacactaacctggtgacggaagcgatcaaaaacgaccacctgagacagatggaaagagagaggaaggccatggccgaaaagtatatcatgactagcgccaagctcatagcgccagtcattgagacctcttttgctgctgggtacgattggtgtgtggaagttgtgaaggcctctcaatacgtggagctggccaacgacctcgaaatcaacaaagccgttacgtatctcagacagaaagattacaatcaggccgtagaaatcttgaaggtactggagaaaaaagactcaagagtgaaatctgccgcagccaccaaccttagcgccctgtactacatgggaaaagatttcgctcaggccagctcctatgccgatatagctgtcaattctgataggtacaacccggcggcactgaccaataaaggaaacaccgtgtttgccaacggggactatgaaaaggccgccgaattctacaaggaagccctgcggaatgattcctcgtgtacagaggccctgtacaatattggattaacctacgaaaaactgaataggttggacgaagccttggattgtttcctcaaactgcatgccattttgagaaactcagccgaggtgctgtaccagatcgctaatatctatgagctgatggaaaatccttcacaggccatcgagtggctgatgcaggtggtgtccgtcataccaactgatcctcaggtgctaagtaagcttggggagctttatgatcgcgagggcgacaaaagccaggcattccagtactactatgagtcttatagatacttcccttgtaacatcgaggtgatcgagtggcttggagcgtactatatagatactcaattttgggaaaaagccattcagtacttcgaaagagcatctctgattcagccgacacaggtaaagtggcagttaatggtagccagttgctttcgtcgttccggcaactatcagaaagctcttgatacctacaaggatactcaccgaaagtttcctgaaaatgtggagtgcctcagattccttgtcagattatgcacagatctgggcttgaaggacgcccaggagtacgcacggaaactaaaaaggctggaaaaaatgaaagaaatccgggagcagcggattaaatccgggcgggacggctccggaggctctcgcggaaaacgggaagggtccgctagcggcgattctggtcagaattattcggcaagttcaaaaggggaacgccttagtgcccggttgcgggccttgccagggaccaatgaaccctatgaatcttcctctaataaggaaatcgacgcgagttacgtggatcctctcggccctcagattgagaggccaaaaaccgccgctaaaaaacgcatcgacgaggacgacttcgcggatgaggagttgggtgacgatcttctgcccgagtag

SEQ ID NO: 26800 - DNA, 765 bp, synthetic construct
  source 1..765: mol_type = other DNA; note = Synthetic coding sequence
atggcccccggcagcttcgccgagtacaccgtggtgcccgccagcatcgcaacccccgtgccctcagtcaaaccagaatatttgactctgcttgtgtcaggcactacagcttatatttccctgaaggagctgggcggacttagcgaagggaagaaggtgttagtgacagctgctgcaggtggcacgggacaatttgctatgcagctgagtaaaaaggccaagtgtcacgtgattggcacctgcagttctgatgaaaagtcagcctttcttaaaagccttggttgtgataggccaatcaattacaaaacagaacctgtcggtactgtgctcaagcaggaatatccagagggcgtcgatgtggtgtatgaaagtgtggggggcgcaatgtttgatctggctgtagatgccctggcgacaaagggacgcctgattgtaatcggattcatttctggatatcagacgcctaccgggctgtcgccagtaaaggccggcacgctccccgccaaactccttaagaagagcgcatccgtgcaggggtttttcctgaatcactatctctctaagtaccaggcagccatgagccacctgctcgaaatgtgtgtgagcggcgacctcgtgtgcgaggtcgacctgggagatctgagcccagaggggcgctttacgggattagagagcatcttcagggccgtaaactacatgtatatgggcaagaacacagggaaaatagttgtggagttgccccacagcgtgaatagcaagctgtag

SEQ ID NO: 26801 - DNA, 1212 bp, synthetic construct
  source 1..1212: mol_type = other DNA; note = Synthetic coding sequence
atgcaccaccccatccagatgaagcccgccgacagcgagaagagcaatgctgtagaagatcggaagctctttataggcatggtgtccaagaagtgtaacgaaaacgacattcgtgtgatgttctcccctttcgggcaaattgaggagtgtcgcatacttcgggggcccgacggactctctcgggggtgtgcctttgtgacattctcaacacgcgctatggcacagaatgccatcaaggctatgcatcagtcacagaccatggaaggctgcagttccccaatcgtggtgaaattcgctgatacacagaaagataaagaacaacggaggctgcagcagcagttggcccagcaaatgcagcagttaaacacagcgacttggggaaacctgactggtctgggcggtttgacaccacagtacttggccttgctacagcaggcgacaagcagttctaacctcggcgcattctctggcatccagcagatggccggcatgaatgcactgcaactgcaaaacttagcaactctggccgctgcagcagccgctgcccaaacaagtgctacatctaccaatgccaacccgctgtctaccaccagtagcgcgctgggcgcactgacatcaccggtggcggcatctactccaaactctaccgctggggccgctatgaattcactcacctcacttggtaccctccagggactcgctggcgcaaccgtaggtcttaataatattaatgcgttggctgtggcacaaatgctgtccggcatggccgccttgaatggagggctgggcgcaacaggactgaccaacggtactgcaggaacaatggatgccctcacccaggcctatagcggaattcagcagtacgcagccgctgcgctgcctacactatatagccaaagtctgctgcaacagcagagcgcagccggcagccagaaagaaggtccagaaggcgccaaccttttcatttaccatcttccacaggaatttggagatcaggacatccttcagatgttcatgccattcgggaacgtcatcagcgcaaaagtgtttatcgataagcagacaaatttatctaaatgctttggctttgtgtcatacgataatccagtctccgcccaagccgctatccaggccatgaatggattccagattgggatgaagagactcaaggtgcagctgaagcggagcaaaaacgattccaagccttattag

SEQ ID NO: 26802 - DNA, 1332 bp, synthetic construct
  source 1..1332: mol_type = other DNA; note = Synthetic coding sequence
atggccgagttcctgaagcaggtgaagccctacgtggaggagggcttgcacccccagattataattcgggccttccgcacagccacacagctcgcggttaacaagataaaggagatcgcagtgacagtaaaaaaagccgacaaggtggagcagcgaaaactcttggaaaagtgcgcaatgaccgcactatcctcaaaactgatatcccagcagaaagcgttttttgctaaaatggttgtggatgcggtaatgatgctagacgacctgctgcagctaaagatgatcggcataaagaaggtccagggaggggccttggaagactcacagcttgtagccggggtggctttcaagaaaacgttctcctatgctggttttgagatgcagcctaagaagtaccataatcctaagatagcattacttaacgtggagctggagttaaaagccgagaaggataacgccgagatccgggtgcatacagttgaagattaccaggccattgtagacgctgaatggaatatcctctatgacaagttggagaagattcatcatagcggtgccaaggtggtactgagcaaactcccaatcggagatgtagccacccagtattttgcggacagagatatgttttgtgctgggcgtgtgcctgaggaagacctgaaacgcaccatgatggcttgcgggggaagcatccagactagtgttaatgccttatcagctgatgtcctgggccggtgtcaggtgtttgaggaaacgcagataggaggcgaacgctataactttttcaccgggtgtccaaaggcaaagacttgtacttttatactgcgcgggggggctgaacagttcatggaggagactgaaaggtctctccacgacgctatcatgattgtaaggcgggccattaaaaacgacagcgtggtcgcaggcggcggtgccatcgaaatggagctctccaagtacctgcgggactacagccgcacaataccaggaaagcagcagctcctaatcggcgcctatgctaaggcgctcgaaattattccacggcagctttgtgacaacgcaggctttgacgcaaccaatatcctaaataaactgagggccaggcacgcccagggcggtacatggtacggagtcgatattaataatgaagacatagcagacaactttgaagcttttgtgtgggaacctgcaatggtacgcatcaatgcccttacagctgcctctgaagccgcttgtctgatcgtcagcgtggatgagaccatcaagaacccgagaagcaccgtggacgcgcctactgccgcaggccgtgggagagggcgagggcggccccactag

SEQ ID NO: 26803 - DNA, 2193 bp, synthetic construct
  source 1..2193: mol_type = other DNA; note = Synthetic coding sequence
atgcagctgttcgagcagccctgccccggcgaggacccccggcccggaggccagatcggagaggtagagttgtccagctacactcctccagctggcgtgcctggcaaaccagcagctccccactttcttcctgtcttatgttccgtgagcccctctggatccagggtcccccacgaccttctcggggggagtggcggctttactctggaagacgcgctctttgggctcctcttcggggcagacgccacattgctccagtcgccagtggttttgtgtgggctgccggacgggcaattgtgctgtgttattctgaaggcactggttacctcacggagcgcacccggcgatcccaacgctttggttaagatccttcatcatctcgaggaacccgtgatctttatcggcgcactcaaaaccgagcctcaggcagctgaggctgccgaaaacttcctgcctgacgaagacgtgcattgtgactgtctggtagctttcggtcaccacggacggatgttagctatcaaagcctcttgggatgaatcaggtaaattggtgcccgaattaagagaatactgtctgcccggacccgtgctctgcgccgcctgcgggggcggaggtcgcgtgtaccactccaccccatctgatctgtgcgtggtggatctcagcaggggaagtaccccacttgggccagaacaacctgaagaagggccaggaggactcccgcccatgctttgtcccgctagcctaaacatttgctccgtggtgagcctgtcagcctctcctagaacccatgaaggaggaacgaagttgctggccctgagtgcgaagggacggttaatgacatgcagcctggacctcgacagcgaaatgccgggacctgctagaatgacaaccgagagcgctggccaaaagatcaaggagctgctttcggggatcggaaacatctccgagcgcgtgagttttcttaaaaaagctgtggaccagcggaacaaagcccttacctctcttaatgaggcaatgaacgtgagttgtgccctccttagttcagggacagggcccagacctatctcttgtaccacctcgaccacctggtctcggttgcagactcaagatgttctcatggcaacatgtgtactcgagaactcctcgagtttcagcctcgaccaagggtggactttgtgtatccaggtcttgacatcgtcatgtgccctggacctcgattctgcttgctctgccattacctatacaatccctgtggaccaactggggcctggcgcacggcgcgaggttactctgccattaggcccaggagagaatggtggtctggacttacctgtgaccgtgtcgtgtacactcttctactctctgagggaagttgtcggtggggcgctggcaccgagtgatagcgaggatcctttcttggacgagtgtccttctgacgtcctgcccgaacaagaaggggtgtgtctgcccctgtcccgacatacagtggatatgctacagtgccttcgcttccctggactagccccaccacacacaagggcacccagcccactcggtccgaccagggaccctgtggctacattcttagaaacgtgcagagaacccggaagccagcctgcgggaccagcaagtcttagagccgaatacctgcctccctccgtagctagcattaaagtctctgccgagctcctacgcgctgccctgaaggatggccattctggcgtgcccctgtgttgcgctaccctgcaatggctacttgctgaaaacgcagcagtcgacgttgtgagagctagagcactgagcagtatccagggcgtcgcacctgacggagcgaacgtgcacttgatcgttcgcgaggtggctatgacagatctttgccctgccggcccaattcaggccgttgagattcaggtggagtcctcatcgttggcagatatttgtagggcccatcatgctgtcgttggaaggatgcagaccatggttacagagcaggcgactcagggctcttcagcgcccgatttacgcgtacagtacctgaggcagatccacgcaaatcacgagaccctccttagggaggttcagactctgcgtgataggctgtgcactgaggatgaagccagcagttgcgccacagcacagaggcttttgcaagtttacaggcagcttagacatccaagcctgattctgctgtag

SEQ ID NO: 26804 - DNA, 4179 bp, synthetic construct
  source 1..4179: mol_type = other DNA; note = Synthetic coding sequence
atgagcatgctgaagcccagcggcctgaaggcccccaccaagatccttaagccaggctcgacggccttgaaaacgcccacggcggtagtcgcaccagtagagaaaaccattagtagcgagaaggctagctctactccttcaagcgagacgcaagaggagtttgttgacgattttcgggtaggggagagggtgtgggtcaacggaaataaacccggatttatacaatttttgggtgagacacagttcgccccaggacagtgggccggcattgtcttggatgagcccattgggaagaatgacgggtcagtggctggggttagatatttccagtgtgagccacttaaaggcattttcacaaggccttctaaactcacacgaaaagttcaggctgaggatgaggcaaatggcctgcagactactccggctagcagggctacgtcccccctctgtacgagcactgcttccatggtctctagcagcccctccacacctagtaatatacctcagaagccgtcccagcccgcggcgaaggagccttcagcaaccccccccatcagtaaccttaccaaaacagcgagcgaatctatatcaaacctgagcgaagccgggagcatcaaaaagggcgaaagagagcttaaaatcggcgatcgcgtcctggtaggcggtacgaaggccggcgtcgtccgatttttaggcgaaacagattttgcaaagggtgaatggtgtggtgtcgaattggacgagccactgggaaaaaatgacggcgccgttgcaggaactagatactttcagtgtcagcccaaatatggtctgttcgcaccagtgcataaggtgactaagataggattcccttctactaccccagcaaaagcaaaggccaacgctgtcagacgggtcatggccacaaccagtgcaagtctcaaacgcagtccatcagcatcaagtctctctagcatgagctcagttgcttctagcgtctcctctcgtccttccaggaccggactcttgacggaaaccagctcccggtacgcccgcaaaatttcaggcacaacggctctgcaggaagctctcaaagaaaaacagcagcacattgaacagctgctggcagagagagatctggagcgtgccgaagttgctaaggccacttcccacgtcggggagattgaacaggaactcgccttggcacgtgacggacacgaccaacatgttctggagctcgaggcaaaaatggatcagcttagaacaatggtcgaggccgcggaccgagaaaaagtagaactcctgaaccagctggaggaggagaagcgtaaggttgaagatttgcaatttagggttgaagaggaaagtatcaccaagggcgatctcgaggtggctaccgtgagtgaaaagtctcggatcatggaacttgaaaaagatcttgcattgcgtgtccaggaggtcgcggagcttagacgccggctcgagtctaacaaacctgccggagatgtggacatgagtttgagcctactccaggagatcagctccctgcaggagaagttggaggttaccagaaccgaccatcagagagaaattacctcacttaaggaacactttggagcgcgcgaagagacccaccagaaggagataaaggcgttatacactgcgaccgagaagctttctaaagaaaacgagtccctgaagtcaaagctggagcacgctaataaagagaattctgatgtgatcgctctctggaaatccaaactcgaaaccgccattgccagtcaccagcaagctatggaggagctcaaggtaagcttctccaaaggattgggcaccgagaccgctgaattcgctgagctcaagacacaaatcgagaaaatgaggctggattaccagcatgaaattgaaaatttgcagaatcagcaggactccgaacgggccgcccacgccaaggagatggaggctctcagagccaaactcatgaaggttatcaaggagaaagagaactccctggaagctatccggtctaaacttgataaagctgaggatcagcaccttgtagaaatggaggataccctgaataagttgcaggaggcagaaattaaggtgaaagaattagaggttcttcaggcaaagtgcaatgagcagacaaaggtcatcgacaacttcacttctcagcttaaggccactgaggagaagctgctcgacttggatgccctgaggaaagcatcatccgaaggcaagagcgaaatgaagaaactgcgccagcagctcgaagctgcagagaaacagatcaagcacctggagatcgaaaagaacgccgagagttctaaagcttcgtcgatcacccgagaacttcaaggcagggaactcaagctgacaaatttgcaggaaaacctgtccgaggtgagccaggttaaagagacattggaaaaggagctccaaattctgaaggaaaagttcgccgaagcctccgaggaggcagtgtccgtgcagaggtccatgcaggagacagttaataagctgcaccagaaagaggaacagtttaacatgctctccagtgatctcgaaaagctccgcgaaaatctggccgacatggaagccaagttcagagagaaagatgagcgagaagaacagctcatcaaagctaaggaaaagctggagaatgacatagctgagataatgaaaatgagcggcgacaatagcagtcaactgactaaaatgaacgacgagcttagactaaaggagcgagacgtcgaggaactgcagctcaaattgacaaaagctaatgaaaacgctagcttcctgcaaaagtccattgaagacatgaccgtcaaggctgagcagtcacaacaggaggcagccaaaaagcatgaggaggagaagaaagaattggagaggaagctctccgatctcgagaagaaaatggagaccagtcacaaccaatgtcaggaactaaaggctcggtatgaacgagcaacttcagaaaccaaaacaaaacatgaggaaattctgcagaatctgcagaaaacccttctggacacagaagacaagctcaaaggggcgcgtgaggagaactcaggtctcctgcaagagcttgaagagctgcgcaagcaggcagataaagccaaagccgcccagacagccgaagatgcgatgcagatcatggagcaaatgaccaaagagaagaccgagacacttgcaagtctggaggataccaagcagacgaacgcaaaactgcagaatgaactggatacattaaaggaaaacaacttgaagaatgttgaggaactcaacaaaagtaaggagctattgaccgtggagaatcagaagatggaggagtttaggaaagagattgaaactttgaagcaggccgccgctcagaagagccaacagttatcggccttacaggaggaaaatgtgaaactcgctgaagaactgggtcgcagtagagacgaagttaccagtcaccagaagctcgaagaagaacgaagcgtgctgaataatcagctgctggagatgaagaaacgagagagcaagttcattaaagatgctgacgaggagaaagcatcccttcaaaaatctatttctattactagcgctttgcttaccgaaaaggatgccgagcttgagaagctcagaaacgaggtgactgtgttgagaggagaaaatgcttctgccaagtccttacattccgttgtacagaccttagagtcggataaggttaagctggaactgaaggttaagaacttggaactgcaacttaaggaaaacaaaaggcaattgtcctctagctcggggaacacggacacacaagccgatgaggacgaacgggcccaggagagtcaaattgactttttgaactcagtcattgtggacctccagcggaagaatcaagacctgaagatgaaggttgagatgatgagcgaggcggcactaaacggaaacggagatgacctaaataactatgactcagatgaccaggaaaagcagagtaaaaaaaagccacggctattctgcgacatctgtgattgcttcgatctgcacgacactgaggactgccctactcaggcacagatgagcgaagaccccccacactcaactcaccatggctctcggggggaggagcgaccatactgcgagatctgtgaaatgtttgggcactgggccacaaactgcaacgatgacgagaccttttag

SEQ ID NO: 26805 - DNA, 492 bp, synthetic construct
  source 1..492: mol_type = other DNA; note = Synthetic coding sequence
atgttccggaagatcggcatcgaggccctgaagcaggtgaccaagagatatgctcggaagcaaaatcgatgggtgaagaataggtttctgtcaagacccggacctatagtcccccccgtgtatgggctcgaggtcagcgatgttagtaaatgggaggagagcgtgttggaaccagccttggaaattgttcagtctttcatccaggggcataaaccaacagccacacctataaagatgccttacaacgaggccgagaacaagagatcttatcacctgtgcgatctctgtgacaggataattataggagatcgcgagtgggcagcgcatataaagagtaaatctcacttaaaccagctgaagaagcgtcgaaggcttgacagtgatgcagtcaacacaattgagtcccagtctgtgagcccagaccataataaagagccgaaagagaagggatctccagggcagaacgaccaggagcttaaatgtagtgtttag

SEQ ID NO: 26806 - DNA, 1602 bp, synthetic construct
  source 1..1602: mol_type = other DNA; note = Synthetic coding sequence
atggccagccccggcaaggacaactaccggatgaagagctacaagaataacgctctgaatccagaagagatgcgacgaaggcgcgaggaagaaggcatccaactacggaaacagaagagggagcagcagttgtttaagagacgaaacgtggagctgattaatgaggaagccgcaatgttcgattccttgctgatggatagctatgttagctccacgacaggtgaaagcgtgataacacgagaaatggtggaaatgctattctcagatgattcggacctgcaacttgcaacgactcagaagtttcggaagctactgtctaaggagccctcaccccctatagatgaagtgattaacacaccacgtgtggtagatagattcgttgagtttctgaaacgtaacgagaattgtaccctgcagtttgaagcggcgtgggcactcacgaacatcgccagtggcacatcccagcagaccaaaatagtcattgaagccggggccgtgccaatatttatcgagctgctcaactcggatttcgaggatgttcaagagcaggcagtgtgggcactggggaacatcgccggggactcgtcggtctgtcgcgattacgtgttgaattgctctatcctcaaccctctcctgaccttgctgacaaagtccaccagactcacgatgacacgcaacgccgtgtgggcactgtccaatctgtgtagaggaaagaaccctccacccgaatttgcgaaggtgagcccttgcctgcctgtcctgagtaggctcttattctcttcggacagcgacctcctggccgatgcgtgctgggctctgtcatatctctccgacggaccaaacgagaagattcaggcggtgatcgacagcggagtgtgcaggcggcttgttgagctgctcatgcacaacgactacaaagtggcaagccctgccctgagagctgtcgggaacatcgtgacaggcgatgacatacagactcaagtcatcctcaactgcagtgcactaccatgcttacttcacctcctatcctcccccaaagagtctatccgcaaagaagcatgttggacaatttctaatatcacggccggcaatagggcacagattcaggccgtcattgatgccaatatcttccctgtcttgattgagatcttgcagaaagccgaattccgtactcgaaaggaggcggcttgggccattacaaacgccacttccggtgggaccccagagcagattagatatctcgtttcgctcggatgcattaaaccgctgtgtgacttgctaacagtgatggacagtaaaatcgtgcaggtcgcactcaatgggctggagaatatccttcgcctgggggagcaggaaggaaaaaggtcgggcagcggcgtaaacccttactgcggactcatcgaggaagcatacggattggacaagatagagtttctccagagtcacgaaaatcaggaaatttaccagaaggccttcgatctgatagaacattacttcggtgtggaggatgacgattcctcgttagccccccaggtggatgagactcagcaacagttcatattccagcagccggaagcacctatggaagggttccagctctag

SEQ ID NO: 26807 - DNA, 993 bp, synthetic construct
  source 1..993: mol_type = other DNA; note = Synthetic coding sequence
atggagcggttcatggagcaggtggtgttcaagtacctgcgggccgaacctgaggaccactacttcttgatgacagagcctccccttaatacaccagagaatagggaatacctggcagaaatcatgtttgagtctttcaacgtgcctggtctctacattgccgtccaggctgtgttagctttggccgcaagctggacatcccgccaggtcggcgagcgaacgctgaccggaatcgttattgatagcggcgacggagtgacgcacgtgattcccgtggctgaaggctacgtcatcggctcttgcataaagcacatccccatagctggacgggacattacttattttattcagcagcttttgagagaacgcgaggtagggataccaccggagcagtctctggagaccgcaaaggccatcaaggagaagtattgttacatctgccccgacatagttaaggaattcgccaaatatgatgtcgacccacggaaatggatcaagcagtacaccggaattaacgccatcaatcagaagaaatttgtgatagacgtggggtacgagcggttcctggggccggagatcttctttcatccagagtttgccaaccctgacttcatggaatcaatttccgatgttgttgatgaggtaattcagaattgtcccattgacgtaagacgacccttgtacaaaaacgtagtactctccggggggtccactatgttcagggatttcggaaggagactgcagcgagaccttaagcgcgtggtggatgccagattaaggctcagcgaggaattatcaggcggccgaataaagcccaagcctgtcgaagtccaagtggtcacccaccacatgcagaggtacgcggtgtggtttgggggttctatgctggccagcacaccggaatttttccaggtgtgccacactaaaaaggattatgaggagtacgggcctagtatttgtagacacaaccctgtgtttggggtcatgagttag

SEQ ID NO: 26808 - DNA, 576 bp, synthetic construct
  source 1..576: mol_type = other DNA; note = Synthetic coding sequence
atgagccgggagcggggcagccggagcgaggagcccggcgccggcaaccgggaaagcggatccagagagccaggtctcgccgccgccgccatgtccaccgtggatcttgcccgcgtaggagcttgtattctgaaacatgccgttacaggggaggccgtggagctccgatcattgtggagagaacacgcatgtgtagtggctggactcaggcgcttcggatgcgtggtctgtcggtggattgcgcaggacttgagcagcctggccgggctgctggatcagcacggtgtgcgacttgtaggtgtgggtccagaagccctgggcctccaagaattcctcgacggggactactttgccggggagctgtacctggacgaatccaagcagctgtataaagagttagggttcaaacgatataactctcttagcatcctcccggcagctctgggcaagcctgttagagacgttgctgctaagtcacccggggactacgtacctaaagagcatattcttcaagtcctcgggattagcgccgaggtatgcgcctctgatcctcctcagtgcgaccgggaggtctag

SEQ ID NO: 26809 - DNA, 1050 bp, synthetic construct
  source 1..1050: mol_type = other DNA; note = Synthetic coding sequence
aacaccatccacgacgtgctggacgtggaggccgccgtggtgaacctggacaactctgtcgtagatctcgagaccctccaggccctatatgaaaacagagctcaatcagacgagcttgagaagatcgaaaaacacggccgaagcagtaaggataaggaaaatgctaaatctctggacaaaccagaacagttcctctatgaactaagccttataccaaatttcagcgagcgggtcttttgcattttatttcagagtacatttagcgaatcgatctgctccatccgaagaaagcttgaactgttgcagaaactgtgtgaaaccctgaaaaatggacctggcgtcatgcaggttctgggcttggtcctcgcatttggtaactatatgaatggcgggaataagaccagaggccaggctgacgggtttggcctcgacatactccctaagctgaaggacgtgaaaagttcagacaactcaagaagcctcctcagttatattgtgtcttattatctgcgcaatttcgatgaagacgctggaaaagaacaatgtctattccctctgccggagccccaggacctgttccaggcctcgcaaatgaagttcgaggactttcagaaagatctccgtaagcttaagaaagacctgaaggcatgtgaggtggaggcaggcaaggtttaccaggtgagttcgaaggaacacatgcagccgtttaaggaaaatatggaacagttcatcattcaggcaaagattgatcaggaggctgaagaaaattctttaactgaaacacataagtgttttctagagacaaccgcctatttcttcatgaagcctaagcttggagagaaagaagttagtccaaatgcatttttcagcatttggcacgagtttagcagcgatttcaaagacttttggaagaaagagaataagctcctgttgcaggaacgcgttaaggaagcggaggaagtctgccgccaaaagaaaggcaagtcgctgtataaaataaaaccaagacatgactcgggtattaaaaacaataattctatgcatacatag

SEQ ID NO: 26810 - DNA, 570 bp, synthetic construct
  source 1..570: mol_type = other DNA; note = Synthetic coding sequence
atgaccgccagcgccagcagcttcagcagcagccagggcgtgcagcagccttccatctatagcttctcccagatcacaaggagcctgtttcttagcaatggcgtggccgccaatgacaagcttcttttatcgagtaatcgcataacagccatcgttaatgccagcgtggaaggtcagagaattctgagaggcatccagtacattaaagtccctgttaccgatgcaagggattcacgcctctacgacttctttgaccctattgcagatctcatccacaccattgacatgcggcagggtcgcactctcctgcattgtatggctggggtgtctaggtctgccagtctgtgtcttgcctacctgatgaagtaccactccatgagtctgttagatgcccacacatggaccaagtcacggagacccataattaggcccaataacggattttgggagcagctgatcaattacgaattcaagcttttcaataacaatacggtgcggatgattaactctcctgttggcaatattcccgatatttatgagaaagacctgaggatgatgatcagcatgtag

SEQ ID NO: 26811 - DNA, 549 bp, synthetic construct
  source 1..549: mol_type = other DNA; note = Synthetic coding sequence
atgagcggccggagcgtgccccacgcccaccccgccaccgccgagtatgaatttgcgaatccttctcgattaggggagcagcgcttcggcgaagggctgctgccagaggagatccttacacccacgctttaccatggctactacgtcaggccacgtgccgctcccgccggggagggtagccgtgccggagcctctgagctgaggctgtcagagggaaagttccaggctttcctggatgtgtcccactttacccccgatgaagttacagttagaaccgtggataatctgctggaagtgagcgcccggcatccccagaggctcgaccgccacggttttgtctcaagagaattttgcaggacttacgttctaccagccgacgtcgacccgtggcgggtgcgcgccgctctcagtcacgatggcattctgaacctggaggctccaagagggggacgtcatctcgacacagaggtgaatgaagtgtacatctcactgctacccgctcctcctgaccccgaagaggaagaggaagctgcaatcgtggagccttag

SEQ ID NO: 26812 - DNA, 387 bp, synthetic construct
  source 1..387: mol_type = other DNA; note = Synthetic coding sequence
atggtgttccggcggttcgtggaggtgggccgggtggcctacgtgagctttggtcctcacgccggaaaactcgtggctatagttgatgtgatagatcagaatcgagcgcttgtcgacggaccctgcactcaagtacgacgccaagccatgccttttaaatgcatgcagctcacagactttattttaaagtttcctcatagcgcccaccagaaatatgtgcgccaggcttggcagaaggccgatattaacacaaaatgggcggccacccggtgggccaagaaaatcgaggcacgcgagcgaaaggccaagatgaccgacttcgacagattcaaggtaatgaaggctaagaagatgagaaaccggattatcaaaaatgataccaggtag

SEQ ID NO: 26813 - DNA, 492 bp, synthetic construct
  source 1..492: mol_type = other DNA; note = Synthetic coding sequence
atgttccggaagatcggcatcgaggccctgaagcaggtgaccaagcgctatgcacgaaaacagaatcgctgggtaaagaatcgctttctctccaggccgggaccaatcgttcccccagtatatggtctggaggtaagtgacgtatccaaatgggaggagtctgttctggaaccggcactggagatcgttcagtcctttatccaagggcacaaacccacagcaactccaatcaagatgccctacaacgaagccgaaaacaagaggtcatatcatctctgtgatctttgtgaccgcatcatcataggggatcgtgagtgggccgctcacatcaaaagtaaatcccacctcaaccaactgaaaaaaaggagacgcttggattccgacgccgtgaatacaatagagagtcagagcgtgtccccagaccataacaaggagcctaaggaaaagggctcccccggacagaatgatcaggagctcaagtgtagtgtgtag

SEQ ID NO: 26814 - DNA, 1224 bp, synthetic construct
  source 1..1224: mol_type = other DNA; note = Synthetic coding sequence
atggccgccgagctgtacgcccccgccagcgccgccgccgccgacttagctaatagcaacgctggggccgccgtgggccggaaggctggcccaaggagtccacctagtgcgccagcacccgcaccaccacctccagccccagccccgcccacccttggtaacaaccaccaggagtctcctggatggcggtgctgtcgcccaacccttcgtgaacgcaatgcactcatgttcaacaatgagctcatggctgacgtgcactttgtagtgggtcccccaggggcaacacggactgtacccgcccacaaatatgtcctggcggtcggtagcagtgttttttacgctatgttttatggagatctagccgaggtgaagagcgagatccatataccagacgttgaacccgctgcttttctgatcttgctgaaatatatgtattccgatgagattgatctcgaggccgacactgtgcttgccactctgtatgccgccaagaaatacattgtccccgccttggccaaagcctgcgtcaactttctggagacatccctggaagcaaagaacgcttgcgtactgctgtcacagtctaggctgttcgaggaaccggagctgacacaaaggtgctgggaagttattgacgcccaggccgaaatggcgttgaggtctgaaggcttttgtgaaatcgatcggcaaactttagaaatcattgtgaccagagaagctctgaacactaaagaagctgttgtgtttgaggctgtcctgaactgggcagaggccgaatgcaagcgacagggcctccccataactcctcgaaataagcgacatgttcttggccgcgccttgtaccttgtccgtatccccacaatgactttagaggaattcgccaatggcgccgctcagagtgacatattgaccttagaggaaacacacagcatttttttgtggtacaccgcaaccaacaagccccgcctcgacttccccctcaccaaacggaaggggttggccccacagcgttgccaccggttccagtcttctgcctatcgttccaatcaatggagataccgcggaagatgtgactccatccagttcgctgttgaccgccgcgtgttcatcgctggccttggtctgtacggatcttcttctggaaaagccgagtattcagtcaagatcgagctgaagcgccttggcgtggtcctcgcacaaaacctaaccaagtttatgagttag

SEQ ID NO: 26815 - DNA, 603 bp, synthetic construct
  source 1..603: mol_type = other DNA; note = Synthetic coding sequence
atgctggagctggtggcccagaagcagcgggagcgggaggagcgggaggaacgcgaagcgctagaaagagagcgtcaacgccgcaggcagggacaggaattgtctgcggcccggcaacggctgcaggaagacgagatgcgccgggcggctgaagagcgtcggagggagaaagccgaggagctcgcagcccgtcaaagggtgcgagaaaaaatagagcgcgacaaagccgaaagggctaaaaaatatggaggatccgtgggatcccagccgccgccagtcgctcctgagcctgggcccgtgccatcatccccaagtcaggaacctccaactaagcgagaatatgaccagtgtaggattcaagtaaggctccctgacggcacctctctaacacagacctttagagcaagagagcaactggctgctgttaggctttacgtagaactgcaccgcggggaggagcttggtggaggacaggaccctgtgcaactgctttctggctttcccagacgcgcatttagtgaggcggacatggagcgccccttgcaggaattaggactcgtcccatccgcagtgttgatcgtggccaaaaaatgcccatcttag

SEQ ID NO: 26816 - DNA, 885 bp, synthetic construct
  source 1..885: mol_type = other DNA; note = Synthetic coding sequence
atgggcctggccagctggagccagctggccagcaccccccgggccccaggatccagggacgctcggtgggagcggagagagcccgcacttagaggtgcaaaggacagacttaccatcggaaagcatctggacatggggtctccccagctacggacccgtgaccgcggctggccatcccccaggcccgaacgcgagaagcgtacatcccaaagcgctagaagacctacgtgcactgagtcccggtggaaatccgaggaagaggtcgaaagcgacgatgagtacctagccctgcccgcccggctgactcaggtaagcagcctggtttcatatctggggagtatctctactctggtcaccctgccaaccggggatatcaagggacagagcccactcgaagtaagcgattccgatgggcctgcatcgttccccagcagttccagccagtcccagctgcccccgggagccgcgcttcagggttccggagaccctgaaggccagaacccctgcttccttcgctctttcgtccgagcccacgattcggccggcgagggatcattgggcagctctcaggcactgggcgtgtcctccggtctgctgaagacaaggccaagtctgccagcccgtctggatcgatggcccttttccgatccggatgtggagggccagctgcctagaaagggcggcgagcaagggaaagaatccttagttcagtgtgtgaaggtgatgacacttaacgttaggaagctgtgtgtacaggtgagctgtctctttccacagtccaccaacatcatcatcaagcacgtgcatgtggaccaagcactttttatgtgccaagccttgtgttgtactctttcttactccgtactgactacattcacgaggtag

SEQ ID NO: 26817 - DNA, 354 bp, synthetic construct
  source 1..354: mol_type = other DNA; note = Synthetic coding sequence
atggtgcggaagatcaccctggtgagcgccgcccccggcaaggtgatctgcgaaatgaaagtcgaagaggaacacactaacgctattggtaccctgcacggcgggctgacagcaacgctggtagataatatttccaccatggcactgctgtgtacagaacgcggcgcaccaggagtgtcagtggatatgaatatcacctacatgtcgccagcgaaactgggcgaggacattgtcattaccgcccacgtactaaagcagggtaaaactctcgctttcactagcgtcgacttaacaaataaggctactgggaaactgatcgcccaggggcggcacactaagcacttaggcaattag

SEQ ID NO: 26818 - DNA, 840 bp, synthetic construct
  source 1..840: mol_type = other DNA; note = Synthetic coding sequence
atgaccagcggcaagatcaagaagttcatccaggagaacatcttcggcatctgtccacacatgacggaagacaataaggacctgattcagggaaaagatctactcatcgcctactatgatgtggattacgagaaaaatgccaagggtagcaattattggcggaaccgcgttatgatggtggccaagaaattcctggatgctggacacaaactgaacttcgccgtggcctccagaaaaaccttttctcatgagctctctgacttcgggcttgagtcaaccgccggagaaatccccgttgtggctatcagaacggctaagggagagaaatttgtgatgcaggaagaattctcaagagacggcaaagcccttgagcgctttcttcaggactacttcgatgggaacttgaagcgctacctgaaaagcgaaccaataccagaaagcaatgacggtcctgtgaaggtagtggtagcagagaatttcgatgaaatcgtgaacaatgaaaacaaagacgtgttaatcgagttttacgctccctggtgtgggcactgtaaaaacctcgaacccaagtacaaagaactgggtgagaagctttcgaaagatcccaatattgtaattgccaagatggatgctacagccaatgatgttccctctccttacgaggtgagaggatttcccacaatctatttctcgcctgctaataaaaagttgaatcccaagaagtacgaaggaggccgagagttgtcagacttcattagctacctccagcgagaagctacaaacccccccgtcattcaggaggagaaaccaaagaagaagaagaaggctcaagaagatttgtag

SEQ ID NO: 26819 - DNA, 3228 bp, synthetic construct
  source 1..3228: mol_type = other DNA; note = Synthetic coding sequence
atgagccagggcttccaccccgagcgggaccccagcgacctgaagaaagtgaaggcggttgaggagaacggtgaagaggctgagccggttaggaacggcgccgagtcagtaagcgaaggggagggaatagatgcgaattctgggagcactgactcttcaggggatggggtaacattccccttcaagcccgaaagttggaagcccactgatactgaggggaagaaacagtatgacagggagttcttgctggattttcaatttatgcctgcgtgtatccagaagcccgaaggactgccaccaatctcagacgttgtgctggataagatcaaccagcccaagctacctatgaggactttggacccacggattctaccacgaggtcctgatttcacccctgctttcgccgattttggccgtcagacaccaggagggagaggcgtcccgatctgtaaagtgcaaagccggcatggcctgccgattctggagcaaagtaaagcccctacatgcccacccctcgttatgtcccatcctccaatgaagtcacttccacttggactcctcaacgttggtagcaggcgatcccaacctggccaaaggagggaacctcgcaagatcattaccgtgtctgtgaaggaggacgtgcacttgaaaaaggccgagaacgcctggaagccaagccagaagcgtgattcccaagcagatgatccagagaacatcaagacgcaggagctgtttagaaaggtgagaagcattctgaataagctgacgcctcagatgttcaatcagctcatgaagcaggtcagcggcctgaccgtagatacggaggaaaggcttaaaggcgtgatcgacctcgtgtttgagaaggcaattgatgagcctagcttctccgtagcttacgctaatatgtgtcgatgtctggtgactctgaaggtaccaatggccgacaaacccgggaatactgttaatttccgtaagctcctcctcaatcgctgtcagaaagagtttgaaaaagataaagctgacgacgacgtgtttgaaaagaagcagaaagagctggaggcggcgagtgctccagaagagagaacaagactccacgatgaacttgaggaggccaaagataaggctcggcgaagaagcatcgggaatatcaagtttattggtgaactgttcaaactgaagatgctcacagaagccatcatgcacgattgcgttgttaagctgcttaaaaaccacgatgaagaaagcctagaatgtctgtgtaggctgttaacaaccatcggcaaggatttagactttgaaaaagccaaaccccgcatggatcagtactttaatcaaatggagaagattgtgaaggagcgcaagacttctagtcgtattaggttcatgttacaggacgtaatcgacctcaggctttgcaactgggtatcccgcagggccgatcaggggcctaaaacgatcgagcagattcataaagaggccaagatcgaagagcaagaagaacagaggaaagtccagcagttaatgacaaaggagaagcggcgccccggggtacaacgggtcgatgagggcggctggaataccgttcagggcgcaaagaatagccgtgtgctggacccatccaagttcctgaagattacaaaaccaactattgatgagaaaatccaactcgtccccaaagcccaactcggcagttgggggaagggctcaagcggcggggctaaggcgtcagagacagatgccctccgaagttccgcaagttccctgaacaggttttctgcactccaacctcctgctccatctgggagtacacctagtacacctgtcgaattcgattctaggagaacactgacgtccaggggctccatgggtcgcgaaaagaatgataagcccctgcctagcgccaccgcgcgacctaatacattcatgagaggaggcagctccaaggatctgctcgataatcaaagccaggaggagcaaagacgtgagatgttggaaaccgtaaaacagctcactggaggagtcgatgtcgaacgaaacagcacagaagccgagagaaataaaacacgtgaatctgccaagcccgagatttctgcaatgagtgcccacgataaggctgcactgtccgaggaagaacttgagagaaaatccaaatcaataatagatgaattcctccacataaacgacttcaaggaagcaatgcagtgtgtcgaggaattaaacgctcagggattgctacacgtgttcgttcgggtcggcgtggagtccacactggaaaggagtcagatcacacgcgaccacatgggccagttgctgtaccagctcgtgcaatcagaaaagctgtctaagcaggacttctttaaggggtttagtgagaccctcgagctggcggatgacatggctatagacatcccacatatttggctctatctggcagaattggtaaccccgatgctcaaagagggaggcattagcatgcgggaactgaccatagaatttagcaagccactgctgcctgttggccgggcgggcgtcctgctctctgaaatcttgcacttactgtgtaaacagatgtcccataaaaaagtaggagcactgtggagagaggcagatttgtcttggaaggattttctgcctgagggggaagacgttcataacttccttcttgagcagaagctggactttattgaatccgactccccctgctcctcggaggctctgtcgaagaaggaactgtccgctgaggaactctacaagaggctggaaaagttaatcattgaggacaaggctaacgacgagcagatttttgattgggtggaggctaatttggacgagattcagatgtcttcgccgacattcctgagagccctgatgaccgcggtgtgcaaggcggctatcatcgctgactcgtccacatttagggtggatactgccgttattaaacaaagagttccaatcctcctcaaataccttgatagcgacacagaaaaggagcttcaagccctgtatgccctccaagcttcaattgtgaagctcgaccagcctgccaatcttttgaggatgttctttgactgcctttacgacgaagaagtaatttccgaggacgctttttacaaatgggagagctcaaaagaccctgccgagcagaacggaaagggcgtggcactgaaaagcgttacagcttttttcacctggttgagagaagcagaggaggaatccgaggacaattag

SEQ ID NO: 26820 - DNA, 474 bp, synthetic construct
  source 1..474: mol_type = other DNA; note = Synthetic coding sequence
atgaagtgcatcccctacagcgtgctgctgaaggacctggagatgaggaatctccgcgagctcgaggacctgattatcgaagcggtttacactgatattatacaggggaaactggaccagaggaaccagcttctggaagttgacttctgtatcggacgagatatccgtaagaaggacatcaacaatatcgtgaaaaccctgcacgagtggtgcgatggatgtgaggcagttcttttaggcattgagcagcaggttcttcgggctaaccagtacaaggaaaatcataatagaacgcaacagcaggtggaagccgaagttacgaatattaaaaagaccctgaaggcaacagcatcttccagcgctcaggagatggagcagcagttagctgaacgggagtgcccccctcacgcagaacaacgtcagcccacaaagaagatgtctaaagtgaagggcctcgtttcatcgaggcactag

SEQ ID NO: 26821 - DNA, 837 bp, synthetic construct
  source 1..837: mol_type = other DNA; note = Synthetic coding sequence
atggactgccgggagatggacctgtacgaggactaccagagccccttcgatttcgacgcaggggttaacaagtcctatctgtacttatccccctccgggaatagttctccaccaggttctcccacgctacagaaattcggattgctcagaactgaccccgtaccggaggagggagaagacgtggccgcgactatttcggccaccgaaacacttagcgaggaggagcaggaggagctccggcgtgagctggcaaaggtagaagaggagatccaaaccctttcccaggtgctggctgctaaggaaaaacacctggcagagataaagaggaagctggggatcaatagtctccaggagcttaaacagaatatcgccaagggatggcaagatgtcaccgcaacctccgcatataagaagaccagtgagactctctcgcaggctggtcagaaagcttcagcagccttttcttcggttggtagtgtcataaccaagaaactggaggatgtgaaaaactcccctaccttcaaatcattcgaggaaaaagtcgaaaatcttaaagggtctcccaagaatgttgagagcttcgcctctatgctgcgccattctcccctgactcagatgggacctgccaaagacaaactggtgataggaagaattttccatatcgtggagaatgatctatacatcgacttcggcgggaaatttcactgtgtatgtcgtagaccagaggtggatggcgagtctccaatctcatggtacgccgtgtggcgcagatttagtcaagtaatgataacgtgtttcagctctaattcagatttcggcaagcatcgcaaacggtag

SEQ ID NO: 26822 - DNA, 3123 bp, synthetic construct
  source 1..3123: mol_type = other DNA; note = Synthetic coding sequence
atggtgagcagcgcccagatgggcttcaacctgcaggccctgctggagcagctgtctcaggatgagctgagtaagtttaaatacctgattactactttctccctggcccatgagctgcagaagattcctcacaaggaggttgataaggccgatggaaaacaactggtggaaatacttacgacccactgcgactcgtattgggttgaaatggcgtccctccaagtgtttgagaaaatgcaccgcatggacttgagcgagcgagcaaaagatgaggttcgtgaggctgccctgaaaagctttaataagagaaagcccttgtccctgggaattaccagaaaagaacgcccaccattggatgtggacgaaatgttggagaggttcaaaaccgaagcacaggacaaggataaccgatgtcggtacatcctgaagaccaagtttagggaaatgtggaaaagttggccgggggattcaaaagaggtccaggtgatggctgaaaggtacaagatgctgattcccttcagcaaccctagagttctgcctgggccattcagctatacagtggttctgtacggccccgctgggctgggcaagacgaccttagctcagaagttgatgttggattgggctgaagacaacctcattcataaatttaaatacgcgttctatctttcttgtcgagaattgtccaggctgggtccatgttcctttgctgagctagtgtttagggactggccagaactgcaggacgacatcccacatatcctagcccaagctcgcaagatcctgttcgtgatcgatggctttgacgagctgggggcagctccaggggccctgatcgaagatatctgcggtgactgggaaaagaaaaagcctgtgccggtgctcttgggctccttgcttaacagggtgatgctgcccaaagctgccctgctggtgacgacgcggccgagggccctgagggacctacggatcttagccgaggagccaatttacatacgcgtggaggggttcctcgaggaagaccggcgtgcttactttctccgtcactttggcgatgaagaccaagctatgcgcgcgtttgagctgatgcggtcaaacgctgccctttttcaactcggaagtgcccccgccgtttgttggattgtctgcactacactgaagctgcagatggagaaaggggaagacccggtgccgacctgcctgacacggactggtctctttctccgctttctatgttcaagatttcctcaaggcgcgcagttgcgcggcgctcttcgcaccctgtccctgctggccgcgcagggactatgggcacaaacctcagtgcttcaccgcgaggaccttgaacggctgggagtgcaggagtcagacttgaggctctttttggacggtgacatactgagacaggatcgcgtttcaaaggggtgctattccttcatccacctgtctttccagcagttccttaccgccttgttctacactctagaaaaagaagaagaagaggacagggatggccacacttgggacattggggacgtgcagaagctcctcagcggggtggagcgcctcaggaacccagatctgattcaggccggctactactcatttggactggctaacgaaaagagagcaaaagagctcgaggccacattcggctgccgtatgtcacctgacataaaacaggaactcctgcgttgcgatatttcctgtaagggtgggcatagcacggtgaccgatctgcaggaactgcttggctgtttgtatgagagccaagaagaagaattagtgaaagaggtgatggcgcagtttaaggaaatatctctgcatctgaatgcagtagacgtggttccctcaagcttttgcgtgaagcattgtcggaacttacagaaaatgtccttgcaggttataaaagagaacctgccggagaatgtaacggccagcgaatccgacgcagaggtggagcgctctcaggatgaccaacacatgctaccattctggacagacctctgttccatcttcggatccaacaaggatttgatggggcttgctattaacgactccttcctgtctgcgtccctggtacggattctatgtgagcagattgcgtctgacacttgccacctgcagagagtcgtgtttaagaatatttcccccgccgatgcacaccggaacctatgccttgctttgagaggccacaaaacggtaacttacctgaccttacagggaaacgatcaggatgatatgtttcccgccctgtgcgaggtcctgaggcaccccgaatgcaacctcaggtaccttggtctggtatcctgctcagcgacaacgcagcagtgggccgatttatcactggcactggaggtgaatcagtcactgacttgtgtgaacctctccgataatgaactgttggacgaaggggcaaaactgctttatacaactttgcgccatccgaaatgcttccttcaaagattgtccctagagaattgtcacctcactgaagctaattgtaaagatttggccgctgtcctcgtagtttccagagaactgactcacctgtgcctcgctaaaaaccctatcgggaacacaggagtgaagttcctatgtgagggtctgcggtatcctgaatgcaaactgcagactcttgtgctctggaattgtgacattacctctgatgggtgctgtgacctcaccaagctgctgcaggagaagagttccttactgtgtctggatctgggcctgaaccacatcggggtcaagggcatgaagtttctgtgtgaggccctcaggaaacccctctgtaacctgagatgtctttggttatggggctgcagtatccctcctttctcttgcgaggacctgtgttccgcgcttagctgtaatcagagcctcgtgacactggatctaggacagaatcccctgggctcaagcggagtgaagatgctgtttgagaccctgacgtgctcaagcggaactctgaggacactgagattaaagatagatgacttcaatgacgaactaaacaaactacttgaagaaatcgaagagaagaacccacagcttattattgacaccgaaaaacaccacccttgggccgagcggccctcatcccacgacttcatgatctag

SEQ ID NO: 26823 - DNA, 1809 bp, synthetic construct
  source 1..1809: mol_type = other DNA; note = Synthetic coding sequence
atgagcgacaagagcgacctgaaggccgagctggagcggaagaagcagcgactggctcaaattcgcgaggaaaagaaaagaaaggaagaggaacgcaagaagaaggaggcagatatgcagcagaaaaaagaacctgtccaggatgatagcgatctggatcggaagagaagggagactgaggctcttctgcaaagcatcggcatcagcccagaacccccattggtaccgactcctatgtctcctagcagtaaatccgtgtcaactccttcagaggccggatcccaggattctggcgatctcggacctttaaccaggcgccgattgcataaactgggcgtcagtaaggttacacaggttgatttcttgccacgcgaagtggtaagctattcaaaagagactcaaacacctctggctacacatcagagtgaagaagacgaagaggatgaagaaatggtggaatctaaggtcggccaggactcggagctggaaaaccaggacaagaagcaagaggtgaaagaggcccccccgcgagagttgactgaggaagaaaaacagcaaatcctgcattctgaagagttcctgattttttttgaccgaaccattcgcgttattgaaagagctctggccgaagattctgatatcttcttcgattactcaggacgagaactggaagaaaaggatggcgacgtgcaggctggcgctaatctgagcttcaacagacagttttatgatgagcactggtcgaagcatagggtggtgacttgtatggattggtcattgcagtaccctgaattgatggtggcatcatacaacaacaacgaggacgccccacatgagcccgacggggtagcactcgtttggaacatgaagttcaaaaagactactccagagtacgtatttcattgccagtcatcggtcatgtctgtgtgttttgctaggttccacccgaatctcgtggtgggtggaacatattcagggcagatcgttttatgggataatcggtcccaccgtcggacacctgtacaaaggacccccctttctgctgcagctcacacgcatccagtgtactgcgttaatgttgtgggaacccagaatgcccataacttgattacggtaagtactgacggtaaaatgtgttcttggagcctagacatgctgtcgaccccacaggaaagtatggaactggtgtataacaaaagcaagcctgtggcggtaacggggatggcttttccaacaggcgacgtcaacaacttcgtggtcggtagtgaggaggggaccgtctacacagcctgccgccacggcagcaaagccgggataggggaagtgtttgaaggtcatcagggtcccgtgaccggtatcaactgccacatggcagttggccccatagatttctcccatctctttgtgaccagtagtttcgactggacagttaagttgtggaccacaaagcacaacaagcccctgtactctttcgaggataatgcggactacgtgtacgacgttatgtggagccctgttcaccccgcactgtttgcctgcgtcgacggcatgggccggctcgatctgtggaatctaaataacgataccgaagttccaaccgcctctgtcgctattgagggagcctccgcactgaaccgggttagatgggcccaggcggggaaagaagtagctgtaggagatagcgaaggcagaatttgggtctacgatgttggcgaaggtctggccatgctccccggctggtcacagaacagctggacccaggccatccttctgtgctggcccccaaaagttctgggattacagacttag

SEQ ID NO: 26824 - DNA, 2847 bp, synthetic construct
  source 1..2847: mol_type = other DNA; note = Synthetic coding sequence
atgtacggcagcgcccggagcgtgggcaaggtggagcccagcagccagtccccaggacgttcacctaggctgcctaggtcaccgcggctcgggcatcggcgcactaacagcacaggcggctcgtcgggatcatccgttggggggggttccggaaagactctctctatggaaaacattcagtctctgaatgcagcctatgccaccagtggacctatgtacttgtctgaccacgagaacgtggggtccgaaacccctaaaagcaccatgacgctcggacgcagtggcgggcggctgccgtatggggtccggatgacagcaatgggcagctctccaaatatcgccagcagcggggtggcctctgacacaatcgcgttcggagaacaccatctccctccggtatcgatggcttccactgttccccactccttaagacaagcgagagacaacaccataatggacctgcagactcagttaaaggaagtcttacgtgaaaatgacctgctacgaaaggacgtcgaggtcaaggaatccaagctgtcctcctcaatgaacagcatcaagactttctggtcccccgagttaaagaaggagcgagccctacggaaggacgaggcctccaaaattacgatctggaaagaacagtatcgagtggtgcaggaagaaaaccagcatatgcagatgactatccaggcattacaggatgagctcagaatccagcgtgaccttaatcaactgtttcagcaagactcctccagcagaaccggggagccctgtgtggctgagctcaccgaagagaatttccaaagattgcatgccgagcacgaacgccaggccaaggaactgtttttgctgcgtaagacactggaagagatggaacttcgcatagaaacccagaagcagacactaaacgcccgtgacgagtcgataaagaagctcttggagatgctgcaatcgaaggggctgtcagccaaagcaactgaagaggatcatgagagaacccggcgattggccgaggctgaaatgcatgtgcatcacttagaatctctgctcgagcagaaggaaaaagagaattcgatgctgcgggaggagatgcatcgacgattcgaaaacgcccctgattccgcgaagacaaaggcattgcagacagttatcgagatgaaagactctaaaatcagctccatggaaagggggctgcgcgacttggaggaagaaatacagatgttgaaatcaaatggggccctgtccacagaggaaagagaggaagaaatgaaacagatggaagtttaccgtagtcactccaaatttatgaaaaacaaaattggccaagtgaagcaggaattgagccggaaagacactgaactgctggcactgcagacaaagctggaaactctgactaatcagttttctgatagcaagcagcacatcgaggtactgaaagaaagtttgaccgccaaagaacagcgggctgctatcctacagacggaggtcgacgcactgcgcctgcgcttggaggagaaggaaaccatgctgaataaaaagacaaagcagattcaggacatggcagaagagaaggggacccaggcaggagagatacatgatctgaaggatatgctggacgtcaaggaacgaaaagtcaatgttctgcagaaaaaaatcgagaatctccaggaacagctgcgcgacaaagaaaagcaaatgagttcactgaaagaaagagtgaaaagcctgcaggctgacacgacaaatacagataccgctttaactacccttgaggaggcactcgccgaaaaggaacgaaccattgagcggctaaaggagcagagagatagagacgaacgtgaaaagcaggaagagatcgataactacaaaaaggacctcaaggatctcaaggagaaggtgtcactgttgcagggcgacctgtctgagaaggaggcttccctacttgatctgaaggagcatgcgtcatcactggccagttctggtctcaaaaaggactcccgcctaaaaacattggagatcgccttggagcagaagaaggaggagtgcttgaagatggagtcccagctgaagaaggcacatgaggctgctctggaagcccgcgcaagcccagaaatgtccgatcgtatccagcacttagagcgcgagatcacacgctacaaagatgagagcagcaaagcccaggcggaggtagaccggcttcttgagattttaaaagaagtagagaacgagaagaatgataaggataaaaagatcgcagaactggagagcttattcagtcgtcaggtgaaggatcagaacaagaaagtcgccaatttgaagcacaaggaacaggttgaaaaaaagaagtctgcacagatgctggaagaggcaaggcgacgcgaggataatctgaatgactcatcacagcaactacaggtcgaggagctccttatggccatggagaaggtcaagcaagagctggagtctatgaaggcaaaactgagcagcacccagcagagccttgccgaaaaggaaacccatcttacaaacctaagagcggagaggcggaaacatctggaggaggtgctggagatgaaacaggaagctctgttggccgctatttccgaaaaagacgcaaacatcgcattactggagctgagcagttctaagaagaagacacaggaagaagttgcagcactgaagagggagaaagacagacttgtgcagcagctgaaacagcaaacacagaatcgcatgaagctgatggctgataattacgaagacgaccactttaaaagcagccattccaaccagactaaccacaaaccttcccctgaccaggacgaggaagagggcatatgggcttag

SEQ ID NO: 26825 - DNA, 2742 bp, synthetic construct
  source 1..2742: mol_type = other DNA; note = Synthetic coding sequence
atggaggtgggcagcgaggaggagaagtgggagaagctggacgccgagttcgaccacttcgtggtggacatgaagccatttgtgctgaagctgccccaccgcaccgagcgccagcgttgcgctctgtggatccgtaaactctgtgaaccgagcgggacaggggcgggcatcatggggagaaagaaccgtaatttgtacgctaagctcctgctccatatgctgaagagaggggccctggaaggtccatttacccatcgacccgaaccgggaacgttgaagattctgcctagctacatgtccatctattttgatgagcccaatcctgcgcgggccaagggctctagccctgagggattgcctgcctgggtgctcggtgagctggaaacttcggaacataaactgaacgagtcttggaaactctcaagtggcgaggacaacactttggtacaatcccccactgatgtgtactctcgggagcaatatacaggaaagctgcgcgttagatctcactccctgtcccccactcaccgcgaagacggccagaacattacccccaagatttgcgaggtgtactcaaagaagagcccagtgtccctggacgacagtgatatagaggcccgtctcaattcctggaatctgggccttgatatgaagacaaaaatgatggaggccaaattccacgaagagaaattgaaattgcagcaaaaacatgatgctgatgtccaaaagattctggagcgcaaaaacaacgaaattgaagaattgaaaactctgtaccggtctaagcaacacgaaactgaggagacaatccgcaagctcgaaaagaaggtccaaactcttattagagattgtcaggtgataagagagaccaaggaggaccagatcgcggagctgaaaaaaatctgcgagcagagcacagaatctttaaataacgattgggaaaagaagctgcataatgcagtcgcagagatggagcaggaaaaattcgatttacagaagcagcacaccgagaatatccaggaactgctggaagacacaaacgtgcgtctcaataagatggaatcggagtacatggcacagacgcaaagtaccaaccatatgattaaagagctagaggccagggtacaacagcttactggcgaggcagagaactcaaaccttcagagacagaaattgatacaggaaaaggcagagctcgagcgatgctaccagataacctgttcagaactgcaggaggttaaagcacggcgaaacactttgcacaaagaaaaggaccatctggttaacgattatgaacaaaatatgaagctcctccagaccaagtacgatgccgacatcaatttgctgaaacaggaacacgctctgagcgcgtcgaaggccagctcaatgattgaagagctcgagcagaacgtgtgtcagctcaagcagcagctacaggaaagcgaactacaaagaaagcaacagctcagggatcaggagaacaagttccaaatggagaagagccacctgaagcatatttacgaaaagaaagcccatgacttacagtctgagttagacaagggcaaggaagatactcagaagaagatccacaagttcgaagaggcactcaaggagaaagaggaacagctgacccgagtcaccgaggtccaacgcttgcaggcgcagcaggcggatgcagcactcgaagaatttaaacggcaggtagagttaaattccgaaaaagtgtatgcggaaatgaaggagcagatggagaaagtagaggcagacctgacccggtcaaaatccctgagggagaagcaaagcaaagaatttctatggcaactggaggacatccgacagaggtatgagcagcagatcgtagagctgaaactcgaacacgaacaggaaaaaacccacctcctccagcagcataatgccgagaaagattccctagtccgggatcacgagagggagattgagaatctggaaaagcaattgcgggctgccaatatggaacatgagaaccaaattcaagaatttaagaagagggacgctcaggttatcgccgatatggaagcgcaggttcataaattgcgagaagaactgataaacgtaaacagccagcggaagcaacagctggtggaacttggcctgcttagagaagaagagaaacagagagcaacccgggaacacgagatcgtggtgaacaaattgaaggccgaaagtgagaaaatgaaaattgagttaaaaaagacacacgctgccgagaccgaaatgacactcgaaaaggctaattccaagttgaaacagatcgagaaagaatacacacaaaaattggccaagagctcccaaattatagctgagctgcagacaactatatcttctctaaaagaggaaaattcgcagcagcagttggccgccgagcgaagacttcaagatgttagacagaagtttgaagatgagaaaaaacagctaatcagggacaatgatcaggccatcaaggtgctgcaagatgagctcgagaaccggagcaatcaggttaggtgtgctgaaaaaaagctgcagcacaaggaacttgaaagccaagaacagatcacatatattcgccaggagtacgagaccaaactcaaaggcctcatgccggccagcctccgccaagagctggaggatacaatctccagtctgaaatcccaagttaactttctgcagaagcgcgcaagcatcctgcaggaggaactcactacttaccaaggacggaggtag

SEQ ID NO: 26826 - DNA, 825 bp, synthetic construct
  source 1..825: mol_type = other DNA; note = Synthetic coding sequence
atgcaggacgagaagctgcgggacgagaccgagcagcccgtgagcaaggtgatcgagaggaatcgtctgagaacagtcctcaaaaacctgtctctcctgaaactgttaaagtctagtaaccgaaggattcaggagttgcacaaacttgccaagcggtgttggcactcccttctcagcgttccgaagattctccggatttccagcggagaaaattcagcctgtaataaaaccaagcagaataatgaggagttccaagaaatcggctgttcagaaaaggaattaaagagtaaaaagcttgaaagtacaggtgatccaaaaaagaaagagtacaaggagtggaaatcacaagtgcagtctggaatgaggaataaagagaaaaccagtctggcggcgatgcctaggaaggagaagcacatcgagccagaagttcccaggacgagtagagatgactctctcaaccctggcgtgcagggacgccagcctctgaccgaaggaccacgcgtgatctttattaagccttaccgtaatcgcacgcccatgggacacatgaagcagctggatgtagccgaccagtggatttggttcgaaggattgcccacacgcatacacctgccagcccctagagtcatgtgccggagcagcaccctgagatgggtcaagcgacggtgtactcgattttgctccgctagcctcgaaatgccgatgtggcacccttataaggttgacgtaacttggacccgtgcacgtggagcgagcagaggatggcggagccgccaccagttgaaggggcgcaatggctggcggaatagtcgtgtatacaagtag

SEQ ID NO: 26827 - DNA, 156 bp, synthetic construct
  source 1..156: mol_type = other DNA; note = Synthetic coding sequence
atgcagctgcggcacatcggcgacaacatcgaccaccggatggtgcgggaagacctacagcaggacggcagagatgctctcgatcatttcgtcttctttttctttcggcgggtccaagtccttctccattttttctggaacaaccacctgttgtag

SEQ ID NO: 26828 - DNA, 444 bp, synthetic construct
  source 1..444: mol_type = other DNA; note = Synthetic coding sequence
atggccggcggcgcccgggaggtgctgaccctgcagctgggccactttgcaggttttgtgggagcacactggtggaaccagcaggacgccgcccttgggagagcaactgactctaaagagccacccggtgagctgtgccctgacgttctgtacaggacaggccggacactacatggacaagagacctacactcctcgccttatcctcatggacctaaagggctctctgtcatctctgaaggaagaggggggcctgtaccgtgataagcagttagacgcagccattgcctggcagggcaaactgacaactcacaaggaggaactttaccctaagaatccatacctgcaggattttctttctgctgaagtaagagcctccgtgctgaatttcctcactcgctgccacaacttgagagtctcaatcggggcggggagcgccgaatag

SEQ ID NO: 26829 - DNA, 1677 bp, synthetic construct
  source 1..1677: mol_type = other DNA; note = Synthetic coding sequence
atgagcgtgagcgtgcacgagacccggaagagccggagcagcaccggatctatgaatgttaccttgtttcacaaggcctcgcatcccgactgcgtgctggcggctagcagcagatacttcgaagcaatgttctcacacggactgagggagagccgcgacgatactgtgaattttcaggacaatctccaccctgaggtcctcgaattgctgttggattttgcctattcttctaggattgccatcaacgaggaaaacgctgagtccctcctggaggccggcgacatgctgcagtttcatgacgtccgtgacgccgccgctgagttcctcgaaaaaaacctgtttccctcaaattgtctggggatgatgctattaagtgacgcgcaccagtgtagacggctctatgagttctcctggaggatgtgtctggttcactttgagacagtgcggcagtccgaagattttaacagcttgtccaaagatacacttctggacttaatcagtagtgacgaactcgagaccgaggatgagagagtcgtgtttgaagcaatcctccaatgggtgaaacatgacctggaaccccggaaggtccaccttccagaactgctacgatctgtgcgcctcgcattgcttccttctgactgcctccaggaggccgtgtcttccgaggcgctgttaatggctgacgagaggacaaaactgattatggatgaggcactgcggtgtaagacacgcatcttgcagaatgacggagtggtaacctcgccgtgcgctcggccacgtaaagccgggcatacactacttattcttggaggtcagacatttatgtgtgacaagatttaccaagtcgaccataaagcaaaggaaattatcccgaaagccgaccttccatctccaaggaaagagttctcagcgagcgccatcggctgtaaagtatatgtgaccggggggcggggttccgagaacggcgtgtccaaggacgtgtgggtctatgatactgtccatgaagagtggtcaaaggctgctccgatgttgatcgcgcgtttcgggcacggctcagctgagttggagaattgtctgtatgttgtaggcgggcacactagcctggccggggtattcccggctagcccctcggtgagtttaaagcaggtggaaaaatacgaccccggagctaataaatggatgatggtggcccccctccgcgacggtgtaagcaacgcagccgtggtgtctgctaagcttaagctgttcgtattcggcggcacaagtattcatcgggacatggtctccaaagttcagtgttacgatccatcagagaatagatggactattaaagctgaatgcccacagccttggaggtatacagccgccgctgtcctgggctcacagatttttattatgggaggtgacaccgaatttaccgcggccagcgcttatcgattcgactgtgagaccaaccagtggacacgcatcggtgacatgaccgccaaaaggatgtcatgccatgcactcgcatccgggaataagctgtacgtcgtcggaggctacttcgggactcagaggtgcaagaccctggactgctatgacccaaccagtgacacttggaactgtattacaacagtgccctattcacttatccctacagccttcgtttccacgtggaagcatctgcccgcatag

SEQ ID NO: 26830 - DNA, 2916 bp, synthetic construct
  source 1..2916: mol_type = other DNA; note = Synthetic coding sequence
atgaacttcctgcggggcgtgatgggcggccagagcgccggcccccagcataccgaggctgaaaccgtaaggggagccgccggcctcgggttgggcaaggggtccggccagggtaggggaagatctaccaggagaccagaagagtgtggactgaagttccgacacagttttcgtcttgttaaacatattctctatcacgtcacaatcaacgtctcagacagcgaaattattggttatgccttggacacgctctacaatatcatatcaaatgaggaggaggaggaggtggggggctcccaagaagagaacagcaccaggcagagcgaggatttgggtagtcagtttaccgaaatttttatcaaacaacaagaaaatgtgacactgctactctccctgctcgaagagtttgactttcacgttcggtggccgggggtgaagctgctgacttctttacttaagcagctagggcctcaggtgcaacagataattctggtctccccaatgggcgtgtccaggcttatggatcttcttgctgactcccgggaagtgatccgaaacgacggtgtgcttctgctgcaggccctcaccaggtcaaatggcgctatccaaaaaatagtggcctttgagaacgcctttgagcgcttacttgacatcatcagcgaagagggaaattctgatggcgggatagtcgtggaagattgcctcattttgctccagaacctgctcaaaaataacaactcgaaccaaaacttttttaaggagggaagttacattcagaggatgaagccctggttcgaggtcggagatgagaactcagggtggagcgctcaaaaagtaaccaacttgcatttaatgcttcaattagtaagggtgctcgtgtctcctaccaatccgcccggagcaacgtcctcctgtcagaaggctatgttccagtgcggactgttgcagcagctgtgtaccattcttatggcgactggggtgcctgcagacatccttaccgaaacaattaacaccgtgtcagaggtgattcgcggttgccaggttaaccaagattactttgcatctgtgaacgctccgtcgaaccccccgaggccggctatagttgtgctcctgatgagcatggtcaatgagcgacagcctttcgtcctccgttgcgccgttctgtactgcttccaatgtttcctgtacaaaaatcaaaagggacagggcgagattgtttcaacgcttctgccaagcacgattgatgctacaggcaattccgtatctgctggtcaacttctatgtggtggcctttttagtacggatagcctgagtaattggtgtgctgccgtggccttggcccatgctctgcaagagaacgcaactcagaaggaacaactgctcagggtccaactggcgacctccattggcaacccccctgtgtcccttctgcagcagtgcacaaacattttgagccaaggcgacaagatcgacaggcggggcagcaagatccagacacgcgtggggctgctcatgctgctatgtacatggttgtccaactgccctatcgcggttacccatttcctgcataattccgccaatgttccgtttttaacaggacaaatcgcagagaatttaggcgaggaagagcagctggtccagggactgtgcgcccttctgctgggcatttcaatatatttcaatgataatagtctggagtcatatatgaaagaaaagcttaaacagctgatcgagaagcgcatcggcaaagaaaacttcatcgagaagctggggtttatctcaaagcacgaattatacagtcgggcaagccagaaaccccagcctaactttcctagtcccgagtacatgatcttcgaccacgagtttaccaaacttgtgaaagaactcgagggggttattacaaaggccatctataagtctagcgaggaggataaaaaggaggaggaggtcaagaaaactttagaacagcacgataacatcgttacacactataagaacatgattcgggagcaagacctccagctggaggaactccgacagcaggtgtcaaccctgaaatgtcagaatgaacagctacagacagcggtgacacaacaagtgtctcagatccagcagcacaaggatcagtataatttactgaaaattcagcttggcaaggataaccagcaccagggctcatacagcgagggcgcccaaatgaatggcatccaaccagaggagatcggcaggctccgagaagaaatcgaggagcttaaacggaaccaggagttgctgcagtctcagttaacagagaaggattcaatgattgagaacatgaagtcctcacagacttcaggtacaaatgagcagtcttccgctattgtctccgccagagattcggagcaggtcgctgagcttaagcaagaactggcaacactcaagtcgcagttgaactctcagtctgtggaaattactaaattgcagacagagaagcaagagctgctccagaaaacagaggcctttgcgaagagtgtggaggttcagggtgaaaccgagacaatcatcgcaacaaaaactacagacgtggagggtcgcctttcagcgctgttgcaggagactaaggaactgaagaatgagattaaagcactgtccgaagagcgaacagccattaaggagcagctcgatagctctaatagcacgattgcaattctgcagaccgaaaaagacaaactcgagcttgaaatcactgactcaaaaaaggagcaggatgatcttctagtcttgctggctgatcaagatcaaaaaatcctgtcacttaaaaacaagctgaaggacctcggacatccagtggaggaggaggacgagttggagtctggagatcaggaagatgaagacgatgagagtgaagacccggggaaggaccttgaccacatttag

SEQ ID NO: 26831 - DNA, 258 bp, synthetic construct
  source 1..258: mol_type = other DNA; note = Synthetic coding sequence
atgggcaacagcgacagccagtacaccctgcagggcagcaagaaccatagtaacactatcactggtgctaagcaaattccatgctcgttgaaaatcagaggaattcatgcgaaggaagagaaatccctacacggatggggacatggctcgaacggagcaggatacaagagccgcagtctggccaggtcctgtttgagccatttcaaatcaaaccagccctatgccagtagacttggtggccctacttgcaaagtctag

SEQ ID NO: 26832 - DNA, 174 bp, synthetic construct
  source 1..174: mol_type = other DNA; note = Synthetic coding sequence
tgaggccgggcccccggccccgccatcggcggccggcgggccggcgactcatgtcctggatggaggcggcggagcagaagtagggggcgaggccaacggttaagccatggccccaggcggaggcctcagcttctgactgaaacccggcggccggtgctggtccaatggttatag

SEQ ID NO: 26833 - DNA, 936 bp, synthetic construct
  source 1..936: mol_type = other DNA; note = Synthetic coding sequence
atggtgagcctgcgggtgaaccccctgagcctggtggagatcatcctgcacgtagtgagacaaatgaccgatcctaacgtcgctctcacatttctcgagaaaactcgcgaaaaggtgaaaagcagcgatgaggccgtcattctctgcaaaacggccataggggctttaaaattgaacatcggcgacctacaagtaaccaaggagactattgaggatgtggaggaaatgctcaataatctgccaggagtgacctctgtgcactcaaggttctacgatttgagtagcaaatattaccagacaatcgggaatcacgccagctactataaagatgcactacgttttctggggtgtgttgacatcaaagacttgcctgtcagtgagcagcaggagcgtgccttcactctgggcttagctggactcctgggggagggtgtgtttaatttcggggagcttctcatgcacccggtactggaatccctaagaaacaccgaccggcagtggctgatcgacaccctgtacgccttcaacagtggtaacgttgagaggttccagactctaaaaaccgcctggggtcaacagcccgatctcgccgcaaatgaagcccagctcctgcgaaaaattcagctactctgtctgatggagatgacatttacacgccctgctaatcaccggcagctcacattcgaggagatcgccaaatcagcaaagatcacagtgaatgaagttgagctacttgtgatgaaagccttgtctgtggggctggtcaagggttcgattgatgaagtcgataagcgcgtgcacatgacctgggttcagcccagagtcttagacctgcagcagattaagggcatgaaggacagactggaattttggtgcaccgatgtcaagagtatggaaatgctggtggaacaccaggctcacgatatcttaacctag

SEQ ID NO: 26834 - DNA, 1161 bp, synthetic construct
  source 1..1161: mol_type = other DNA; note = Synthetic coding sequence
atgaagagcctgaaggcctgcaagcgggagatcaagagcgtgatgaacaccgccgggaattcggccccatcattgttcttgaaatcaaattttgaatacctcaggggcaactatcgtaaggccgttaagttgttgaacagctcaaatatcgccgaacatcctgggttcatgaaaacgggagagtgccttagatgcatgttttggaataatctaggttgcatccatttcgccatgagtaagcacaatctcggaatcttttactttaaaaaagctcttcaggagaacgataatgtgtgtgcccagttgagcgccgggtcaaccgaccctggcaaaaagttttccggccgcccaatgtgcaccctactgaccaacaagcggtacgagctgctgtataactgtggaatccagctgctgcatattggcaggccactggccgcattcgaatgtcttattgaagctgttcaggtctaccatgctaacccgcgtctgtggcttcgactcgcagagtgctgtattgccgctaacaaaggcacctcggagcaagaaactaaggggctgccttcaaaaaaaggtattgtccagtctatcgtcggccaaggctaccatcgcaagatagttctagcaagccagtcaatccagaataccgtctacaacgatggtcagtctagtgctatacctgtggcgtccatggagttcgcggcaatatgtctcagaaacgctctgttgctgctgcctgaggagcagcaggacccgaagcaggagaatggggcgaagaatagtaaccagctgggaggtaacactgagagctctgagagctccgaaacatgcagttcaaagtctcatgatggagataagtttatccctgccccaccttcatcccctctgcgaaagcaagagctcgaaaacctcaagtgctctattttagcctgtagtgcctatgtcgctttagcacttggcgataacctcatggcccttaaccatgccgataaactcttgcagcaacccaagctgagcggctcactcaagtttctcggacacttatacgctgcagaagcactcattagtcttgacaggatatctgatgccatcacgcatttaaacccagagaacgtcactgatgtgtcactgggaatcagctccaatgagcaggatcaggggtag

SEQ ID NO: 26835 - DNA, 1596 bp, synthetic construct
  source 1..1596: mol_type = other DNA; note = Synthetic coding sequence
atgctgcaggagctgaacttcggcgcctacctgggcctgcccgccttcctgcttccgttgaatcaggaggacaataccaacctggcccgggtgctgaccaatcacatccacacgggccaccattcgtccatgttttggatgagagtgccgctggttgctcctgaggacctgagggatgacattattgagaacgcccccactacccacactgaagagtactccggtgaggagaaaacctggatgtggtggcataacttccgcaccctgtgtgactacagcaaacgtatcgccgtggccctggaaattggggccgatctcccctctaatcacgttatagacaggtggctcggcgagcctatcaaggctgccatccttcccacttccatctttctgacaaacaaaaaaggattccccgtgctttcgaaaatgcaccagcggttgatcttcaggctgcttaaactggaagttcagttcattattaccggaaccaatcatcactccgagaaggaattttgttcctatctgcaatatctcgagtacctcagccagaatagacctccccccaatgcgtatgagctgtttgcaaagggctatgaagattatctgcagagcccattgcagccactgatggacaaccttgaatcacaaacctacgaggttttcgagaaagatcctatcaaatattcacaataccagcaggccatttataaatgcctgctggaccgggttccggaagaggaaaaggatacgaacgtgcaggtgctcatggtcctgggagcagggcgtggacctttggtgaacgcgtccttaagagcagcgaaacaggccgatagaagaattaagctgtatgcggtggagaaaaatcctaacgcagtagtcacactcgagaactggcaatttgaagagtggggatcccaggttaccgtcgtctcatccgatatgagggagtgggtcgctcctgagaaggccgatatcattgtttccgagttgttgggaagctttgccgacaatgaacttagtcctgagtgcctggatggagcacagcacttccttaaagatgacggagtttccatccccggcgaatatacatcattcctggctcctataagcagcagcaagttatacaacgaagtgcgggcgtgtagggagaaagaccgggatccggaagctcagttcgagatgccatatgtggtgagacttcacaacttccaccagctgtcagcgccacaaccctgttttacgttctctcatcctaaccgggacccaatgatcgataacaaccgttattgtactctggaatttcccgtggaagtaaacaccgtcctgcatggtttcgcaggctactttgaaaccgtactctatcaggatatcactctgagcattcgacccgaaactcacagcccgggaatgttcagctggttcccaatcctcttcccgatcaagcagcccatcaccgtgcgagaaggccagactatttgtgtccgcttttggcggtgctccaacagcaaaaaggtgtggtacgagtgggccgtcaccgcgcccgtgtgctcagcgatccacaaccccacaggccggagctacaccatcggcttatag

SEQ ID NO: 26836 - DNA, 789 bp, synthetic construct
  source 1..789: mol_type = other DNA; note = Synthetic coding sequence
atggccctgagcctgggctggaaggcccaccggaaccactgcggcctcttactgcaggccctgagatccagcggactgctgttgtttccatgtgggcaatgtccttggcgaggcgctggctctttcttggaccctgaaatcaaagcattcctggaggaaaatacggaggtgacttcgagcggaagtctcacacctgaaatacagctgcgcttgttgactcctcgctgcaaattttggtgggagagggccgacctgtggccccactctgacccctattgggctatctattggcccggagggcaagcgcttagtaggtacttgttggataatcctgacgtggtgcggggtaagagtgttcttgatctcggcagcggatgcggtgcaacagctattgcggccaagatgtccggcgctagccgtattctggcaaacgatatcgatcccattgccggcatggctataacactcaactgcgaactgaatagactaaatccgtttcctatcctgattcaaaatattttaaacctggaacaagacaagtgggatctcgttgtgctcggggacatgttttatgacgaggatctggctgattcactacaccaatggctcaagaagtgcttctggacctacagaacacgcgtactcattggggaccccgggcgaccacaattctccggacactccattcagcatcatttgcataaagtggtggaatactctctcctggaaagtacgcggcaggagaattccggccttactacttccacagtgtggggcttccagccttag

SEQ ID NO: 26837 - DNA, 1131 bp, synthetic construct
  source 1..1131: mol_type = other DNA; note = Synthetic coding sequence
atggccgcccccagccccagcggcacccccgtgagcagcatgcaggggaagagaaaagcgttgaagctgaacttcgccaacccacctttcaagtctaccgcgcggttcactctcaatcccaatcccaccggcgttcagaatccccatattgaacggctgaggacccactcaatagaatcgagtgggaaattaaaaatctcacccgaacagcattgggactttactgctgaagatctaaaagacctgggagaaattggccgcggcgcctacggatccgttaacaagatggtccacaagcctagcggacaaattatggcagtgaagaggataagaagtaccgtcgacgagaaagagcagaaacagttgttgatggacctggacgtggttatgagatcctctgactgcccttatatcgtccagttctacggtgccctttttcgcgaaggcgattgttggatctgcatggaactcatgtccaccagctttgacaaattttataagtacgtttatagcgtgctcgatgacgttattcctgaggaaattcttggaaagattaccttggctaccgtcaaggccctgaaccatctgaaagaaaaccttaagattatccaccgggatatcaagcctagcaacattttacttgacaggtctggcaacattaagctctgcgattttgggatctctggccaattagtggatagtatcgctaaaacccgggacgccggatgtagaccctatatggccccagaaagaattgatccttccgcgtccaggcaagggtacgacgtgcgctccgacgtgtggtcgttaggcattactctttacgagctggccaccggcagatttccttacccgaaatggaactctgtgttcgatcagttgacacaggtcgtgaaaggggaccctcctcaactcagcaattcagaagaacgcgagttttctcctagtttcatcaacttcgttaatctgtgtcttacaaaagatgagtccaaacggcccaaatacaaggaactcctcaagcacccattcatcttgatgtacgaagaacgggctgtggaggtggcctgctacgtttgcaagatacttgatcagatgcctgccacgccctcttcacccatgtacgtggactag

SEQ ID NO: 26838 - DNA, 1035 bp, synthetic construct
  source 1..1035: mol_type = other DNA; note = Synthetic coding sequence
atggccggcagcggctgcgcctggggcgccgagcccccccggttccttgaggcattcggaagactctggcaggtacagtcccgactgggctccggcagtagcgcctcggtgtatcgcgtgcggtgttgcgggaacccaggttccccccctggagctctgaagcaatttcttccacctggaaccacgggagcggccgctagcgcagccgaatacggtttcagaaaagagcgcgccgccttggaacaactccagggccataggaatatcgtcaccttatacggggtattcacaattcacttctctcccaatgtgccctcacgctgtctgttactggaactactcgatgtctctgtgagcgaactgctgttgtactcgtcacatcaaggttgctcaatgtggatgatacagcactgtgctcgggatgtgctggaggctctggcgtttcttcatcatgaaggctacgtccatgctgacctgaagccaagaaatattttgtggtctgcggaaaatgagtgtttcaagcttattgactttggtctgtcatttaaggagggcaaccaggatgttaagtacatccaaaccgacggctatcgggcccctgaagctgagctccagaattgcctggcgcaagctggcctgcagtcggacactgaatgtacctccgccgtggacttgtggtcgctcgggataatcttactcgaaatgttttcgggcatgaagcttaagcatactgtcagatcccaggagtggaaggccaattctagcgccattatcgatcacattttcgcgtcaaaagccgtagtgaatgcggccatcccagcgtatcaccttcgggacttgattaaatccatgcttcacgatgacccttccagacgtatacctgctgagatggccctatgctccccgtttttctccatcccatttgcccctcatatagaggacctggtgatgctaccaactccagtgctgcggcttctgaatgtgctggacgatgactacctcgagaatgaagaagagtacgaggggctatgttag

SEQ ID NO: 26839 - DNA, 1467 bp, synthetic construct
  source 1..1467: mol_type = other DNA; note = Synthetic coding sequence
atggccctgaagatgaacaccctgagcagcaaccgggccaacatgcttaaggaagtacaactgatgaatcgtctgagccaccccaacattctgagatttatgggagtgtgcgttcatcagggccagctacatgccttaaccgaatatatcaatagcggcaatctggaacaactcttggattcaaatctgcatctgccgtggacagtcagagtgaagcttgcttacgacattgctgtggggctatcctatctgcactttaagggcattttccaccgcgacttgacctcaaagaattgtctgatcaagcgggatgaaaatgggtacagcgccgtggtggccgattttgggctggcagagaagattccagacgtgtccatggggtcggaaaaactggctgtagtgggcagcccattctggatggcccccgaagtgctcagggatgaaccctataacgagaaagccgatgtgttttcatacggaatcattctgtgtgagatcatagcccgaattcaggccgatcccgactatcttcctcggacagagaatttcggtctggactacgacgcctttcaacatatggtgggcgactgccctccagactttctacagttgacatttaactgttgtaacatggatcctaaactgcggccatctttcgttgagatcgggaagacgctagaggagattctgtctcggctccaggaggaggaacaggagagagatagaaaactgcaacctacggcgagagggttattggaaaaagcccctggagtcaagcgcctgtcgtctctcgatgataagatccctcacaagagcccttgtccaaggaggacgatttggctttctaggtcccagtcagacattttctctaggaagcccccccgcactgtctcggtcttggatccctattacaggcccagggatggtgctgctcggacccccaaagtgaatccattttccgctaggcaggatctcatgggagggaaaatcaagttcttcgacctgccatctaaatcggtaatcagtctggtgtttgacttggatgctccaggtcctgggaccatgcctctggcagattggcaagagcctttggctcccccaataagaagatggcgctcactccctggttcccccgagttcttacatcaggaagcctgcccatttgttggacgcgaggaaagcctgtctgatggcccgcctcctaggctctcctccctgaaataccgggtgaaggaaatccctccctttcgcgcatctgcactgccagccgctcaggctcacgaagctatggattgcagcatcctgcaagaagaaaacggctttggaagccgcccccagggaacctctccatgccccgccggtgcctccgaggaaatggaggtcgaggaaaggcccgcaggtagcacccctgccactttcagcacttccggcattgggctgcagacccagggaaagcaggatgggtag

SEQ ID NO: 26840 - DNA, 1458 bp, synthetic construct
  source 1..1458: mol_type = other DNA; note = Synthetic coding sequence
atgaccctgtggatcctgcccaagttcaaggccgtggacttcagccccagtttggctgcttatacccacacgtggctgttacctaggtttctagagattctcatccaatgcggacactgcaagaggctggcgcccgaatatgaagctgctgctactagactcaagggaattgttccactcgcgaaagtggattgtaccgcgaacacgaatacatgcaataagtatggcgtgagcggctaccccacactgaagatctttcgtgacggtgaggaggctggagcttatgatggccccagaacagctgatggcatcgtttctcatctgaagaagcaagcaggcccagcctcagtgcccctcagaaccgaagaggaatttaagaagtttatttccgataaggatgccagtatcgtcgggtttttcgacgatagctttagcgaggcacattccgagtttctgaaggctgcgtctaatttaagagataattaccggttcgcccatactaacgtggagtcactggtgaatgaatacgacgataatggagagggtattatactgtttcgcccgtcacatctgacaaacaagtttgaggataaaactgtggcatacacagaacaaaaaatgacctccggcaagatcaaaaagttcatacaggaaaacatatttggcatttgtccacatatgactgaagataataaagatcttatccaagggaaagacctgctgatcgcttactatgatgtggactacgaaaagaacgcaaaaggatcaaattactggaggaacagagtgatgatggtggccaaaaaattcctggatgccggccacaagcttaatttcgctgtggcaagtaggaagacattttctcacgagcttagcgattttggtctggaaagtacagcgggggaaatccctgttgtggcaatccggacagccaagggggaaaagtttgtgatgcaggaggaatttagccgagatggtaaggcactagaacgatttttacaggactacttcgatggaaacttgaaaagatacctgaagtccgagcctatccccgaatctaacgatggacctgtcaaagtggtggtggccgagaattttgatgaaattgtgaacaatgagaataaagacgtgctcattgaattttacgcaccatggtgtgggcattgtaagaatctggaacctaagtataaggaactaggagaaaagctgtccaaagaccctaacatagtgattgccaagatggacgccacggcaaacgacgtgccttccccgtatgaagtcaggggctttcctacgatctacttttccccagcaaataagaagctgaatccgaagaagtacgaaggaggaagagagctgtccgatttcattagctacttgcagagagaggctacaaaccctccagtgatccaggaagaaaaaccaaagaaaaagaagaaagcccaagaagacctctag

SEQ ID NO: 26841 - DNA, 885 bp, synthetic construct
  source 1..885: mol_type = other DNA; note = Synthetic coding sequence
atgagcgcccagcacttcgtgagcaccgagcaggtggagctgcccggtcctgggcagtgggtggtagccgaatgcccagcgcgggttgatttctctggtggctggagcgacacacccccgttggcatatgagctgggaggggctgtgttgggcctggccgtgcgcgtggacggcaggaggccaatcggggccagggcacggagaattccagagccggagctgtggctggctgtaggtcccagacaggatgagatgactgtgaagatcgtgtgcagatgtttggcagacctcagggactattgtcagccacacgcccccggggcactcctgaaagcagctttcatttgcgcaggtatcgtgcacgtacatagcgagctccaattgtctgagcagttgctccgaactttcggaggtggattcgaattgcacacatggtccgagttaccccacggatctggtctcggtacaagttccatattggccggaaccgccctcgctgccctgcagcgggccgcaggaagggtagtgggcacggaagctctgatccatgctgttctacacttggaacaggtgctgacaacgggagggggttggcaggatcaggtgggaggccttatgcctgggatcaaggtggggcggagcagggcgcagcttcctctaaaagtggaggtggaagaggttactgtgcctgaggggttcgtccagaagctgaatgaccacctgctgctggtgtatacggggaagacaaggctggctcgaaatcttttgcaggatgtcttgcgatcttggtacgctagactcccagcagttgtgcaaaacgcacatagtttggtacgacaaaccgaagaatgtgccgagggctttagacaaggatcccatatttag

SEQ ID NO: 26842 - DNA, 945 bp, synthetic construct
  source 1..945: mol_type = other DNA; note = Synthetic coding sequence
gtgggccggatggagggctgcagcagccccatcgtggtgaagttcgctgacacgcagaaggacaaggagcaacgacggttacagcagcagctggcccagcagatgcagcagttgaatacagcaacctgggggaacctgaccgggctgggaggactcactccccagtatctggccctgttgcagcaggctacatcttcaagtaatttgggcgccttctccggaattcagcagatggcaggtatgaacgccctgcagctgcagaacttagctactcttgccgccgccgctgccgccgctcagactagtgcgacttcaaccaatgcaaaccccctctctactactagcagcgctcttggggctcttacttctcccgtggcagcctctacacccaactccacggcaggggccgcaatgaacagcctgacttccctcggaaccctgcaaggcctggcgggagctactgtgggcctgaataatattaatgccttggccggaatggcggctcttaatggagggctgggagcgaccggactcactaacgggactgccggtaccatggatgctctgactcaagcatacagcggcatccaacaatatgctgctgcagcattgccgaccctttatagccagagccttctacagcagcagtcggctgctggctcacagaaggagggccctgagggagctaatctatttatctatcacttaccacaggaattcggcgaccaggatatcttgcagatgttcatgccgtttggaaacgtgatctccgccaaagtgtttattgacaagcaaacaaatctttccaagtgcttcgggttcgtaagttacgataatccagtctccgcgcaagccgctatccaggccatgaatggatttcagatcggaatgaagagattgaaggtccagcttaaaagaagtaaaaacgactccaaaccttattag

SEQ ID NO: 26843 - DNA, 1083 bp, synthetic construct
  source 1..1083: mol_type = other DNA; note = Synthetic coding sequence
agcatggagaagacctacaccagcaccagcaacaacagcatcagcggttccctgaaaagactggaggatacaactgctaggttcactaacgcaaattttcaggaagtgagcgcccacacttcctcagggaaagacgtgagcgagactcgaggcagcgaagggaaaggcaagaaatctagcgcgcactcttcgggacagcgtggaagaaaacccgggggcggccggaacccaggcacaaccgttagtgcagctagtccttttccccaggcaggctataagcgcgcccagacatctggtatcgaggaggagactgttaaggagaaaaagcgtaaggggaataaacagagcaagcacgggcctggccgtcccaaaggcaataaaaaccaagagaacgtgtcacatctctctgtctcgagcgcgagcccaactagctctgtcgctagtgccgccggctccatcacctcaagcagcctgcagaaatcacccaccttgctcaggaacggttcgctccagtccctctccgtcggctctagccccgtggggtccgagatttcaatgcagtaccgccacgatggagcttgccctacgaccacattttccgaactgctgaacgctatacataacgacagaggcgacagttccacattgaccaagcaagaactgaagttcatcggcatatacaactctaacgatgtcgctgttagctttcctaatgtagtgtctgggtcaggaagctctactccagtgagtagcagtcatctgcctcagcagtcatcaggccatcttcagcaggtgggtgccctgtccccatcggccgttagttctgccgcgcccgcggtggctactacccaggccaacacactgtcaggctcctctctcagtcaggccccatcacacatgtatgggaatcggtcgaattcgagtatggcggccctgatcgctcagtccgagaacaatcagacagatcaggacctcggagataattctcgcaacctggtcggacgcggaagctcaccacgtgggtcgctgtcaccgaggagtccggtctctagcctgcagatcagatatgaccagcccggttag

SEQ ID NO: 26844 - DNA, 924 bp, synthetic construct
  source 1..924: mol_type = other DNA; note = Synthetic coding sequence
atgcagagcctgaccctggacctgctgggccccagcgagctgctgttggccctcaatatgggcaacacttctttcaatgaggtcatggaggcacaactgccatcccacggggggcctaaaccatctgctgaaagcgacatggggaccaggagggactacattatggccaagtacgtggagcaccggttcgcacggcggtgcactcccgaaccgcagaggctttggaccgccatctgcaacagagatctgctgtctgttctggaagccttcgcaaacggacaggattttggacagccacttcctggcccagatgcccaggctcctgaggagttggtcttgcatctcgctgtgaaagtcgcaaaccaggctagtctgccactcgttgactttatcatccagaatggcggacatcttgacgcgaaggcagcggacgggaacaccgctttacattatgctgcattatataaccagcccgattgcctcaaacttctgctcaagggcagagctcttgtgggaactgtgaacgaagccggtgagacagccctggatatcgctagaaaaaaacaccacaaggaatgcgaagagcttttggagcaggcccaggccggcacttttgcctttcctttgcacgtggactatagttgggtgatatctaccgagccgggttccgatagcgaagaagatgaagaagaaaagagatgcctactcaaactgccggcacaagctcattgggcctctggacggttggacatctccaacaaaacttacgagactgtggcttctctcggcgctgcaacacctcaaggagaatcagaagactgcccgccccctctacccgtgaagaacagctcacgcactctagtgcaggggtgcgcgcggcatgcctccggcggtcggagggaggaaagggctagacgcgagtag

SEQ ID NO: 26845 - DNA, 1497 bp, synthetic construct
  source 1..1497: mol_type = other DNA; note = Synthetic coding sequence
atgagcagctgcgtgagcagccagcccagcagcaaccgggccgccccccaggatgaactgggcggccgagggtctagctcttccgaatctcaaaagccatgtgaggctctacgcggcttgtctagcctgtcaattcatctcggtatggaaagctttatcgtggtgactgaatgcgagcccgggtgtgcagtggatctgggcctggcgcgcgatagaccccttgaagccgatggacaggaggtacccctggatacctccggctcacaggccaggcctcaccttagtggtcgcaaactgtctcttcaagaaagaagccagggcgggcttgctgctggcggatcgctggacatgaacggcagatgcatctgcccaagcctgccctacagcccagtatctagtccacagagtagtccacggctcccgagaaggccaactgtcgagtcccaccacgttagcatcaccggtatgcaggactgcgtacagctgaatcagtacacactgaaggatgagataggaaaggggagttacggcgttgtcaaacttgcctacaacgagaacgataacacctattacgcaatgaaagtactctcaaaaaagaagctgatacgtcaagccggttttccacgtcgccctccgcctcggggaacccggccagcccccgggggatgtattcagcctagagggcctattgagcaggtctatcaagaaatcgccatcctgaagaaattggaccaccccaatgtggtgaaactcgtagaggtgcttgatgatcctaatgaagaccacctgtatatggtgtttgagctggtgaaccaaggacctgtcatggaagttccaactctcaagcccctgtccgaggaccaggctcgcttttactttcaggacttaataaaaggcattgagtatctgcactatcagaaaatcatacatcgcgatattaagcccagcaacctgctggtgggcgaagatggacacatcaaaattgcagatttcggagtatctaacgaatttaaagggtccgatgcgctcttatccaataccgtcggaacccccgctttcatggcccctgagagcctcagcgaaacccgaaagatttttagcggtaaagctctggatgtctgggcaatgggagtaaccctctattgctttgtgttcggacagtgtcctttcatggatgaaaggatcatgtgtctccattctaagattaagtcacaagccctggagttccctgatcagccagatatcgcagaggatttaaaagacttaattacacgaatgctcgataagaaccccgaatccaggatagtggtgccggagatcaagatcctcgttaagacgatgattaggaagcggagttttggtaacccattcgaaggctcaagacgcgaggagcgctctctgtcagcccccggcaacttgttgactaagcagggctccgaagacaacctccagggaactgatccaccaccagttggggaggaagaagttcttttatag

SEQ ID NO: 26846 - DNA, 600 bp, synthetic construct
  source 1..600: mol_type = other DNA; note = Synthetic coding sequence
atgacccccctggccccctgggaccccaagtacgaggccaaggccggacccaggcccgtctggggagcaaactgcagcagtggggcttctttctcaggcagaaccctatgccaccctagtttttggcccctctatgaggccgcttccggccgcggcctgagaccagtggcccccgccacagggcattggaatgggcagcaagctcctcccgatgccggctttcctgtggtgtgctgtgaagatgtctttctgagtgatcccctgctcccccgggggcagcgtgtgccactgtacctatcaaaagctcctcagcaaatgatgggttcacttaagcttctgccccctccgcccattatgagcgctcgcgtacttccgagaccatccccgtctaggggtccatccacagcctggcttagcggacctgagctgatcgcacttacgggcctgctgcagatgtcccagggtgagcccagaccctcgtcgtcagctgtgggaccacccgatcacacatctgaccccccaagcccctgtggttctccaagcagttcccagggcgcagatcttagcctgccacaaacccctgacacacactgcccctag

SEQ ID NO: 26847 - DNA, 1248 bp, synthetic construct
  source 1..1248: mol_type = other DNA; note = Synthetic coding sequence
atgtggcggaaggtgtacaccccccggagcagcttcgagctgagcgcacagcctccatcttgggaacaacgtaagctgctggagaagtgtgcaatgactgcgcttagctcgaaattaattagtcagcagaaggcctttttcgcaaagatggtagtcgatgcagttatgatgctggatgacctgttacaattgaagatgatcggaataaagaaagtgcagggaggtgccctggaagactcccagctagtcgccggtgtggctttcaagaaaactttcagttacgccggtttcgagatgcaacctaagaagtaccacaatcctaagatcgctttgctcaacgttgagctggagctcaaggccgagaaagacaatgctgagatccgggtccacactgtcgaggactaccaagccatcgtcgacgctgagtggaacatcctctatgataaactcgaaaaaatccaccatagcggcgctaaggtagtgctgtcgaagctccctattggagacgtggcaacccagtacttcgccgacagggacatgttctgtgccggccgggtgcccgaggaggacctgaaacggactatgatggcttgtggggggagcattcagacatccgtgaacgccctttcggctgacgtattgggcaggtgtcaagtgtttgaagaaacacagattgggggagaacggtacaacttctttacagggtgccctaaggcaaaaacgtgtactttcatcttgagaggtggagcggaacagtttatggaggaaactgagcgcagtctccatgacgcaataatgattgtgcggagagctattaagaatgacagtgtagtcgccggcgggggtgcaatcgagatggaactatctaagtatttgagagattactcaaggacgatccctggaaagcagcaactgcttattggagcgtatgcaaaggccttggagattattccccgccaactgtgcgataatgcgggtttcgacgccaccaatattttgaataaacttagagctcgccatgcccagggcggcacatggtatggagtggacatcaataacgaggatatcgcggacaacttcgaagcgttcgtatgggagccagccatggtccgcataaacgcactgaccgctgcctcggaagccgcctgcttgattgtgtctgtggacgagaccattaaaaatccaaggtctaccgtggacgccccaaccgcggcggggcggggacgcggacgcggtcgacctcattag

SEQ ID NO: 26848 - DNA, 3117 bp, synthetic construct
  source 1..3117: mol_type = other DNA; note = Synthetic coding sequence
atggtgagcagcgcccagatgggcttcaacctgcaggccctgctggaacagctgtctcaggatgagctgtcaaagtttaaatacctgataacaactttctccctagcacacgagcttcagaagatcccacacaaggaggtcgataaggccgatggaaaacagctggtcgaaattctgactacgcattgtgacagttactgggtggaaatggccagcttacaggtctttgagaaaatgcatcgaatggatctgtcagagcgggccaaggacgaagtccgcgaagctgccttaaaaagctttaacaaacggaagcctctgagcctggccttcaccgagaccaaaggcaatgttatatgtctggggaaagaggtcttcaaaggtaagaagcccgacaaggacaaccggtgcaggtatatcttgaaaaccaagtttcgtgaaatgtggaaatcttggccaggggattcaaaagaagtacaggtcatggccgaacggtataagatgctgattccgttttctaatcccagggttctccctggcccatttagttacacggtcgtcctgtatggacctgcaggcctcgggaaaactacccttgcccaaaagctcatgctcgactgggccgaggacaacctgatccacaagtttaaatacgcgttctacctcagctgccgggaactgtccagactagggccctgctctttcgccgaactcgtatttagggactggcccgagctccaggacgatatcccacacatattggctcaggctcggaagattctgtttgttatcgatggttttgacgaactcggggctgcccctggggcactcatcgaagacatctgcggagattgggagaagaagaaacctgttcctgtgctgctaggctcattactaaacagggtaatgctgcctaaagctgccctgcttgtcaccacgaggccacgcgccctccgggacctgagaattcttgcagaggagcctatctatatccgcgtagaggggttcctggaggaggacagaagagcatattttctgcggcactttggggatgaagatcaagccatgagagcatttgagctgatgagatccaatgcagcgctattccagctcggaagcgcacccgctgtgtgttggattgtgtgcacgaccctgaaactgcaaatggaaaagggcgaagacccagtgccgacgtgtctgacacgcaccgggttgtttctcaggttcctctgttccaggttccctcagggtgctcagcttagaggggcactgaggacactgtctctcctggccgcccagggactttgggcgcagactagtgtgcttcatcgggaggatctggagaggctgggagttcaagagtccgatctgcgcctctttctggatggagacatcttacgccaggatcgcgtgtcaaaaggatgttactctttcatccacttgtctttccagcaattcctgacagcactgttctacaccctggagaaggaggaagaagaagatcgtgacgggcacacatgggacataggagacgtgcaaaagctgctctcgggtgtggaacggctaaggaaccctgacctcatccaggctggttattattctttcggattggccaacgaaaaaagggctaaggaattggaagcaacctttggatgccggatgtctccagatattaaacaggaattattgcgatgtgacatcagttgtaagggtggtcactcaaccgtgacagatctgcaggagctccttgggtgcttgtatgaatcccaggaggaagaactggtgaaggaagtcatggcgcagtttaaagaaatctcgctgcatctgaacgcagtggatgttgttccgtcctcgttctgtgttaagcattgccgcaatctccagaagatgagtttacaagtgattaaggagaatttaccagagaatgtaacggcctcagagtccgacgcagaggtcgagcgctcccaggacgatcagcatatgctgccattttggactgacctgtgttcaatctttggctccaacaaggacctgatgggactggcaatcaacgactcattcttaagcgcctctctggtgcgcattctgtgcgagcaaattgcaagtgacacttgccatttgcagcgagtggtgttcaaaaatattagccctgccgacgctcacagaaacctctgtctggccttacggggtcacaaaactgttacgtacctcaccctacaaggcaatgatcaagatgacatgttccctgccctttgtgaggtgctccggcatcctgagtgcaatctgagatacctggggttagtgagttgcagtgccactacacagcagtgggccgatctctcactggccctagaggttaaccagtccctgacctgtgtaaatctgagtgacaacgagttactggacgagggcgccaagttgctctatacaacattgcgccaccccaaatgctttctgcagaggctgagcttagaaaactgtcacctgacagaggcaaactgcaaggacttggcggccgttctggtagtgagtcgggagctcacccatctttgcttagcaaaaaatcctattggaaatacgggagtgaaattcttatgtgagggcttgagataccccgaatgcaagctccagacgctcgtgctgtggaactgtgacatcactagtgacggttgctgcgatctgacaaaactcctgcaggaaaaatccagcctgctgtgccttgatctagggctcaaccatatcggagtgaaaggcatgaaattcctgtgtgaagccctgagaaagccactatgtaatcttcgttgcctgtggctctggggctgctctattccacctttctcctgcgaggatctctgcagcgcactgagctgcaatcagagcttggtgacactggatctgggccagaacccacttggaagcagtggagtcaaaatgctgtttgagactttaacttgtagctcaggaacattacggaccctgcgcctcaaaatcgacgacttcaacgatgagctcaacaagctcttagaggagatcgaggaaaaaaatcctcagctcatcatcgacactgaaaaacatcatccttgggcggaaaggccgtcatctcacgactttatgatctag

SEQ ID NO: 26849 - DNA, 1443 bp, synthetic construct
  source 1..1443: mol_type = other DNA; note = Synthetic coding sequence
atgcggctgcggcggctggccctgttccccggcgtggccctgctgttggccgcagccagactcgctgccgcatcggaattctttgcaccctggtgtgggcactgcaagcgtttggctccggaatacgaggcagcggctactcgactcaaaggaatcgtccccctagcaaaagtcgactgtaccgctaatacaaatacatgcaataaatatggcgtgtctggatatcctaccctgaaaatctttcgcgatggcgaggaggctggagcctatgatgggccccggaccgccgacggcattgtgtcccaccttaaaaagcaagcggggcctgccagtgtgccgcttcgaaccgaagaggagttcaagaagttcatttcagacaaagacgcttctatcgtcgggtttttcgatgatagttttagtgaagctcacagtgagttcctgaaggccgccagtaacttacgggacaattaccgattcgctcacacaaacgttgaaagtcttgtgaatgagtatgatgacaacggtgaggggattattttatttcgtccttcacacctgactaataagttcgaagacaagaccgtagcctacactgaacagaagatgacttccgggaagatcaagaagttcatccaagagaatatttttggtatctgccctcacatgacagaggataataaggatttgatccaaggaaaggacttactgatagcctattatgacgtggactacgaaaagaatgctaaagggagcaactattggagaaatagagtcatgatggttgccaagaagttcctcgatgccgggcataagctgaatttcgccgtagcttcacgtaagacattcagccacgaactgtccgactttggcctggagagcactgctggcgaaattcccgtagtcgcaatcaggaccgccaagggtgagaaattcgtaatgcaggaggaattttctcgagatggcaaagccctggagaggttcctgcaggactatttcgacggcaacctgaagcgctacctcaaatcggaacctatacctgagagcaacgatggccctgtgaaagttgtcgtcgcggagaacttcgatgaaatcgtgaacaacgaaaacaaggacgttctgattgaattctatgccccgtggtgtggccactgcaagaacctagaacccaagtataaagaactgggggagaaactcagcaaagatcctaatatcgttattgctaaaatggacgccaccgctaatgacgtcccgtcaccctatgaggtgcggggttttcctaccatttactttagccctgcgaacaagaagcttaacccgaagaagtacgaaggcggcagagagctcagtgacttcatcagctatcttcagagggaagctacgaacccacccgttatccaggaagagaagcctaagaaaaagaaaaaagcacaggaagacctctag

SEQ ID NO: 26850 - DNA, 228 bp, synthetic construct
  source 1..228: mol_type = other DNA; note = Synthetic coding sequence
atgggcgtgaagctggagatcttccggatgatcatctacctgacctttcctgtcgcgatgttctgggtctcaaatcaggctgagtggtttgaagatgatgtgatccagcggaaacgcgaactgtggcccccagagaagctccaagaactcgaggaatttaaagagaggctgcgaaagcggaaacgccgagaggaaaagctgctacgagatgcccagcagaattcctag

SEQ ID NO: 26851 - DNA, 807 bp, synthetic construct
  source 1..807: mol_type = other DNA; note = Synthetic coding sequence
atgggcagcgccaagagcgtgcccgtgacccccgcccggccccccccacacaacaagcacctcgctagggtggcagatccacgttctccatccgcaggcattttgagaacacctatacaggtggagtcgagtccccaaccaggacttccagccggcgagcagctggagggactcaagcacgctcaggattcagacccacgttcacctaccttgggtatcgctaggactcctatgaagacaagctccggggaccccccttctcccctggttaagcagctgtctgaggtttttgaaactgaggattcaaagtctaatctcccccctgaacctgtgctccctcccgaagcacctctcagctccgaattagacctacccctcggcacccagctatcagtggaagagcagatgcccccctggaatcaaacagaatttccatctaaacaggtcttctctaaggaggaggcccgtcagccaacagaaacccctgtggcatcgcagagctccgacaagccttctcgcgatcccgagaccccacgtagcagcggcagcatgcggaatagatggaagccgaactccagcaaggtgctgggtagatcacctttgacgatactgcaggacgataatagtccgggcacacttacgctgcgccaggggaaacgaccttctcccctgagcgagaatgtgagcgaactcaaagagggagcaattttggggactgggcgtctcctcaaaacagggggccgggcctgggaacagggtcaggaccacgacaaggaaaatcagcattttcccctcgtggaatcatag

SEQ ID NO: 26852 - DNA, 351 bp, synthetic construct
  source 1..351: mol_type = other DNA; note = Synthetic coding sequence
atgctgctggagtgcggcatgcaggaggagggcctgttccgggtggcgccctctgcctccaagctgaagaaactgaaggcggcgctggattgctgcgtggtggatgtgcaagaatacagcgcagacccacacgctattgctggtgccttgaagtcttacctacgggaactgccagaacctctgatgacttttgaactttatgatgagtggattcaggcaagcaatgtccaggagcaggataaaaagctgcaggctctttggaacgcctgcgagaagctgcccaaggctaatcacaacaacatccgctacctcatcaaattttatcccagttgccagaatattaagatgtag

SEQ ID NO: 26853 - DNA, 906 bp, synthetic construct
  source 1..906: mol_type = other DNA; note = Synthetic coding sequence
atggtgcggaccaagacctggaccctgaagaagcacttcgtgggctaccctacaaactctgatttcgagctgaaaacggccgagttgccgcccctgaaaaatggagaggtgctcctggaagcactttttctgacagtcgatccttatatgcgggtggcggcaaagaggctgaaggaaggcgacacaatgatgggccagcaggtagccaaggtggtggaatctaagaatgttgcgttgcctaagggaacaatcgttctcgccagccctggctggacgacgcactccatctccgatgggaaagacctagagaagctactgacagagtggcctgacaccattcctctgtctttggccctgggaaccgtgggaatgcccggactgactgcctattttggactcttagaaatttgtggagtgaaggggggagaaacggtcatggtcaacgccgcagcaggtgcggtgggctcagtggtcggtcagattgccaagttgaaaggctgcaaggtggtgggtgccgtcgggtcagacgagaaggtggcctacctccagaaattaggctttgatgtcgtgtttaattacaaaacagtggaatccttagaagagaccctcaagaaagcctccccagacggatacgattgctattttgataatgtgggcggcgagttttccaacaccgttatcggacaaatgaaaaagtttggaaggatagccatctgtggggcaataagcacgtacaaccgaacaggtccgcttccccctggtccaccgcccgagattgtgatctaccaggagctgaggatggaggcattcgtggtctatcgatggcagggagacgctaggcaaaaggcgctgaaagacctgctcaagtgggtactggaaattaagcgcgagaatgaggaagattag

SEQ ID NO: 26854 - DNA, 1068 bp, synthetic construct
  source 1..1068: mol_type = other DNA; note = Synthetic coding sequence
atgctgggcagcggcttcaaggccgagcggctgcgggtgaacctgcggcttgtcatcaacagactgaaattgctagaaaaaaaaaagactgagctggctcagaaggcgcgcaaggaaattgccgactaccttgccgcagggaaagacgagagagcacgcatccgcgtggaacatattataagagaggactaccttgtggaggccatggagatcctcgaactttactgtgatctacttctcgccaggttcggcctgattcagtctatgaaggaactcgacagcggcttggctgagtccgtctctacactggccgagctgaagatagttgccgatcagttgtgcgcgaagtattctaaagagtatggcaagctgtgtcgcacaaaccagattgggactgtcaacgacaggttaatgcacaagctatccgtggaggcgccaccaaaaatcttggtggaacgctatctgatagagatagcaaagaattacaatgttccttacgagcccgatagcgtggtgatggctgaggcaccccccggggtcgagacagacctgatcgacgtgggtttcaccgacgacgtgaaaaagggcggccccggtagaggcgggtcgggaggcttcacagcacctgtgggcgggccggacggaacagtccccatgccaatgccaatgcccatgcctatgccgtcagctaatacccctttttcataccccctgcccaaagggccgagtgacttcaacggactgcccatgggcacttaccaagcatttccaaatattcacccgccacagatcccagccacaccccccagctatgaatccgtggacgacatcaatgctgataagaatataagcagcgcccagatcgttggccctgggccaaagcctgaggccagcgccaagttaccatccaggcccgcagacaattacgataattttgtactgccagaactccccagcgtgcccgatactcttccaacagcgtctgccggcgctagtactagtgccagcgaagatatcgactttgacgacctgtccaggagatttgaggaattgaagaagaaaacatag

SEQ ID NO: 26855 - DNA, 2175 bp, synthetic construct
  source 1..2175: mol_type = other DNA; note = Synthetic coding sequence
atgcagatgaccatccaggccctgcaggacgagctgcggatccagagggatctgaatcagcttttccaacaggacagttcctcacggacaggagaaccctgcgtggccgaactcacagaggaaaactttcagagactacatgccgagcatgagaggcaggcgaaagagctcttcctgctcaggaagactctggaggaaatggagctccggatagagacacagaagcagacgctaaacgcccgtgacgagtctattaaaaagctcttggaaatgctgcaatctaagggcctgtcagcaaaagccacagaggaagatcacgagcgcacaaggcgcctcgcagaggccgagatgcacgtgcatcacctggagtctttactggaacagaaggagaaggagaattctatgctgagagaggagatgcacaggagatttgaaaacgcccccgacagcgccaagaccaaggccctgcagactgttattgaaatgaaggatagtaagatttcttccatggagcgcgggctgagggatctggaagaagagatccaaatgctaaaaagcaacggcgctctgagcacagaggaaagggaagaagaaatgaaacagatggaagtgtatcggtcccacagtaagtttatgaagaataaaatcgggcaggtaaagcaggagttgtcaagaaaggataccgaactgttggccctacagaccaagctagagaccctgacaaaccagttcagtgactcaaaacagcacatcgaggtcctgaaagaatctctgacagctaaggagcagcgcgccgctatactgcagaccgaagtggatgccttgcgacttagactagaagagaaggagacgatgctcaacaagaagactaaacagatacaagacatggctgaggagaagggtacgcaagccggagaaatccacgatttgaaggacatgctcgacgtaaaagaaaggaaggtgaacgtgttgcagaagaaaatagaaaacttacaggaacagcttcgtgacaaggaaaaacagatgtcctcactcaaggagagggtgaagtcccttcaggctgacaccaccaacacggacactgctctcactactctggaggaagcactggcagagaaagagcgcacaatagagaggttgaaagagcagagagatcgagatgagagggaaaagcaggaagaaattgacaactacaagaaggatctgaaggatctgaaggagaaagtgtctctcctgcagggtgacttgtcagagaaagaagcctctcttttagacctgaaggagcacgcttcctccttagctagctcaggtctgaagaaagacagcagattgaagaccctggaaattgcattggaacagaagaaagaggagtgtctcaagatggaaagtcagttgaagaaagcgcatgaagccgccctggaggctagagcctcacccgagatgagcgatcggattcaacatcttgagcgggagataacacgctacaaagatgagtccagcaaagctcaagcagaggttgatcggttgctggagatactgaaagaggttgaaaatgagaagaatgacaaggacaaaaagattgccgagctggagtctttgacttccagacaggtgaaggaccaaaacaagaaggtggccaatctgaagcacaaagaacaggtggaaaagaaaaagagcgcgcaaatgttggaagaagcacggagacgcgaagataacctgaacgacagctcacagcagctccaggtcgaagaactgctcatggccatggagaaggtgaagcaggagcttgagagcatgaaggccaaattgtccagtacgcagcagagccttgctgagaaagaaacacacctcacaaatcttcgagctgagaggcggaaacacttggaagaagtactggaaatgaaacaggaggctctgctggcagctatctccgagaaagacgcaaacatcgctcttctggagctgtcgtcttcaaagaagaagacccaggaggaggtagcagctctgaagcgggaaaaagacaggctggtgcagcagctgaagcagcagacgcagaatcggatgaagctgatggctgataattatgaagacgatcactttaagtctagccattccaaccagactaatcataaacccagtcccgatcaggacgaagaagagggaatctgggcttag

SEQ ID NO: 26856 - DNA, 408 bp, synthetic construct
  source 1..408: mol_type = other DNA; note = Synthetic coding sequence
atggccatcggcttcaacgtggagaccgtgacctacaagaacctgaagtttcaggtgtgggatctgggcggccaaacgtcaatcaggccatattggcggtgctattatagtaacactgatgctgtcatttacgtcgtagatagttgtgacagggaccgcatcggaatcagtaagtcggagctcgtagctatgcttgaggaggaggaactgagaaaggctatcctagtcgtgttcgcgaacaaacaggacatggaacaggccatgacgtcgagcgaaatggcaaattcactggggttgcctgcgctgaaagatcggaagtggcagatctttaaaacgtccgccaccaagggaactggccttgatgaggccatggaatggcttgtcgaaaccctgaagtctaggcagtag

SEQ ID NO: 26857 - DNA, 684 bp, synthetic construct
  source 1..684: mol_type = other DNA; note = Synthetic coding sequence
cggcggcagatcctgaaggagctggccctgtgcctgcggcggcaggagatgtatggacctagagctgcttcccgcaataaagaaacaagcgctggacctgttgccgttatgggcaaagactactataagatcctggggatcccttcaggggccaacgaggatgaaattaaaaaagcttataggaagatggctctcaaataccatcccgacaagaataaggagccaaatgctgaagagaaattcaaagaaatcgccgaggcatatgatgtactatccgatccgaagaaaaggggcctgtatgaccagtacggggaggaggggctcaaaacaggcggtggaacatcgggtggcagctcaggtagtttccactatacttttcatggtgatccacacgcaacctttgcttcttttttcgggggctcgaacccattcgacattttctttgcttctagtagatccacacgaccatttagtggattcgaccccgacgacatggacgtggatgaagacgaggaccccttcggtgcattcgggagatttggctttaatgggctgtccagaggtcctcgcagggctccagaacctttgtatccaaggagaaaagtccaggacccacccgttgtgcacgaactcagagtcagtctggaggagatttaccacggctcaactaaacggatgaaatag

SEQ ID NO: 26858 - DNA, 252 bp, synthetic construct
  source 1..252: mol_type = other DNA; note = Synthetic coding sequence
atgagcatgctgaagcccagcggcctgaaggcccccaccaagatccttaagcctggatctacggcgcttaagactccgacggcagtcgtggcccctgttgaaaagacgatctcttctgagaaagcaagcagcacaccatcatccgagacccaggaggaattcgtggacgactttagagtgggcgagagggtgtgggtgaacggtaataaaccaggttttatccaatttctgggggagacccagttcgcatag

SEQ ID NO: 26859 - DNA, 642 bp, synthetic construct
  source 1..642: mol_type = other DNA; note = Synthetic coding sequence
atggacatgctgggcggccccggcatcgagagccagtgccggaaggtcgacataatcgccgatgcggcctacagtatttttcagaagccaaaatctttcactggtaactttgttattgatgagaatatcctgaaagaggaagggatcgaaaattttgatgtgtacgctattaagcccggtcatcccttgcaacccgacttcttcctagacgagtaccctgaggccgttagcaaaaaagtagaaagcacaggcgccgtgcccgagtttaaggaggaaaagctgcagctgcagcctaagccgcggagtggcgctgtagaagagactttccgaatcgtgaaggatagtctcagcgatgacgtcgtgaaggccactcaggccatatacctttttgagcttagtggcgaggatgggggcacttggttcctggacctcaagagcaaaggtggcaacgtagggtatggagaaccgtccgaccaggccgatgtggtcatgtccatgacgacagatgactttgtgaaaatgttttctggcaaactgaagccgaccatggcttttatgtctgggaagttgaaaataaagggcaatatggctttggcaattaagttagaaaagctgatgaatcagatgaacgcccgactgtag

SEQ ID NO: 26860 - DNA, 1230 bp, synthetic construct
  source 1..1230: mol_type = other DNA; note = Synthetic coding sequence
atgaaccggacctggccccggcggatctggggcagcagccaggacgaacccgagttcgctagctccgttcgcaggcctcacctaacctcagatgccgttgccttactgcgcgataatgtcacaccccgagagaacgagctgtggaccagcttaggtgacagctggaccaggcctggtctagaactttctcctgaagagggcccaccgtatcgcccagagttcttctccggttgggagccccccgtgacagacccacagagtcgtgcctgggaggacccggttgaaaagcaactgcaacacgagaggagaagacgacaggtgacccaggcaacacagcaaggtaggggatgggaggtccgcggcagaggtcggagcgcatggcctcggctaactagattgagttacttcctacagcagtcagccccccaggttgctgtcaatggtcaccgcgacctggagcctgagagcgagccgcagctggagtccgagacggcgggtaagtgggttctgtgtaattacgattttcaggctcggaactcatccgagctgagtgtgaaacagcgtgacgtgcttgaagtactagacgattcaagaaagtggtggaaggtcagagatcccgctggtcaagaggggtatgtcccttataatatcctgacgccataccccggcccgagacttcaccactcccagagtcccgctcggtctttgaactccacccccccccctccccccgcaccggctccggcccccccccccgctttagctagacctcgctgggatagaccaaggtgggattcttgcgattccctgaacggcctggatccctccgaaaaagagaaattctcccagatgctaatcgtcaatgaagaattacaggctagacttgcccagggaaggagcggaccctcaagagctgtcccaggccctagagcgccagaaccgcagttatcacctggcagcgacgcctcggaggttcgggcatggttgcaagccaaaggattttctagtggcactgttgatgcactgggcgtgctaacaggggcccagttgttctccttgcagaaagaagaactgcgcgcagtgtcacccgaagaaggcgctagagtttactcgcaagtgaccgtgcagcggtcgctgctggaggataaggaaaaggtgtcagagcttgaagcagtgatggaaaaacagaaaaaaaaggtagaaggggaggttgaaatggaggtcatctag

SEQ ID NO: 26861 - DNA, 1425 bp, synthetic construct
  source 1..1425: mol_type = other DNA; note = Synthetic coding sequence
atggccagcctgagccgggccctgcgggtggccgccgcccaccccagacaaagccccacgagaggtatggggccatgcaatctaagctcagcagctggacctaccgccgaaaaaagcgtcccttatcagagaaccctcaaagaggggcagggaacatccgtcgtggcccagggacctagcaggccgctgccaagtacagccaacgtcgtggtgatcggcggagggagtctcggttgtcagaccctctatcatcttgcaaaattggggatgagtggagctgtactgctcgagcgggaaagactcacctctgggaccacctggcacacagccgggctgttgtggcagcttcgcccttccgacgtcgaggtggaactcctggcccacactcgccgggtcgtgagtagagagttggaagaagaaacgggtctgcatacaggttggatccagaacgggggactgtttattgccagcaacaggcagaggctggatgagtataagagactgatgtccctgggcaaggcctacggggtggagtcccacgtcctctcacccgccgaaaccaagaccctttaccctttgatgaatgtcgatgacctgtacggcactctgtatgtgcctcacgatggtacgatggatccggccggcacatgcaccaccctcgcacgggccgcctccgccagaggggcacaggtgatagaaaattgcccagtgacagggattcgggtctggacagatgacttcggggtgcggagggtggccggggtagaaacccagcatggtagtatccagacaccttgtgtggtgaactgtgctggcgtgtgggcatccgcggtgggcagaatggcaggcgtgaaagtgcctttagtcgctatgcaccacgcctacgtggtcaccgagcgcatagagggcatccagaacatgcccaacgttcgggaccatgacgcttcagtttacctgcgtctgcagggtgatgccctctcagttggtggctacgaagccaacccgatcttttgggaggaggtctccgacaaattcgcatttggcctgtttgacctggattgggaagtgttcacccagcacatcgagggcgccattaacagggtgcctgtgctcgaaaagacaggtattaaaagcaccgtgtgtggcccagaatctttcacaccggatcataagccactcatgggggaggcacccgagctgcgggggttctttttaggatgtggcttcaactctgcggggatgatgcttggcggcggttgcggtcaagagctggctcattggattatccatgggagacctgaaaaagatatgcatgggtatgatatacggaggtttcaccactcattaaccgatcacccgcggtggataagggaacggtctcatgaatcttaccaggagctgctgcggagactaccgccaaggtag

SEQ ID NO: 26862 - DNA, 1893 bp, synthetic construct
  source 1..1893: mol_type = other DNA; note = Synthetic coding sequence
atgagcatcgagctgcagagcgtgagcaaccccgtgcaccggaaggacctcgtaataagattgaccgatgacactgaccctttcttcctgtacaatctagtgatctcggaggaagacttccagagtcttaagtttcagcagggacttctcgtggactttttggcttttccccagaagttcattgacttgctgcagcagtgtacccaggagcatgcgaaagagattccacggttcctgctgcagctggtttcccctgccgctattttagataactcacctgcgtttctgaacgtggtagaaactaacccctttaaacatctgactcatctgagcttgaagctgctccctggaaatgacgtggaaatcaagaagttcctggccggctgtcttaaatgttccaaagaggagaagctgagtcttatgcagtcgctggacgacgctaccaaacagcttgactttaccagaaagacactggctgaaaaaaagcaggaactcgataagctcaggaatgagtgggcgagccataccgcggctctgacgaataagcattctcaggagttgaccaatgaaaaggagaaggccctccaagcccaggtgcagtaccaacaacagcacgaacagcaaaaaaaggaccttgagatcttgcatcagcaaaacattcaccagctgcagaataggctgtccgagctcgaggccgcaaataaagacctgaccgaacggaaatataaaggggactcaaccattagagaactgaaggcaaagctgagcggggtggaggaagagctgcaacggaccaaacaggaagttctttccctgaggcgggaaaattctactcttgacgtagagtgccacgaaaaggagaaacatgttaatcagttgcaaaccaaggtagcagtcctcgagcaggagatcaaagacaaggaccagctcgtcctcagaactaaagaagcctttgacacaatacaggagcagaaagtcgtcctggaagagaacggcgagaagaatcaggttcagctgggcaagctcgaggcaaccatcaagagtcttagtgctgaactgctgaaagcaaatgaaatcatcaagaagctgcagggagatctgaaaactcttatgggcaaactcaagctgaagaacactgttacaatccagcaagaaaagctgctcgccgagaaggaggagaagctccagaaggagcaaaaagagctgcaggacgtagggcagtcactcagaatcaaagagcaggaggtctgcaaactgcaggaacagttggaagccactgtcaaaaagctcgaggagtctaagcagcttctaaagaataatgagaagctgattacttggctaaataaggaactcaatgagaaccagctggttaggaaacaggacgtgttaggaccttcaaccaccccgcccgctcactctagcagcaataccattaggtctggaatctctcctaatctgaatgtggtggatgggcgacttacctatcccacatgtggcatcgggtaccccgtctctagtgctttcgctttccagaatacgtttccccatagtatttctgcaaaaaacaccagccaccccggctcagggactaaagttcagtttaacttgcagtttactaagcctaacgcttctcttggtgatgtccagtcaggcgctacgatatccatgccatgttccaccgataaagagaatggggagaacgtaggacttgaaagtaaatatttgaagaagagagaggattcaatccctctgcgcggcttatcccagaatctcttttcaaatagcgatcatcagcgggacggtacactcggggcgttgcacacttcatccaagcccactgcactgccaagcgcgagcagcgcgtacttccctggacaactgccaaactcctag

SEQ ID NO: 26863 - DNA, 1170 bp, synthetic construct
  source 1..1170: mol_type = other DNA; note = Synthetic coding sequence
atggaccgggagaccctgatcgacgtggcccggaccagcctgcggaccaaagtgcacgccgagctggcagatgttctgacggaagctgtggtggatagcatcttagctataaagaagcaagatgaacctattgacctgttcatgatcgagatcatggagatgaaacacaaaagtgaaaccgacacctccctgattcgtggccttgtgcttgaccatggcgccaggcatcccgacatgaagaaaagagttgaggacgcatatatcctgacctgcaatgtgagtttggagtatgagaagactgaggtcaactctggattcttttataagtccgccgaagagcgtgagaagttggttaaggctgagcgaaagtttattgaggaccgcgttaagaaaatcatagaacttaaacgcaaagtctgcggcgattcagacaagggattcgtggtcataaaccagaaaggaatcgacccattcagccttgacgcattatctaaggaagggatagtcgctctgaggagggccaagcggcgcaacatggagcgcctgactttagcctgcggcggcgtggccctgaattcatttgatgacctgtcacctgactgcctgggtcatgcaggtctggtttacgaatacaccttgggcgaagagaagttcacattcatagagaagtgcaacaatccccgctccgtgacgctcctgattaagggcccgaacaagcacactttaactcagattaaagatgccgttagggacggtttaagggcggtgaagaatgcgatcgatgacgggtgtgttgtacctggagcgggcgcagtggaagtggcgatggctgaagccttgataaagcataagccgtctgttaaaggcagagctcagctgggtgttcaggcctttgccgatgcgctgctcatcatcccaaaggtgctggctcaaaacagcggctttgatctccaagagactctcgtgaagatccaggctgagcactctgaatcaggtcagttagtgggggtggacctgaacaccggcgaaccgatggtcgctgccgaggtaggagtatgggataattattgtgtcaagaaacaacttctgcactcctgcactgttattgccactaatatcctgctggtcgatgagatcatgagggctggaatgtcttcactgaaaggctag

SEQ ID NO: 26864 - DNA, 441 bp, synthetic construct
  source 1..441: mol_type = other DNA; note = Synthetic coding sequence
atgaccgtgaacgaggccaaggagaagctgaaggaggcccccgagggaacttttcttatacgcgactcgagccactctgactatctccttaccatctctgtgaagacatccgccggtccgactaatctgcggatcgagtatcaggacggaaagtttaggttagatagtattatttgtgtcaaatctaaactgaagcagttcgactccgtggtgcacttgatcgattattacgtgcagatgtgtaaggataagaggaccggtccagaagctccgagaaacgggactgtccacttgtatctgactaaacctttgtacacctctgctccaagcctccagcacctctgccgcctgactatcaacaaatgcaccggagccatctggggtctcccacttcctacacgtcttaaagactacctggaagaatataaatttcaggtgtag

SEQ ID NO: 26865 - DNA, 1905 bp, synthetic construct
  source 1..1905: mol_type = other DNA; note = Synthetic coding sequence
atgctggagtacgccctgaagcaggagcgggccaagtaccacaagttgaaattcggcacagacctgaaccagggagaaaagaaagcagacgtttcagaacaggtgagcaacggacctgtggagagtgtgacattggaaaactctccattagtctggaaagagggccgccagctgctccggcagtacctggaagaggtgggttacactgacactatactagatatgagatccaaacgagtgcgcagccttttaggcagaagcttagaacttaatggagccgtggagccctctgagggcgctccacgtgccccaccaggcccggctggtctaagcggtggggaaagcctgctggtcaaacagattgaggaacagataaagcgaaatgcagccggcaaagatggcaaggaacgtttggggggcagtgtgttaggacaaatcccatttctccagaattgcgaggatgaggactccgacgaggatgacgaactcgattctgtgcagcataaaaagcagcgagtaaagttgccatcaaaagccctggttccggaaatggaggatgaggacgaagaagacgattctgaggatgccatcaatgaatttgattttttgggatcaggcgaggacggggagggtgctcctgacccacggaggtgtaccgtggatggcagcccgcacgaactagaatctcgccgggtaaaactgcagggcatcctggccgacctgagggatgttgacggcctgcctccgaaagtgacaggcccgcctcctgggacaccccaaccaagacctcatgaagatgtgttcatcatggacacgattggcggcggtgaggtgtcactgggcgacttggctgatttgaccgtcactaatgataacgacctcagttgcgacctgtccgattcgaaagacgcgttcaagaagacatggaacccaaagttcacactgagatcacattatgatggtattcgatctctcgcttttcatcacagtcagtcagcactgttgacagcctcagaagacggcaccctaaagttgtggaatctccagaaagctgtgacagcgaaaaagaatgccgccttggatgtcgaaccgatccacgctttcagagcccatcgagggcccgtgctggccgtcgcaatgggaagcaatagcgagtactgctactcaggcggagctgatgcatgcattcactcttggaagatcccagatctgagcatggacccctacgacggctacgaccccagcgtgctctcccacgtcttagaaggccatggggatgccgtctggggcttggccttctccccaactagccagcgactggcatcttgttctgccgatggtacagtgagaatctgggacccctcgtcttcttcccccgcttgtctctgcaccttccccacggctagtgagcacggcgtgcccacctccgtggcttttacaagtacggaacccgctcatattgtagcttcttttcgctccggcgacacagtgctgtatgacatggaagtcggaagtgccctgttgactctcgagagtagagggagtagcggccccactcaaattaatcaagttgtcagtcacccgaatcagcctctgaccataaccgcccacgatgatagggggatcagattcctggataatcggaccggcaaacccgtgcactctatggtggctcatctggatgctgtgacttgcctggctgtagacccaaacggggcttttctaatgagcggttctcatgattgctcactccggctgtggagtctagataataaaacatgcgtgcaagagataactgcccatcgcaagaagcacgaggaggcaatccacgcagtcgcatgccacccctcaaaggctttaatcgcctcagccggcgcggatgctcttgccaaggtttttgtttag

SEQ ID NO: 26866 - DNA, 1368 bp, synthetic construct
  source 1..1368: mol_type = other DNA; note = Synthetic coding sequence
atgagcagcctgggcgccagcttcgtgcagatcaagttcgacgacttacagttcttcgaaaactgtggcgggggctcttttgggtccgtttaccgcgcgaagtggatcagtcaggacaaagaggtggcggtgaagaaattgctgaaaattgagaaggaagctgagattctcagcgtactcagccatagaaacatcattcaattttatggagttatcctggagccccctaattatgggatagtgaccgaatacgcctctttgggcagtctctatgactatatcaactctaaccgatctgaggagatggacatggatcacatcatgacgtgggcgactgacgtagccaaaggcatgcattacctgcatatggaagcccctgttaaggtgatccaccgagacctgaagtcccgtaacgtggtcattgcggctgacggtgttctgaagatatgtgactttggagcctcgcggtttcacaatcacactacccatatgtctcttgtcggaacctttccttggatggctccagaggtcatacagtcgttacctgtcagtgagacatgcgatacctactcttacggcgtggtcctatgggagatgctcacccgagaggtcccatttaagggactcgagggcttgcaggtggcctggctggtggtggaaaaaaatgagaggttaacgatcccgtcgtcatgcccacgctcctttgccgagctgctccaccagtgctgggaagctgacgctaagaaaagacctagtttcaagcagattattagtatactggaaagcatgtcaaacgatacctcccttcctgacaagtgtaatagttttctgcacaacaaggccgaatggcgttgtgagatcgaggccacacttgagcgcctcaaaaaattggaaagggatcttagtttcaaagagcaggagctgaaagaaagagaaaggcgcctgaagatgtgggaacagaagctgaccgaacagtccaacacccctctccttcttccacttgcggccagaatgagtgaagaatcatacttcgagagcaagaccgaagaaagcaattcagcggaaatgtcttgccagattacagccacaagtaatggagaaggccacggaatgaaccccagtcttcaggccatgatgttaatggggtttggggacatcttttccatgaataaggcaggtgcagtaatgcattctgggatgcagattaacatgcaggcaaaacagaatagcagcaagactacctccaagcgtagaggcaaaaaagtcaatatggcactggggttttcagatttcgacctgtcagagggagatgacgatgacgacgatgacggcgaggaggaggacaacgacatggacaatagtgaatag

SEQ ID NO: 26867 - DNA, 474 bp, synthetic construct
  source 1..474: mol_type = other DNA; note = Synthetic coding sequence
atgaagagcatgagccagctggccgtgctgagccggcggtggaagccctcagagatgaaactggacccgtttcaagaagtagtgctcgagtcatcctctgtcgatgagctacgcgagaagctgagcgagatcagcggcattcccctggacgacatcgagttcgccaaaggcagaggtacattcccgtgtgatattagcgtgctcgatatccaccaggacctggattggaacccgaaggtgtccacccttaacgtttggccgctgtatatctgcgatgacggagccgttattttttatcgcgacaaaacggaagagctcatggaacttacggacgaacagaggaacgaactcatgaagaaagagagctctaggctccaaaagacaggccaccgagtcacctatagtcctcgaaaggagaaggcactgaagatttatctggatggcgcccctaacaaggatctgacccaggactag

SEQ ID NO: 26868 - DNA, 1083 bp, synthetic construct
  source 1..1083: mol_type = other DNA; note = Synthetic coding sequence
atgaaggccaccgccatgaccagcgcctggctggcccagggcaccggcgagggtgtcaacgatgtcagaaaaggtgcctgcgctagccacgtgtccaccatggcctcatttctgaagggcgctcacgtgaccattaacgccagagccgaagaggacgtagaacctgagtgtattatggagaaagtcgcaaaggcctccggcgcaaattacagctttcacaaagagtccgggcgcttccaggacgtggggccacaggctcccgttggcagtgtgtatcaaaaaactaacgcggtctcagagataaaaagggtgggcaaggacagcttctgggccaaggccgagaaggaagaggagaaccggcgcttagaagagaagagacgggctgaagaggcccagcgccagctggagcaggagcggcgcgaaagggagctaagggaggctgcccggcgcgagcagagataccaggagcagggcggcgaggcttcccctcagcgcacctgggaacagcagcaggaggtggtctcacgaaatcgtaacgagcaagagtccgctgtgcacccaagagaaattttcaagcagaaggaacgcgcaatgagcactacctctattagttcacctcagcctgggaagttacggagccctttcctccagaagcagctaacccagcccgagacccacttcgggcgcgaacctgctgctgcgatttcccggccgagagctgacctacctgcagaagagcctgccccaagcacccctccttgtctagtccaagctgaagaggaggcggtgtatgaggagcctcccgaacaggagacattctatgagcagccccctcttgtgcagcaacagggcgcaggctccgagcatattgaccaccacattcagggccaggggctatcgggccagggcctgtgcgcacgtgctctgtatgactaccaagccgccgatgacactgagatttctttcgatcctgagaatttgattacaggtatcgaggtgattgatgaggggtggtggaggggctacggtcccgacggacactttggcatgtttcctgccaattacgtggaactgatcgaatag

SEQ ID NO: 26869 - DNA, 291 bp, synthetic construct
  source 1..291: mol_type = other DNA; note = Synthetic coding sequence
atgtgccacaccagctgcagcagcggctgccagcccgcctgctgcgccccgtctccttgtcagccagcctgctgcgtccccgttagttgccagtcttccgtatgtgtcccagtcagctgccgcccaatagtttgcgccgcaccaagttgccagagcagcctttgtgtgccggtgagctgccggcctgtcgtgtacgctgccccaagttgccagagctccgggtgttgccaaccgagttgtacgtctgtgctctgcaggccgatatcctactctatctctagctgctgctag

SEQ ID NO: 26870 - DNA, 27 bp, synthetic construct
  source 1..27: mol_type = other DNA; note = Synthetic coding sequence
atgcccctgagcagccccaacgcctag

SEQ ID NO: 26871 - DNA, 384 bp, synthetic construct
  source 1..384: mol_type = other DNA; note = Synthetic coding sequence
atgagcagcagcatgtggtacatcatgcagagcatccagagcaagtacagcttgtcagaaaggctgattcgcactatcgccgctataagaagttttcctcatgataacgtggaagacctgattagaggcggggctgacgtgaattgcactcatggaactctcaagcctttacactgcgcctgcatggtgtccgacgcagactgtgttgagctgctcctggagaagggcgcagaggtaaatgccctggacggctataaccgtacagcacttcattatgcagcagagaaggatgaagcctgtgtagaggttctcttggaatatggggcgaatccgaacgcactggatgggaaccgggataccccgctccattgggcagcattttag

SEQ ID NO: 26872 - DNA, 318 bp, synthetic construct
  source 1..318: mol_type = other DNA; note = Synthetic coding sequence
cagtggaccgccagcaccgccaccatcaccaaggagaagcaggaccaaccaaagaaagacatctcaaattatcaggtggagcaggcccaggtgcttctcaagagggagaaggagattccgcctaccgtcttccccaatcgctctccttggtgccaaaacccttacgtgagcgcccacccatattgtcctcttatcgaaccccacaacacgtcaaccgccggaggccgtctggacaggcagccgcggaccaggtcaacgcgaccgaatcgggcctccggttccaaaaaaaagaagaccagcgaaagccagaagcaatag

SEQ ID NO: 26873 - DNA, 1116 bp, synthetic construct
  source 1..1116: mol_type = other DNA; note = Synthetic coding sequence
atggaggaggagggcctggccgacgaggaggtgcggctggtgcagaaaaaagatacagggcacatttacgccatgaaaatcctgagaaaatccgacatgctggagaaagagcaggttgcccacatccgcgctgaacgagatattctggtggaagcagatggagcatgggtggtgaaaatgttctactcatttcaggacaagaggaatctctacctgataatggagtttctgccagggggcgacatgatgaccctcctcatgaagaaggacactctgaccgaagaggagactcagttttatattagtgagaccgtgctcgccattgatgcaatacatcaactaggcttcatacaccgtgacatcaagcccgacaatcttctcctcgatgcaaaggggcacgttaagttgtcagacttcgggctctgtaccggtttgaagaaggcacatcgcactgagttctatagaaacctgacacataatccgccctccgatttcagttttcaaaatatgaattcaaaacgaaaagcggagacatggaaaaagaataggcgacaacttgcatactccaccgtcggaaccccagattacatagctccagaggttttcatgcagactggatataacaagctgtgtgattggtggtccctgggagtgattatgtacgagatgctcatcgggtaccctcccttctgttctgaaaccccccaggaaacctatagaaaggttatgaactggaaggagaccctcgtgttccctcccgaggtaccaatatcagaaaaagccaaggacctgattcttagattttgcatcgactccgaaaatcgaattggaaattccggagttgaagaaattaagggacatcccttcttcgagggagttgattgggagcacatccgcgagcgacccgccgccatcccaattgagatcaagtcaatcgatgacacatcaaactttgacgactttcctgagagcgatatactgcagcccgtccctaacacaacagaacccgactacaagagcaaggactgggtgttcctcaactacacttataaacgcttcgagggactgacgcagagggggtccatccccacatacatgaaggcagggaagttgtag

SEQ ID NO: 26874 - DNA, 564 bp, synthetic construct
  source 1..564: mol_type = other DNA; note = Synthetic coding sequence
atgaacaacaccctgcggaaggacggcaagaaggactgctgcttcgagatcagcgctccggacaagcgcatctatcaattcactgcagctagccctaaagatgcagaagagtgggtgcagcaactgaagtttgttttgcaggacatggagtctgatattattcccgaggactacgatgaacggggagaactctacgacgacgttgaccatcccctccctattagcaacccattgacaagcagccaacccatcgatgacgaaatatacgaggaactgcctgaggaggaggaggattcagccccagtgaaggttgaagaacagagaaaaatgagccaggatagtgtgcaccataccagtggtgacaagtccactgactacgccaatttctaccagggcctttgggattgcaccggggctttctccgatgaactttcctttaaacgcggagacgttatctacatattgagcaaagagtacaacagatacggatggtgggttggcgaaatgaagggagccatcggactcgtgcccaaggcctatatcatggagatgtacgacatctag

SEQ ID NO: 26875 - DNA, 219 bp, synthetic construct
  source 1..219: mol_type = other DNA; note = Synthetic coding sequence
atggccctgagcctgggctggaaggcccaccggaaccactgcggcctcctgctgcaagcactgcggagctctggcctactgttgtttccatgtggccagtgtccctggcgcggtgcgggatccttcctcgaccccgaaattaaagcattcctggaggagaacacggaagtgacctccagcggatccttgacccctgagatccagttacggctcctctag

SEQ ID NO: 26876 - DNA, 2919 bp, synthetic construct
  source 1..2919: mol_type = other DNA; note = Synthetic coding sequence
atggccgccgccgccgccgagcagcagcagttctacctgctgctgggcaacctgttgagccctgacaatgtggtccgcaagcaagcagaggagacttacgaaaacatcccggggcagtcaaaaattacctttctactgcaggccattcgtaacaccaccgctgccgaggaggcccgacaaatggctgcagtgctgctgagacgcctgctttcctccgctttcgacgaggtctaccccgccctcccaagcgatgtgcagacggctataaagaacttgctaccagggttcctacaggccgtcaacgattcttgctaccagaacgacgattcggttctgaaaagtctcgtggagattgccgatactgtgcctaaatacctcagaccacacttggaagcgacactccagctgtccctcaagctgtgcggcgacacttccctgaataacatgcagagacaactcgcactggaggtgatcgtcacattgtccgagacagctgcagctatgttgcggaaacacaccaacattgtggcccagactatcccccaaatgttggccatgatggtggatctggaagaagacgaagactgggcaaatgctgacgaacttgaggatgacgactttgacagcaatgcagtggctggagagtctgccttggatagaatggcgtgcggactgggcgggaaacttgtgctgccaatgataaaggaacacattatgcagatgctccagaaccctgattggaaatacaggcatgccggtttgatggccctgagcgcgataggtgagggctgtcaccagcagatggagggtatcttgaacgagatagtcaactttgtgttactttttttgcaggacccacaccccagggtgcgatatgcagcttgtaacgccgtcggtcagatggcaactgacttcgcaccgggattccagaagaagtttcacgagaaagtcatcgccgcactcttgcaaaccatggaggaccagggtaatcagcgggtgcaggcacatgccgctgcagcactgattaacttcaccgaggattgcccaaaaagccttctaattccctacctggacaatctggtaaaacatctccacagtatcatggtgctcaagctgcaggagctcatccagaagggtaccaaactggtactggagcaagtggtcacctctatcgcatccgtggccgacactgctgaggaaaagttcgtgccttactatgacctctttatgcccagcctgaaacacatcgtggagaacgcggtgcaaaaggaactgcgattactgcggggcaaaacgatagagtgtatttctcttattggtttggcagtgggcaaggaaaagtttatgcaggatgctagcgatgtgatgcagctgctcctgaagacacaaactgacttcaatgatatggaagatgatgacccacagatctcatacatgatctcagcctgggcccgtatgtgtaaaatcctggggaaggagttccaacagtatctccctgttgtgatggggccgttgatgaagacagcttccataaaaccagaagtcgctctccttgatacccaagacatggaaaatatgagtgacgacgatggatgggaattcgtgaatctgggagaccagcagtcattcggtatcaagacagccgggctagaagaaaagagcactgcgtgccagatgcttgtctgctatgctaaagagctgaaggagggcttcgtagaatataccgagcaagtggttaaactgatggtccctctcttgaaattttattttcacgatggagttagagtggcggctgcggaaagtatgccactcttattagagtgtgcccgggttcgcggacctgaatatctgacccaaatgtggcactttatgtgtgacgccctgatcaaggctatcggaacggagcctgattccgacgttctctccgaaatcatgcactccttcgccaaatgtattgaggtgatgggcgatgggtgtctgaataacgagcattttgaagagctgggtgggatcttaaaagcaaagctggaggagcacttcaagaatcaggagctgaggcaggtgaaaaggcaggatgaggactatgacgagcaggtagaagaatcgctccaggatgaggacgacaatgatgtgtacatcctgacaaaagtctctgacatcctccacagcatcttttccagctacaaagagaaagtcctcccctggttcgagcagttactacccttgatcgtgaatctcatctgcccgcatcgtccttggcccgacaggcagtggggactttgtatcttcgacgatgtcatcgagcactgttcgcctgcctcttttaagtacgcggagtactttcttagacccatgctgcaatatgtctgcgataattcccccgaggtgcgacaggctgctgcatacggattgggcgtgatggcacagtacggcggcgacaactatcgtcctttctgcaccgaggccttacctctacttgtgcgcgtgatccagtcggctgacagtaagacaaaagagaatgttaacgcaactgagaactgtatctctgctgttggcaaaatcatgaaattcaagcccgactgcgtgaatgtcgaagaagtgctgccacattggctctcatggctgccgctccatgaagacaaggaggaagccgtccagaccttcaactatctgtgcgacctgatcgagtcgaaccaccccatcgtgctcggtcccaataacacaaatctgcccaaaatcttcagtattatcgctgagggagagatgcacgaagccatcaaacacgaggacccctgcgcgaagagattggcaaacgtcgtgaggcaggtccagacgtctggaggcctttggaccgagtgtattgcccagctgagtcctgagcagcaggctgctatacaggagctgctgaattcagcctag

SEQ ID NO: 26877 - DNA, 1428 bp, synthetic construct
  source 1..1428: mol_type = other DNA; note = Synthetic coding sequence
atgcaggtgaccttcatctacgtgtgcctgaagggcctgatgctgcaggacctcgtgtccgcgaaattgattagtgactacacagttacagaaatacctgatacgattaacgatctacagggatccaccaaagtgctgcaggccgttcagtggctcgtctcgcactgtccgcactctctcgacctgtgctgccagacgctgatccaatacgtggaggatggtatcgggcacgagtttagcggtcggttcttccatgaccgccgcgagagacggctcggcgggcttgcatctcaggaacccggtgcaattatcgagctttttaactccgtgttgcagttcctagcaagcgtagtctctagtgaacagttgtgcgacctcagttggccagttaccgaattcgccgaggccggcggtagccgtttactcccgcaccttcattggaacgcgccggagcacctcgcctggctcaagcaggctgtgctaggatttcagttgccacagatggatttacctccactcggcgcgccttggctccccgtctgctcaatggtggttcagtacgcctcacaaattccctcaagtagacagacgcagcctgtgctccaaagccaggttgagaacttgctccatcgcacgtactgccgatggaaatccaaaagcccctccccagtgcacggagcgggaccctccgtaatggagatcccttgggatgatctgattgccctgtgcatcaatcataagctccgggactggacacccccgaggctgcccgtcacatccgaggctttgagcgaggatggccagatttgcgtatattttttcaagaacgatttaaagaagtatgatgtgcccttgtcctgggaacaagcacggctgcagacacaaaaggagttgcagctgagggaaggaaggctggctatcaagcccttccaccctagtgctaacaactttcctattccactgttgcatatgcatcggaactggaagaggtccacggagtgcgcgcaggaagggagaatcccatctacggaggatctcatgcggggagcttcagctgaagaactgctagcccaatgcctgtcgagctcactgctgctggaaaaagaggagaataaacgttttgaagaccagttgcaacagtggctgtccgaggattcaggagcctttactgatctgacgtctctgcctttgtacctgcctcagaccctggtcagccttagccatactatagaacctgttatgaagacttctgtcacgacctccccccaatctgatatgatgagggagcaactgcagcttagcgaagccacgggcacttgcctaggggagcgattaaaacacctcgagaggttgataagaagttctcgggaggaggaagttgcctcagagcttcatctctccgctttacttgatatggtcgacatatag

SEQ ID NO: 26878 - DNA, 333 bp, synthetic construct
  source 1..333: mol_type = other DNA; note = Synthetic coding sequence
atgagcaccgccctgacccacaccaccgtggccatgcggtgccccatggggggtgggggagggccaacttacgggcctccgcaaccatgggggcatcctgacgtccatataatgcaacatcacgtcttaccgatccaagcgcgcctgggctcaattgctgaaattgacttaggagtccctcccccggtgatgaagacgtttaaagaatttctcctatcactagatgattcagttgatgaaacagaggctgtcaaaagatataatgactacaagctcgatttccgtcggcagcagatgcaggatttttttctggcccataaggacgaggaatag

SEQ ID NO: 26879 - DNA, 828 bp, synthetic construct
  source 1..828: mol_type = other DNA; note = Synthetic coding sequence
atgagcgccgaggtgaaggtgaccggccagaaccaggagcagttccttctactagcaaagtcagcgaaaggcgctgctctggcaaccctcatccaccaggttttggaggcacctggcgtctacgtgtttggcgaactgttagacatgccgaatgtgagggagttggccgaatccgatttcgccagcacattcaggctcttaacagtctttgcctacggcacttacgctgactacctggcagaggccaggaatctgcctcccttgaccgaagcccagaaaaacaaattgcggcatttgtcagtggtgacacttgcagcgaaagtgaagtgtattccttacgccgtccttcttgaagcacttgctttgcgcaatgtacgccagctggaggatctcgttatcgaggctgtgtatgcggatgtactgagaggtagcctggaccagaggaatcagcgcctcgaagttgactattctataggccgcgacattcagagacaggacctctccgcaattgcccgtacactgcaggaatggtgtgttgggtgcgaggtagttttgtctggaatcgaagagcaggtctccagggcaaaccagcacaaagaacagcaacttggcttgaagcagcaaattgaatcggaagttgcaaatctgaaaaaaactatcaaagtgacgaccgcggcagccgctgccgccaccagccaagatcccgagcaacatctcacagaactcagagagcctgcccccggaacaaatcagagacagccttctaagaaagccagcaaaggaaagggtctacgaggatctgctaagatatggagtaagtccaattag

SEQ ID NO: 26880 - DNA, 876 bp, synthetic construct
  source 1..876: mol_type = other DNA; note = Synthetic coding sequence
atgatcggcgacggcgaggactacttcctgagcctgttcggcgacagtaagaagctcaccgcccattcaaactacacacagaagacccttaaatacttttcaatgatcttagaggaggttgggcagtttacctcctcttctttaggtgacgtggagatcgccgaggtgaatgtgaagggactctttgtgaaattaataaacagctccctggacaaagaaatggctattggagatcatattctgcaacaaaatgtcaacggacagacaatcagcctttaccggttcttaccgaatattgttatgcaagccaactccactgtgaccgtgtgggctgctgcgagcgaggccaagcaccagcctcctagcgacttcctttggaaagagcaggataagtttcgggccagccccgattgcattacaatattgtgcaaacccaacggacaggctatcgcctggtatacacctatacattggaagcaggcttgggagaaattggatgcagatgtggagtttaatcgctgctctgttgttagcccgacatttaggaaaagagttttccagtggacagccagtaccgctactatcacaaaggaaaagcaggaccagcctaagaaagatattagtaattaccaggtggagcaagcacaggtcctgctgaaacgcgagaaagagattcctcctaccgtttttccaaaccggtccccatggtgccagaacccctacgtgtccgcccatccctactgcccactcatagagccccacaacacctccacagcggggggacgattagaccggcagccacgcactcggagcacaagacctaatcgagcctctggaagcaaaaagaaaaaaacttctgagtcgcagaagcagtag

SEQ ID NO: 26881 - DNA, 1185 bp, synthetic construct
  source 1..1185: mol_type = other DNA; note = Synthetic coding sequence
atggtgcccagccaggccccctacctggtgcccgccttccccctgcctgccgctactagcccggggcgggaatacgcggcgcccggcactgcgcctgaggggctgcatgggctcccattgtccgaggggctccaaccctatccagccttcccgtttccatatttggacacattcatgaccgttttccttccggaccctcccgtctgtcctcttctgagcccttcctttttaccatgtccgtttctgggggccaccgctagttccgctattagccctagcatgtcatcggcaatgagccctacactggatccccctccatctgtaacctctcaacgcagggaagaagaaaagtgggaggcgcaatccgagggccatcccttcatcactagtaggagctccagccccttgcagcttaatctcctacaggaggagatgccccggccatcggagagcccggatcagatgaggaggaatacttgccctcaaaccgaatactgtgtcaccggaaacaatggctccgaatcatcccctgcaactacaggcgccctctccaccggcagccctcccagagaaaaccccagtcatcctaccgcaagcgctctaagcacaggctctccccctatgaagaatccctcccatcctacagcaagcaccctcagtatgggcctcccaccctcccggacgcccagtcatcccacagccacagtactgtccacgggtagccctccttccgagagccccagccgcactggtagcgccgctagcggttcatcggattctagcatttatttaacctcgtcagtgtactcaagcaagatttcccaaaatggccagcagtctcaggacgtccagaagaaggagacattccccaacgtggcagaggagccaatctggcgtatgataaggcagacccccgaaagaatcttgatgacatatcaagtccctgagcgtgttaaggaagttgtgctgaaagaggatcttgaaaaactggagtcaatgaggcagcagcagccccaattctcccatggccagaaggaggagctcgccaaggtctataactggatccagagtcagacagtgacccaggaaatcgatattcaggcatgtgtgacctgtgagaacgaagattctgccgatggagcggccacctcatgtggacaggtgctggtggaggactcatgctag

SEQ ID NO: 26882 - DNA, 2424 bp, synthetic construct
  source 1..2424: mol_type = other DNA; note = Synthetic coding sequence
cagggcgccagcttcgccctggccgccgccgccgccctgctgttcgggagcgacatggaagatggtccgtctaacaacgcttcctgcttcaggagattgaccgagtgcttcctgtcaccctcactaactgatgaaaaggtcaaggcatacctgtcactgcacccacaggtcttggacgagttcgtgtccgagtccgtttcggctgaaacagtggagaagtggctcaagcggaagaacaacaaaagcgaagatgagagtgctcccaaggaggtttctcgctatcaagacaccaacatgcagggggttgtgtatgaattgaattcctatatcgagcagcgcttggacaccggaggagacaaccagctgcttctctacgagctgtcctctataatcaaaatagcgactaaggctgacggctttgctctgtatttcctgggcgaatgtaacaactccctgtgcattttcaccccccccggcattaaagaaggcaaaccaagactgatccctgcagggccgataactcagggcacaaccgtaagcgcctatgtcgcaaagagtcggaagacgcttttagtcgaagatattctcggagacgaaaggttcccaaggggtacaggactggagtcaggcactaggatccagtccgtgctgtgcctgcccattgtcaccgccattggtgaccttatagggattctcgaactttaccgacactggggaaaggaagcattttgcctctctcaccaggaagtggccaccgctaatcttgcgtgggcctccgtggctatccaccaggtgcaggtgtgtcgcggtttggccaagcaaaccgagctaaacgactttcttctggatgtatccaagacatactttgacaatattgtggctatcgactcactgcttgaacacataatgatatatgcaaagaatctggtaaatgctgaccgctgtgccctgttccaggtggaccacaaaaataaggagctgtattccgatctgttcgatattggtgaggaaaaggagggcaaacccgtttttaagaagacaaaggagatcaggtttagtattgaaaagggtattgccggccaggtggcccgcaccggagaggtgctgaatattcctgacgcatacgcggatccaaggtttaatagagaagtcgacctgtacaccgggtatacaactcgtaatatcctttgtatgcccatcgtgtcaagagggtcggtcattggcgtggtgcagatggtcaacaagatttctggttctgcgttttcaaagaccgacgaaaacaactttaaaatgtttgccgtgttctgtgccctagcgctccactgtgcaaacatgtatcacaggatacgacacagtgaatgtatttatagagttactatggaaaaactatcttaccactcaatttgtacgtccgaagaatggcagggccttatgcagtttactctgccagttagactgtgcaaagagatcgagctgttccatttcgacatcggaccgttcgagaatatgtggccaggtatttttgtgtacatggtgcaccggtcttgtggtacaagctgctttgagctggagaaactgtgccgtttcatcatgtccgttaagaagaactatcgacgggtgccctatcacaactggaaacacgcagtgaccgtggctcactgcatgtatgccatactccagaataatcacactctgttcactgacctcgaacggaaaggtctcttgattgcatgtctgtgccacgacctagaccaccgcggatttagcaactcttacctccagaagttcgatcaccctctggctgcgctgtatagtacttcaactatggagcaacaccatttctctcagacggtgtccattttacagctggagggacacaacatcttctccacgttatcctcatcagaatatgaacaggtcctcgagattattcgaaaagcaatcatcgctacagatctcgcactgtatttcggcaatcggaagcagctggaggagatgtaccagaccggctcactaaatctgaataaccagtcccatcgagacagggttatcggtttgatgatgacagcctgcgatctctgctcagtgacgaaactttggcccgtgaccaaactaaccgccaatgatatttatgctgaattctgggctgagggggacgagatgaaaaaactaggcatacaacccatacccatgatggaccgagacaagaaagacgaagttcctcagggacaactcggcttctataacgcggtcgcgatcccatgctacaccacactgactcagatcctacctcccaccgagccactcctcaaagcgtgtcgggacaacctgagccagtgggagaaagtgatccggggagaggagacagccacttggatcagctcaccctctgtcgcacaaaaggcagccgctagtgaggactag

SEQ ID NO: 26883 - DNA, 1677 bp, synthetic construct
  source 1..1677: mol_type = other DNA; note = Synthetic coding sequence
atggccagctgccccgacagcgacaacagctgggtgctggccggcggtgagctgggcatcagcttgaatatgtgccttctgggtgccctggtcctgctgggcctcggggtgctgcttttttctggaggactgtctgagtcggaaacagggcctatggaagaggtggaaaggcaggttctccctgaccctgaagtactggaagctgtaggggaccgtcaggacggactgcgggaacaacttcaggcccccgttccccccgattctgtgcccagcttgcagaacatgggcttgctgctggataaactagctaaggagaaccaggatatccggctgctgcaagctcagctacaagcgcagaaggaggaacttcagtccctaatgcaccaacctaagggtttggaagaggagaatgcccagttacgcggcgcactccagcaaggcgaggctttccagagagcccttgaatccgagttgcaacagctgcgtgcacgcctgcagggacttgaggccgactgcgtgcgcggccctgacggtgtgtgtttgtccggagggcgtggacctcaaggagacaaggccatcagggagcagggaccccgagaacaagagccagagctgagttttttgaaacagaaggagcagctggaggcggaggcccaggctctgcgtcaggagttagagcggcagcggagattactcggctctgtgcagcaggatcttgagcggtcattacaggacgcctcaagaggcgatccagcgcacgccggcctcgctgagcttggtcataggctggctcagaagctccagggcttggaaaattggggccaagatccaggggtgagcgccaacgcatctaaggcatggcaccagaagagtcactttcaaaactctagagaatggtcagggaaagaaaaatggtgggacggccagcgcgaccggaaggccgaacattggaaacataagaaggaagaatcaggcagggaacggaagaagaactggggtggacaggaagatagagaacccgcaggcagatggaaggaggggaggccaagagtggaagagagcggctccaaaaaggaaggcaagaggcagggtcccaaggaaccaccccggaagagcggaagcttccactcgtcaggcgaaaagcagaagcaaccaaggtggcgcgagggcactaaggattcccatgatccactgccttcctgggcagaactgctccggcccaaatatcgagcaccccagggctgtagtggtgtagatgaatgtgccaggcaggaaggacttacctttttcggaacggaactcgcgccagtgaggcaacaggagctggctagtttgctgcgtacatacttggcacggctcccgtgggccggccagttaactaaggaattgcccttaagcccagctttcttcggtgaagatgggatcttccgacacgatcgtcttaggtttcgagatttcgtggacgccctggaggattcattggaggaggtggccgtgcaacaaactggggacgatgacgaagtggacgatttcgaagatttcattttctcacatttcttcggtgataaggccctgaagaagcggtcaggcaaaaaagacaaacatagtcagagcccccgggctgctggaccccgtgagggtcattcacactctcaccaccaccatcatagagggtag

SEQ ID NO: 26884 - DNA, 1881 bp, synthetic construct
  source 1..1881: mol_type = other DNA; note = Synthetic coding sequence
atgggcaacgccgccggcagcgccgagcagcccgccggccccgccgcacccccccctaagcagcaccggttcgaaaagctcatggagtactttcgcaacgaggattccaatattgacttcatggtggcctgcatgcagttcattaacatcgtggtgcactctgtggagaacatgaacttccgggtattcctgcagtatgagtttactcatctgggattggatttatacctcgaaagactcaggttaaccgagtccgacaagctccaggttcagattcaggcatatcttgacaatatctttgacgtaggggccctgttagaagacaccgaaactaagaacgccgttctggagcatatggaggagcttcaagagcaggtagcgctacttacagagcggctaagagacgcagagaacgagtcaatggccaaaattgccgaattggagaagcaattgagtcaggcacgtaaagagctggaaaccctccgggaacgcttctcagagtcaacggccatggggccatctaggcgacctccagagccggaaaaggctccaccggccgcaccaacacgtccatctgcgctggagttaaaagtggaagaacttgaagaaaaggggctgatacgcatcctgcggggccccggggacgctgtttcaatcgagattttgccagtggcggtggcaaccccttcgggtggggatgctcccacccccggcgtacccacagggtctccttccccagatcttgccccggctgctgaaccggcgcctggcgctgcaccacctccaccccctcctcctcccggtgggcccccggatgctcttgggaggagagactctgaactcggaccgggtgtgaaagccaagaagccaattcaaacaaagttccgaatgcctttgctgaactgggttgcactgaagccgtcacagatcaccggaacggtttttaccgagctaaacgacgaaaaagtcttgcaggaacttgatatgtccgacttcgaagagcaattcaagacgaagagccaaggaccgtccctcgacctgagcgcactgaaatcaaaggccgcgcagaaggctccgtctaaagccacactaatagaggcaaatagagccaaaaaccttgcaattaccctgcgaaaaggcaatttgggggccgagcggatctgccaggcaatcgaggcttacgacctacaggctcttggccttgactttttggaacttctgatgcgcttcctcccaacggaatatgagcggagtctgattacacgatttgaacgggagcaaagacctatggaggaactgtcagaggaggaccgctttatgctgtgcttcagccggatcccccgacttcccgagaggatgacaacgttgacctttctaggcaattttccggatactgctcagcttctgatgcctcaactgaatgccataatagccgcaagcatgagcattaagtccagtgataagcttagacaaatactcgagattgttttagccttcggcaactacatgaatagcagcaagaggggcgcagcttacggcttccgcctccagagcctggatgcccttcttgaaatgaaatccacagaccgaaaacaaacattactgcactatctggtaaaagtgatagcggagaagtaccctcagcttaccggatttcactctgacctacacttcctcgataaggcagggtctgtgtcactggactccgtcctcgccgacgtgaggagcctgcagagaggcctggagcttacccagagagagtttgtccgtcaggacgactgtatggtgctaaaagaattcctaagggccaatagtccaactatggataagttgttggccgactctaaaaccgctcaagcagtcccaaccggcggactgtag

SEQ ID NO: 26885 - DNA, 1500 bp, synthetic construct
  source 1..1500: mol_type = other DNA; note = Synthetic coding sequence
atggacaagctgatcgtggacggccggggcaaggccaccatcagcaacgatggggccaccatacttaagcttcttgatgtggtccaccctgccgccaaaaccctggtcgatattgcgaagagtcaggacgctgaggtgggggacgggacaactagtgtgacactgctggctgccgaattcttgaaacaggtcaagccctatgtcgaggaagggctgcaccctcagataattattcgggcttttcgcaccgctactcagctcgctgtcaacaagataaaggaaatcgctgtgacagtgaagaaggcggacaaagtcgagcagaggaaattactcgagaagtgcgcaatgacagctttgtcaagcaagctgatcagtcagcagaaagctttttttgcgaaaatggtggttgatgccgttatgatgctggatgatctgctacagcttaaaatgattggtatcaaaaaagtgcaggggggcgccctggaggactcccagcttgtggctggggtcgcgttcaaaaaaactttcagctacgcagggttcgagatgcaaccgaaaaagtaccataacccaaagatcgcgcttctgaacgtggaattagaactcaaagccgaaaaagacaacgccgagatccgggtccatacggtcgaggattatcaagccatagtcgatgccgaatggaacatcctttacgataagctagaaaagattcatcatagcggggctaaagtggtcctgtccaaacttcctattggtgacgtagctacgcagtatttcgccgacagggacatgttttgtgcggggagagtgcccgaggaggatctcaagaggaccatgatggcttgcgggggaagcatacagaccagcgtgaacgcccttagcgccgacgttttgggcagatgtcaggtgttcgaggaaacccagattgggggggaacggtataattttttcacaggatgccccaaagccaaaacttgcacattcatcctgagaggaggggccgagcagttcatggaagagaccgaacggtcacttcatgacgcaattatgatcgtaaggagagcaatcaaaaatgacagtgttgtcgccggcggaggggccatcgagatggagctcagtaaatatcttagggattattccaggacaatccccggaaaacaacagctgttaatcggggcgtatgctaaagccctggagatcatcccacggcagctgtgtgacaacgccggctttgacgccaccaacatcctgaacaaattgcgggctcgccatgctcagggagggacctggtacggcgtggacataaacaatgaggacatcgctgacaacttcgaggcattcgtatgggagcccgcgatggtcagaattaatgcgcttaccgccgcgagtgaagccgcatgcctcattgtcagtgtggacgagactattaagaacccaagaagtacggtggatgcacctaccgctgccggtcgagggaggggccggggaagaccacactag

SEQ ID NO: 26886 - DNA, 78 bp, synthetic construct
  source 1..78: mol_type = other DNA; note = Synthetic coding sequence
atggcccacgagatgatcggcacccagatcgtgaccgagcggctggtggccctgctcgagtccgggaccgagaagtag

SEQ ID NO: 26887 - DNA, 633 bp, synthetic construct
  source 1..633: mol_type = other DNA; note = Synthetic coding sequence
atggagaagaccgagctgatccagaaggccgtggcctacaagaacgtggttggtggtagacggtctgcctggcgcgtaatatcctcgatagagcagaagactgatactagcgacaaaaagttacaacttatcaaggattatagagaaaaagttgagagcgagctgaggagtatttgcactactgtcctcgagttgctagacaaatatttaatcgctaatgccactaacccagagtcgaaagtgttctatcttaaaatgaagggagattactttcgttacctggctgaggtggcctgcggtgacgataggaagcagactatcgataattcccaaggggcttaccaggaagccttcgacatatcaaagaaggaaatgcagccaacacatccgatccgactgggcctcgccctgaacttttctgtgttctattacgaaatcttgaataatccagagctggcatgcactctggctaaaacggcctttgatgaggccattgcagaactggacactctaaatgaggatagctataaagactctaccctgatcatgcaactgctacgagataacctgacgctctggaccagtgattccgcgggcgaagagtgtgacgcggcagaaggagcggagaactag

SEQ ID NO: 26888 - DNA, 501 bp, synthetic construct
  source 1..501: mol_type = other DNA; note = Synthetic coding sequence
atggacctgatgcccttcatcaacaaggccggctgcgagtgcctgaacgagtctgacgagcatggatttgacaattgtcttaggaaagatactacattcctggaaagcgactgcgacgagcagttgctgattacagttgccttcaatcagcctgttaaattgtattccatgaaattccaaggcccggataacgggcaggggcctaaatacgtcaaaatctttattaatcttccgaggagtatggactttgaggaagccgagaggtcagagccaacccaggccctggagctgacagaggatgacattaaagaagacgggatcgtgcccctccgatatgtgaaattccagaacgtgaattcagtgacaattttcgtgcaatccaaccagggcgaggaggaaaccaccagaatttcttacttcacttttatcgggaccccagtccaggctaccaacatgaacgacttcaagcgtgttgtgggtaagaaaggggagtcacattag

SEQ ID NO: 26889 - DNA, 639 bp, synthetic construct
  source 1..639: mol_type = other DNA; note = Synthetic coding sequence
atggccgcccccgaggagcgggacctgacccaggagcagaccgagaaattactgcagtttcaggatttgacaggtattgagtctatggatcagtgtagacatactttagagcagcacaattggaacattgaggctgcagtccaggacagactcaacgagcaggagggggtaccatccgtgttcaatccccccccctcacggccgctccaagtgaatacggctgaccacagaatatactcatatgtggtcagtaggcctcagcctagagggctgctcggatggggctactacctaatcatgctgccgttcagatttacatactatactatattggacatcttccgcttcgcgcttcgcttcatcagacccgatcccagatcgagagtgacagacccggtgggtgatatcgtatctttcatgcacagcttcgaggaaaaatacgggagggcgcaccccgtgttttatcagggaacgtactctcaggcactgaacgatgccaagagggagctgcggtttctgctggtgtatctccacggggatgatcatcaggacagtgacgagttttgtcggaataccctctgtgcccctgaggtgattagtttaattaatacttccagtcacagcttcttgttactgtag

SEQ ID NO: 26890 - DNA, 1371 bp, synthetic construct
  source 1..1371: mol_type = other DNA; note = Synthetic coding sequence
atggccgacagcctggagagcacccccctgcccagccccgaggaccgcttagccaagctccatcctagcaaggaactcctggagtattaccaaaaaaaaatggccgagtgcgaggccgaaaacgaagatctgctcaagaaactcgaattgtacaaggaagcatgtgagggccagcataagctggagtgtgacctgcagcagagggaggaggaaatcgccgagctgcagaaagccttatcagatatgcaggtctgcctcttccaggagcgcgagcatgtcctgcgactttactccgagaatgataggttgcgaatccgtgagttagaggacaagaaaaaaatccagaatctgctcgccctcgtcgggacggacgctggagaagtaacctatttttgcaaggaacccccccacaaagtgactatccttcagaagacgatccaagctgtgggagagtgtgaacagagcgagagctcagcgtttaaagcggatcccaagataagcaagcggcgcccaagccgggaaaggaaagaatcgtctgagcactaccagcgtgatattcagacactgatccttcaggtggaggccctacaggctcagttgggagaacagactaagctgtcaagagaacagattgaaggcctgattgaggataggaggattcatctggaggagatacaggtacaacatcaaaggaaccagaacaagatcaaagaacttacgaagaatctccatcatacccaggaattgctctacgaatctaccaaagactttctccagctgcgcagcgagaaccagaacaaggagaaatcttggatgctagagaaggacaatctgatgagcaaaatcaagcaatacagagtccagtgcaaaaagaaggaagacaagatcgggaaggtgctccccgtgatgcacgagagccaccacgcccagtctgagtatattaagtccctgaaagataaactggtgcaagaaaagaaattatctaacatgtaccaggaacaatgtatcagcctggaggaggagctggccaggattcgggaagaggagggaatgaggcgagaaattttcaaagatcgaaccaataagatgggaaaacgattgcagatcatgacaaaacggtacgaggcactcgaaagacgaagaatcctagaagtagaggggtttaagaccgacatcaaggttttaagacagaaattgaaggaccttgagcagatgttgtacaaagctacagtgaatgctcgggccaatcaggaccttgccctcttgtgcgaagtgcgagatagcaaccgacgcgcccataagatccagggggaacttaagaacctgaagagcaaggtcttcggactggaaaatgagctcaggctgtgctag

SEQ ID NO: 26891 - DNA, 183 bp, synthetic construct
  source 1..183: mol_type = other DNA; note = Synthetic coding sequence
atggacgagcaggccctgctgggcctgaaccccaacgccgacagcgatttcaggcagcgggccttggcctatttcgaacagttgaagatttcccctgacgcttggcaggtttgtgccgaggcactcgcgcaacgcacctattctgacgaccatgtgaagttcttctgcttccaggtgctgtag

SEQ ID NO: 26892 - DNA, 339 bp, synthetic construct
  source 1..339: mol_type = other DNA; note = Synthetic coding sequence
atgagcagcagcatgtggtacatcatgcagagcatccagagcaagtacagtctgtccgagcgcctcatacgcacaatagcggcaattcgctcatttccacatgataacgtagaggatttaatcagggggggcgcggacgttaattgtactcacggaaccctcaagccattacattgcgcctgcatggtgtccgatgccgactgcgtagaacttctcctggagaagggcgcagaggtgaacgccttggatggatataatcggaccgcgcttcactatgccgcggaaaaggacgaagcgtgtgtcgaagtattgctggagtacggggcgaaccccaactag

SEQ ID NO: 26893 - DNA, 1173 bp, synthetic construct
  source 1..1173: mol_type = other DNA; note = Synthetic coding sequence
atgagcgccgccaaccccgagacccccaacagcaccatcagccgggaggccagcacgcaaagttctagtgccgccgcatctcaggggtgggtcttgcccgaagggaagatcgtcccaaatactgttttcgtgggaggaatagacgctcgcatggatgagacagagattggctcttgcttcggccgatacggatctgttaaggaggtcaagatcattactaaccgtaccggggtgtccaaaggatatggattcgtgtctttcgtgaatgacgtggatgtccagaaaattgtcggcagccagatacactttcatgggaaaaaacttaaactaggccccgccatccgaaagcagaagctgtgtgcccggcacgtgcagcctagacctttggtggtaaatccaccccctcctccacagttccagaacgtttggcgaaaccccaacacagaaacctatcttcaaccacaaatcacccctaatccggtcacccagcacgtgcaggcttactcagcttacccccatagccccgggcaggtgatcaccggctgccaactgctggtatacaactaccaggagtatccgacatatcctgattctgctttccaagtgacaactggttatcagctccccgtatacaattatcagccattccctgcctacccccggagccccttccaggtgaccgccggttatcagcttccggtgtacaattaccaggcgtttcccgcataccccaacagtccattccaagtcgccactgggtatcagtttcccgtgtacaattaccagccgtttcccgcctacccttcttcaccatttcaagttacggccggttaccaactccccgtctataactatcaagcattccccgcatatccaaactccccatttcaggttgccacggggtaccagtttcctgtatacaattaccaggcttttcctgcctatccaaatagtccagttcaagtaactacaggctatcaattgcccgtttataactatcaggccttcccagcatatccaaacagcgccgtacaggtgacaaccgggtatcagtttcatgtctacaactatcagatgcctcctcaatgccctgtcggggagcagagacggaatctgtggactgaagcctataagtggtggtatctagtgtgcttaatacaacgccgtgactag

SEQ ID NO: 26894 - DNA, 1335 bp, synthetic construct
  source 1..1335: mol_type = other DNA; note = Synthetic coding sequence
atgcgggagatcgtgcacctgcaggccggccagtgcggcaaccagatcggtgccaagttttgggaggttattagcgacgagcacggaattgacccgacaggtacctaccacggagactcagatcttcaactggagcggatcaatgtttattataatgaggcaaccggtggaaattacgtaccgagagcagtactagtagatctggagccagggactatggacagtgtccggtctgggccttttggacagatcttccgccctgataactttgtattcggtcagtccggcgctggcaacaattgggccaaaggacactacaccgaaggagctgagttggtcgatgcggtcctcgacgtggtgcgcaaggaggccgagagttgtgactgcctgcagggatttcagttgacacacagcctcggcggtggaacagggagcgggatgggaaccctgcttataagtaagatcagggaagaattccctgatagaataatgaacactttctccgttgttccctctcccaaggtgtccgataccgtggtcgaaccatacaacgctactttgtctgtccaccagctggtggagaacacagatgaaacctattgtatagacaacgaagcactctacgacatctgtttccgtacattgaagcttaccaccccaacttatggcgacctgaatcatctggtcagcgcaacgatgagtggggtcactacatgcctgaggttccccgggcaactgaatgctgatctgagaaaactcgctgtgaacatggtgccattcccacgtttacactttttcatgccaggattcgcgcctctaaccagccgcggcagtcagcagtacagagcactgacagtgcccgaactaacccagcagatgtttgatgcgaagaacatgatggctgcttgcgaccctcgtcacggacgttatctgactgtcgctgccgtgtttagaggccggatgagtatgaaagaagttgatgaacagatgctttctgttcagtccaagaacagctcgtattttgtggagtggatcccaaacaacgttaaaactgcggtatgcgacattcctcctcggggcctcaagatggcagccaccttcatcggcaatagcaccgctatccaggaactgttcaagcgtatcagcgagcagttcaccgcgatgtttaggaggaaggcttttctgcattggtataccggcgagggtatggacgagatggagtttacagaggcggaatcaaatatgaatgacctggtaagcgagtaccagcaataccaggatgctactgctgaggaaggagagtttgaggaagaagccgaggaagaggtggcctag

SEQ ID NO: 26895 - DNA, 495 bp, synthetic construct
  source 1..495: mol_type = other DNA; note = Synthetic coding sequence
atggtgaacagcgtggtgttcttcgacatcaccgtggacggcaagcctctcggacggatctcaattaagctcttcgcagacaagatcctgaagactgcagagaactttcgtgcactttcgaccggagaaaagggattccgctacaaaggatcttgttttcatcggattatcccaggctttatgtgtcaggggggggatttcactaggcacaatggtacaggcgacaagtccatttatggggaaaagttcgacgacgagaacctgatcaggaagcacacagggtctgggatcctgtcaatggccaacgctggccccaacacaaatgggtctcagttttttatttgcgctgcaaaaaccgagtggctcgacggcaagcacgtcgcttttgggaaagtaaaggaacgggtgaacattgtcgaggcaatggaacatttcggatacagaaattccaaaacgtcaaagaagatcaccattgcagattgcggccagttctag

SEQ ID NO: 26896 - DNA, 3252 bp, synthetic construct
  source 1..3252: mol_type = other DNA; note = Synthetic coding sequence
atgagccagacccaggactacgagtgccggagccacaacgtggacctgccagagtccagaatccctggctccaacactaggctggaatgggtcgagatcatcgaacctcggacccgcgagcgcatgtatgccaatctcgtgactggggaatgtgtatgggatccgcctgccggagtgcgaatcaaacggacgtccgagaaccagtggtgggagttatttgacccaaacacatcacggttttattactacaatgcgagcactcaacggacagtttggcaccgccctcaggggtgtgatattattcccctcgccaaactgcagactctcaagcaaaacactgagagtcccagggcctcagccgagtcttcaccaggacgcggatcttccgtgtcgcgcgagggttctacatcatcatcgttggaaccagagcccgacactgaaaaggcccaggaattacctgcccgagccggcagaccagcggcgttcggtaccgtcaaggaggattctgggtccagtagccctccgggagtcttcctagaaaaggattatgaaatctatagggattattctgccgatgggcaactgcttcactaccgaactagcagcctgcgttggaatagcggtgccaaggagcgcatgctgatcaaggtagccgaccgcgagccctctttcctggcggcccaaggcaatggctacgctcccgatgggcctcctggcgtacggtcaagacggccatcagggagccagcactctccttcactgcagacatttgcccccgaggcggatggcaccatcttcttccctgaacgacggccaagccccttcctgaagcgcgctgagttgcctggatcttcctcccctctactcgcccagccaaggaagccaagtggagactctcagccgtcctcgcctaggtacggttatgagccccccctgtacgaggagcccccagtcgaataccaggcacctatttatgatgagccacctatggacgtgcagttcgaagctggcggaggatatcaggccggttctccccagcgctcacctggtaggaaaccgaggcctttccttcaacccaataagcagggacctccgagtccttgccagcaactggtgctgacgaaacaaaagtgccccgagcggtttctgtctcttgagtattcaccagctggtaaggaatacgtgagacaactagtttacgtagaacaagcaggttcctccccaaaacttcgcgccgggccaagacataaatacgcacctaaccctgggggcgggtcctactccctgcagcccagtccgtgcctcctgagagaccagcgtcttggcgtgaagtccggcgactacagtacaatggaaggcccggagctcagacatagccagccccccacgccgttacctcaggcccaagaagacgccatgtcatggtccagtcagcaggataccctgagcagcaccgggtactcaccgggcacaaggaaaagaaaatcacgaaagccctccctgtgtcaggcgacctcagccacccctacagagggccctggagatctgctggtcgagcagccactcgcagaagaacaaccaccttgcggcaccagcctcgcaccagttaaaagagctgagggcgaagccgagggcgcccgaggcgcagcagaaccctttctggcgcaggcgagactcgcctgggaggcccagcaggctcatttccacatgaagcagcggagctcgtgggacagccaacaggatggttcagggtatgagagcgatggcgctctccctttaccaatgcccggtcctgtagtgagagccttctccgaggacgaagcgctcgcacagcaagaaaatagacattggaggagggggactttcgaaaaactggggttcccccagatacttctggaaaagagtgtaagtgtgcagactaatctcgccagtccagagccttacctccaccccagccagtccgaggacctggcagcgtgcgcgcaatttgaaagctctcgccaatcaagaagcggggttcccagttctagctgtgtcttcccaactttcactttaaggaaaccatccagtgagacagatattgagaactgggcatccaaacacttcaataagcacacccaaggcttgttccggcggaaggtgagcatagctaacatgttggcctggagctctgagagcattaagaagcccatgatcgtgacatcagatcggcacgtcaagaaagaagcttgtgaactgtttaagctgattcagatgtacatgggagacagacgagctaaagccgatcccctacatgtggctcttgaagtcgctaccaaaggatggagcgtacaggggttgagggacgagctgtatatccagttatgtcgacaaactacagaaaacttccggctggagagtctcgcaaggggatgggaactcatggctatatgccttgccttttttccgcctactcctaaattccattcttatttagaaggctatatatacaggcatatggatccggttaacgacacaaagggagtcgcaattagcacctacgccaaatattgctaccataagctccagaaagccgcgctgactggggccaaaaagggactcaaaaagcccaatgtggaggagattaggcatgcgaaaaatgccgtcttctcaccttccatgtttggaagtgccctgcaggaagtcatgggtatgcagcgggagcgttaccccgagagacagttgccatgggtacagacacggttatccgaagaggtgctagctctgaatggtgaccaaacagaggggatttttcgcgtgccaggggatatcgacgaggtgaacgcactgaaacttcaggtcgatcaatggaaagtgccaaccggtctggaggacccacatgtgccagcttcactgctgaagctttggtatagagagctggaggagcccctcatcccacacgagttttatgaacagtgtatcgcccattatgattcccccgaagccgccgttgcagtggttcacgcgctgcccagaattaaccgaatggttctctgctaccttatccgctttttacaagtcttcgtccagccagctaatgtggccgtcacaaaaatggatgtgtccaatctggccatggtcatggcaccgaactgcctgagatgtcagtccgacgatccaagggtgatatttgaaaacactaggaaagagatgtcattccttagagtgttgattcagcacttagacacttccttcatggagggggtgctttag

SEQ ID NO: 26897 - DNA, 1503 bp, synthetic construct
  source 1..1503: mol_type = other DNA; note = Synthetic coding sequence
atggccgccgtgaagaccctgaaccccaagggcaccatgaagatgctggtcagtggggctggcgacattaaactcaccaaggacggaaacgtgttgctgcacgaaatgcagatccaacatcccaccgctagcttgattgcgaaggtggctaccgctcaggacgacataacaggagacggtactacctccaatgttctgattatcggggagctgctcaaacaggcagatctgtatatcagtgaaggcctacacccacggattattacagaggggtttgaggctgcaaaggaaaaagcgttgcagtttctggaggaggtcaaagtgagccgcgagatggaccgggagaccttgatcgatgtcgctaggacttcactgcggacgaaagtgcacgcagagttagccgacgtgcttactgaggccgtcgtcgattctatcttagcaatcaagaaacaggatgagccaattgatttatttatgattgagatcatggaaatgaaacacaagtctgaaacagatacatcactgatccggggcctggtcctggaccacggagccagacaccccgatatgaaaaagagagtggaagatgcttatattctgacctgcaatgtctccctggagtatgagaagactgaagtgaattcagggtttttctataaaagcgcggaggagagagaaaagctggtcaaggccgagcgcaagttcatcgaagacagggtgaagaaaatcatcgaactgaagagaaaggtttgcggcgattcggataaaggctttgtggtgattaaccaaaaaggaatcgatccattctccctggacgctctgagcaaggagggtatcgtggctctacgacgcgccaagagaaggaatatggagaggctcacgctagcctgtggtggcgtcgcgttaaattcatttgacgacctgagccctgactgtttgggccatgccggcctcgtctacgaatatacactcggagaggagaagtttactttcatcgagaaatgtaataacccacgctcagtcacccttctcatcaaagggccaaataagcatactctgacacagataaaggacgcggtgagggacgggctgcgcgccgtgaagaacgctatcgacgatggttgcgtcgtaccgggtgccggtgccgttgaagtcgcaatggcagaggcgctgatcaagcacaaaccctccgtgaaggggcgggctcagcttggggtccaggcttttgctgacgcactgcttatcattccaaaagtactggcccaaaactctggattcgacttgcaagagacattagtgaagattcaagccgaacattcagaaagtggccagctggtcggcgtcgatctgaacactggggagccaatggttgccgccgaagtaggggtttgggataattactgcgttaagaagcaactgcttcactcctgcaccgtcatcgccactaacattctcctcgtcgatgaaattatgcgggctggcatgagttcgctcaaggggtag

SEQ ID NO: 26898 - DNA, 1542 bp, synthetic construct
  source 1..1542: mol_type = other DNA; note = Synthetic coding sequence
atgtgggacgtgtgcatggagcggggccaccgggacctggagcagttcgagagagtacacaggtacataagtgaccaactatttacaaatttcaaagagcgaacagagagactggttattagcccactcaatcagctattgtccatgttcacaggcccccataagctcgtccagaaaaggtttgacaagctgttggacttctacaactgcacggaacgcgccgagaaactgaaagacaaaaagacactagaggagctccagtccgcccgtaataattacgaggcgctcaacgcccaactgcttgacgaattgcccaaatttcaccagtatgctcagggactttttactaactgtgtccacgggtacgcagaggcgcattgcgactttgtgcaccaggctctcgaacaactgaaacccctgttgtctctcctgaaggtagcaggcagagaagggaacctgatagctatctttcacgaagagcactctagggtgcttcagcaactacaggtcttcacattcttcccggagtctctgcccgccacaaagaaaccttttgagcgaaagaccatcgaccggcaatccgcccggaagcccttgctaggcttaccgtcttacatgctgcagagcgaggaactgcgcgccagtttacttgccagatacccccctgaaaagctcttccaggcagaacgcaacttcaatgccgctcaggatctggacgtttccctactggagggagacctggtcggagtgatcaagaagaaggaccccatggggtctcaaaaccggtggctaatcgataatggagtcaccaagggttttgtgtacagctcctttctgaaaccctacaatccaagacggtctcattctgacgcctctgtcggttcacacagcagtactgagtccgaacatggctcctccagccctcgatttcctcggcaaaattccggctctactctcacttttaacccaagcagcatggcggtgtcattcacctcaggctcgtgccagaaacaaccgcaggacgctagtccacccccaaaagaatgtgaccagggaaccttatctgccagcctgaacccctctaattccgagtcgagcccctcccgctgccccagcgacccggactccactagccagcctcgatccggcgatagcgcagatgtggcacgagacgtcaagcagcctaccgccactcctagatcatatcggaacttcagacatccagaaatcgtaggatatagcgttcctgggagaaatgggcaatcacaggacttagtaaagggttgcgccaggaccgcccaggctcccgaggatagatccacggaaccagacggcagtgaggctgaaggaaatcaggtgtacttcgcggtgtataccttcaaagccagaaatccgaacgagctgagtgtctccgctaaccagaagctcaagatcctggaattcaaagatgtgaccggcaacactgagtggtggctggccgaggtgaacggcaaaaaagggtatgtcccttccaattatatccggaagacagaatacacatag

SEQ ID NO: 26899 - DNA, 153 bp, synthetic construct
  source 1..153: mol_type = other DNA; note = Synthetic coding sequence
atgatgcagaacgtgcacctggcccccgagaccgacgaggacgacctatactctggatataacgactataatcctatttatgatattgaagaattagaaaacgatgccgccttccagcaggcggtcaggaccagtcatggacgtcgtccatag

SEQ ID NO: 26900 - DNA, 4317 bp, synthetic construct
  source 1..4317: mol_type = other DNA; note = Synthetic coding sequence
atgagcatgctgaagcccagcggcctgaaggcccccaccaagatcctgaaacctgggtccactgcattgaaaactcccaccgccgttgtggcacctgtcgagaagactatctctagtgagaaggcttccagcactccctcctcagagacacaagaggagttcgttgacgattttagagtgggtgaacgggtctgggtcaacggcaataagcctggcttcatccagtttcttggtgaaacacagtttgcgcccgggcaatgggccggcattgttttggacgaacctattggaaaaaacgacggaagtgtcgctggggtgaggtacttccaatgtgagccgttaaaagggatttttaccagaccctctaagcttaccagaaaagtgcaggctgaggacgaagctaatgggcttcagaccactccagcttctcgagccacttcacccctgtgtacctcaacagccagcatggtctcgtcttcaccttcaaccccatcaaacatacctcagaagcccagtcaacctgcagcaaaggaaccctctgccacaccccctatttcaaaccttaccaagaccgccagcgaatctattagtaatttgtctgaggccgggagcatcaagaagggagagagggaattgaagatcggggaccgggttctggttggcgggaccaaagctggcgtggttagatttctaggggaaaccgattttgccaagggagagtggtgtggcgtggagctggatgaacctttgggcaaaaatgacggcgccgtcgctggaactagatacttccaatgtcagcctaagtatgggttgttcgcccctgtacataaagtcaccaagatcggtttcccttctactacaccagctaaagccaaggcgaatgcagtccggcgtgtgatggccaccacttctgctagtctgaaacgatctccgtccgcgagcagcttgagtagcatgtcttccgtagctagcagcgtaagtagccggccaagccgcacggggctgctgacggagacctctagcagatatgctcggaaaatctctggaacaactgcactgcaagaagctctaaaggaaaagcagcagcacatcgagcaactacttgcagagagggacctcgagagagctgaggttgctaaagctacatcccatgttggagaaatcgagcaggagctcgccctggcgagagacggacacgatcaacacgtgctagagctggaagcaaagatggatcaactcaggacaatggttgaggcagcagatcgagagaaagtggagttgctcaatcaactggaggaggaaaaacgtaaagttgaggacctgcagttcagggtggaggaggagagtattacaaaaggagacttagaacagaaatcccagatcagcgaggatcccgaaaatacacagaccaaactggagcacgcccgcatcaaggaactcgagcagtccttgctcttcgaaaaaacaaaggccgacaaactccaacgtgagctggaggacactcgggtggcgaccgtgtccgagaagagtcggattatggagctggagaaggatctcgccctacgagtgcaagaagtggctgagctccgacggcgactggaatctaataaaccagccggtgacgttgatatgagcttgagcctgctgcaggagatcagctccctgcaggaaaagcttgaagtgacccgaaccgatcatcagcgtgagatcacctctcttaaggaacattttggagcccgcgaagagactcatcagaaggagattaaggctctctatactgcaaccgagaagctatcaaaagagaatgaatctctgaagtccaagctagaacacgctaataaagagaactccgacgtgatcgccctgtggaaatccaaactggagaccgccatcgcttctcaccagcaggccatggaggaattgaaggttagcttctccaagggcctcggaactgagacggccgagttcgctgagctgaaaacccagattgagaaaatgcgcctagactatcagcacgaaatcgagaaccttcaaaaccagcaggactcggaacgcgccgcccacgccaaggagatggaagccctgagggctaaactgatgaaagtcatcaaggagaaagagaatagtctggaagctattcggagcaagctggacaaagcagaggatcagcacctcgtggagatggaggataccctcaacaagctgcaagaagccgaaattaaggtaaaagagctggaagtgttgcaggctaagtgtaacgaacagaccaaagtgattgacaacttcacatcgcagctgaaagccactgaagaaaagctgctggacctcgatgccctccggaaagcatcttcagagggcaaatctgaaatgaagaaactgagacagcagctggaggccgcagagaaacaaatcaagcatcttgaaatcgaaaaaaacgccgagtcctcaaaggcaagctctatcaccagggagttgcagggacgggaactcaagttgaccaacttgcaagaaaatctaagtgaggtatcccaagtgaaagaaaccctggagaaggaactgcaaatcctgaaagagaagttcgcggaggcaagtgaagaggcggtgtctgtgcaacggtcaatgcaggagaccgtgaacaaactgcatcagaaggaggagcagttcaacatgcttagcagtgacctggagaagctccgtgagaacctggcggatatggaagcgaagtttcgtgaaaaggacgaaagggaagagcagctcatcaaggcgaaggagaagctagaaaacgacatcgccgagatcatgaaaatgagcggcgataatagctcccagctgacaaagatgaatgatgaactgaggcttaaagaacgcgatgtggaagaattgcagctcaaactcactaaggcaaacgaaaatgcatcatttcttcaaaagagcatcgaggacatgaccgtaaaagctgaacagagtcaacaggaggcagcaaaaaaacatgaagaggaaaaaaaggaattggagcgcaaactctcagacttagaaaagaagatggaaacttctcataaccagtgccaggagcttaaagcacgatacgaacgagccacctctgaaacaaaaacaaaacatgaggagatcttgcagaacctgcaaaagaccctgctggataccgaggacaagctgaagggtgcaagagaggagaatagcggcttattgcaagaactggaagaactgcgtaagcaggcggataaagccaaggcggcccagaccgcggaggatgccatgcaaatcatggagcagatgactaaggagaagactgagactttggcgtctcttgaagatactaaacagacaaacgccaagctacagaatgagctggatacactcaaggaaaacaacctcaaaaacgtggaggaactgaacaagtcaaaggaactgctgaccgtagaaaaccagaagatggaggagtttaggaaggaaatagagaccttaaagcaggcagcagcccagaaatcacagcagctgtctgcgctgcaggaggaaaatgttaagctagccgaagagcttggccgatcccgcgacgaggtgacaagccaccagaagctcgaggaggaacgttcggtactgaacaatcagttgctggagatgaaaaagcgggaatccaaattcatcaaagatgcagatgaggaaaaggcatccctacagaagtcaatttctataacctcagctttactgaccgagaaagatgctgagctggagaagctgaggaacgaagttaccgtcctgcgtggcgaaaacgccagcgcgaagagtctccactccgtggttcagaccttagagtctgataaagtgaagctagagctaaaggtgaagaacctggagttacagctgaaggaaaacaagcgccagttatctagttctagtgggaacaccgatactcaggcagacgaggacgagcgcgctcaagaatctcagatagatttcttgaattcagtgattgtcgacctgcagaggaagaaccaggatcttaaaatgaaagtagaaatgatgtctgaggctgctttgaacggcaacggagacgatctgaataactacgattccgatgatcaggagaaacagagcaagaaaaaaccgagactattctgtgatatatgcgactgctttgatcttcacgacactgaagactgccccacccaggctcaaatgtcagaggatccacctcatagcacacaccatgggagccgcggggaggagaggccctattgcgagatctgcgagatgttcggacactgggcaactaattgtaacgatgacgaaacattctag

SEQ ID NO: 26901 - DNA, 636 bp, synthetic construct
  source 1..636: mol_type = other DNA; note = Synthetic coding sequence
atggccttcgccgacagccacctgtggaagctgctggaccggcacgcaaatactattagactgttcgtgttgctgcctgaacagagccccgtgtcttattctaaacgcacggcctatcagaaagcgggaggggactctggcaacgtcgatgatgactgtgagcgggtgaagggtcccgttgggagcttaaagtcagtcgaagctattctggaagaatctacagagaaactcaaatcactcagcctgcagcaacaacaggatggcgataacggcgattcgagcaaatcaacagagaccagcgatttcgaaaatattgaatcccccctcaacgagagagatagctcagcctcagttgataacagggaactggagcagcacattcagacatccgatcctgagaatttccagagcgaggagagaagtgattcggatgtgaacaacgacaggtccacttccagtgtagattctgacattctgtcctcaagtcactcttctgatacattgtgcaatgccgacaacgctcagatccctctggcgaatggacttgactcacatagcattaccagcagtcgaaggactaaggctaatcgggagaaacggaatatgggttatagtagaagacggctgtggaattag

SEQ ID NO: 26902 - DNA, 2136 bp, synthetic construct
  source 1..2136: mol_type = other DNA; note = Synthetic coding sequence
atgctggccagcctgaaggtgaagaagcaggagctggccaacagcagcgacgccacgcttcctgatcggccactgtctccccccctcactgcccccccgactatgaagtcatcggagttttttgaaatgctcgaaaaaatgcagggcatcaagctggaggagcagaaaccggggccgcaaaagaataaggacgattacatcccttaccctagcatcgacgaggttgtcgagaagggtggaccctatccccaggtgattctgcctcagtttggcggctactggatcgaagaccctgaaaatgtgggcactcccaccagtctcggctcatcaatatgcgaggaggaggaagaggacaatctgtctcctaacacttttggttacaagcttgaatgcaagggcgaagccagagcatatcgacggcactttctgggcaaagaccacttaaacttctactgcacaggctccagcctggggaacctcattctgtctgtgaagtgcgaagaggccgaagggattgaatatctccgagtcattttgagatccaaacttaagacagtgcatgaaaggatccccttagctggactgtctaagcttccatccgtcccccagatagccaaagctttctgcgacgatgctgtgggattacgatttaatcccgtcctgtatcctaaagcttcacagatgatcgtgtcctacgacgaacacgaggtgaataatacgttcaagtttggcgttatatatcagaaagcaagacagaccctcgaggaagagctctttgggaacaatgaggagagccctgctttcaaagagtttctggacctactaggagacactattactttacaagattttaagggcttccgtggaggcctggatgtcacacacgggcagaccggtgttgagagtgtttacaccacattcagggacagagaaatcatgttccatgtcagcaccaaactgcccttcacagatggggatgctcaacaactccagcgaaaaagacatatcggaaatgacatcgtggctatcatcttccaggaagaaaacaccccatttgttcccgacatgatcgcatctaacttcctccacgcctatatcgtggtacaagtggagacgcccggcacggaaaccccgtcatataaagtctccgttacagcacgcgaagacgtgccgacctttggcccccccctcccatcccctccagtgtttcagaaaggccccgaattcagggagttcctgctgaccaaactgacaaatgccgagaacgcgtgctgcaagagcgacaaattcgccaaactggaggatcgaacgcgtgccgccttacttgataatctgcatgacgaacttcacgcccatacgcaggccatgctcggacttggacccgaggaggacaagttcgaaaatgggggccacggcggtttcctggagtccttcaaaagagcgatacgagtgaggagccactctatggagacgatggttggcggccagaagaagtcccactccggaggaatcccaggaagcttatcaggcggtatttcccacaacagcatggaggtcactaaaaccaccttcagccccccagtcgtagcggcaaccgtgaagaaccaaagtaggagtcctatcaagcggcgcagcggccttttcccccgccttcacactggatctgaaggccagggcgattctcgggcgcgttgcgactctacaagcagtactcctaagaccccggacggcggccattcaagccaggagattaagtccgagactagcagtaatccatcaagccctgagatttgtccaaataaagagaagcccttcatgaagctcaaggaaaacgggcgggcaatttctcgctcctcttcctctacctcctccgtgagtagcaccgctggggagggagaagcaatggaggaaggcgactcagggggctcccagccctccaccacctccccttttaagcaggaagtgttcgtctattccccctcccccagctccgaaagtccctcgctgggcgcggccgcaacacccattattatgagccgatctcctaccgacgctaaatcccgtaatagccctaggagcaacctgaagtttcgtttcgacaagctttcccatgcttccagcggcgccggccactag

SEQ ID NO: 26903 - DNA, 1089 bp, synthetic construct
  source 1..1089: mol_type = other DNA; note = Synthetic coding sequence
atggacggcctggacgacgtggagaacagcatgctgtactacaaccaggctgtcattttgtaccacctgagacaatacaccgaagccatttccgtaggggagaaactgtaccagtttatcgaacccttcgaagaaaaattcgcccaggccgtgtgcttcctgctcgtggacctgtacattctcacctaccaggcagagaaagctcttcacctgttagccgtcctggaaaaaatgatctctcaggggaacaataacaagaatgggaaaaatgagactggaaataataacaataaggacgggtccaatcacaaagcggaatcgggcgccctcatcgaggccgccaagagtaagattcaccagtacaaagtgagggcctacatccagatgaagtctttgaaagcctgtaaacgggagattaagtcagtgatgaatactgctggcaatagcgcaccctccctcttccttaagagcaattttgagtatctacgcggcaactaccgtaaagccgtgaaactgcttaactcgagtaatatcgccgagcatcctggcttcatgaagaccggcgaatgccttcgttgtatgttctggaataatttaggctgcattcactttgcaatgagcaaacataacctgggaatcttttactttaagaaggcactgcaggaaaatgataacgtttgtgcgcagctgtccgcaggctcaaccgatcctggcaagaagttttcggggcgccccatgtgcacacttttaactaataaacggtatgagctgctgtataattgcgggattcagctcctacacataggccgtcctctggcagcatttgagtgcctgattgaagcggtacaagtgtaccatgccaatcccagactctggctccggctcgccgagtgctgtattgctgctaataaggggacatctgagcaggagaccaagggcctgccctctaagaagggcatcgtacagtccatcgtgggccagggctatcaccgcaagattgtgctcgccagccagtccatccagaatacagtgtataacgatggacagtcctcagccatccccgtggccaaggccggcaagtgggggtag

SEQ ID NO: 26904 - DNA, 1821 bp, synthetic construct
  source 1..1821: mol_type = other DNA; note = Synthetic coding sequence
atgtgcggcgccggcttcggccacttcgagtggctggccggcggcggagctggacaggacgtggggagatcatgcatcctcgtgagcatagcaggcaagaacgttatgctggactgtggaatgcacatggggttcaacgacgatcggagattccccgatttctcttatatcacacagaacgggaggctgaccgacttcctggactgtgtgattataagccatttccatctggatcactgtggcgctctcccctatttcagtgaaatggtggggtacgatggccccatttatatgactcatcccactcaggctatatgtcctatcctgctggaggactataggaagattgctgtcgacaagaaaggcgaggcaaatttcttcacctctcagatgatcaaagactgtatgaagaaagtggtcgcggtacacttacatcagacagtccaggtagacgatgagctcgagatcaaggcctattacgctggtcatgtgctcggcgctgcaatgtttcagattaaggtggggagtgagtctgtagtttacactggtgactataacatgacccccgatcggcacctgggcgcggcttggatcgataagtgcaggcctaatcttcttataaccgagagcacctatgcaaccacaattagggactctaagcggtgtcgcgaacgggactttctgaaaaaggtccacgaaacggtcgagcgcggtggtaaagttttaattccagtctttgctctgggacgggcccaggaactgtgtatactacttgagacattttgggaacgcatgaatctgaaggtccctatctacttctcaaccggcctcactgaaaaagccaatcattattataagctcttcattccctggacaaatcagaagattcgaaagacattcgtgcagaggaatatgttcgaattcaagcacatcaaggcttttgatagagcctttgccgataatcctgggcccatggtggtctttgccacgcctgggatgctgcacgccggacagtctctgcagatatttagaaaatgggcggggaacgagaagaacatggtcattatgcctggatactgcgtgcaaggcactgttggccataagatactgtccgggcagcgcaagctggagatggagggtcggcaggttctcgaggtgaagatgcaggtggagtacatgtcattcagtgcccacgcagatgcgaagggcatcatgcagctcgtgggccaggccgagccagagtctgttctactcgtccacggagaggccaagaaaatggaatttctgaagcagaaaattgagcaagagctgcgagttaattgctatatgcctgcgaatggagagaccgtcaccctacctacctcaccttctattcccgtcgggataagcctcggcctgctgaagcgggagatggctcagggcctgctgccggaagccaagaaaccaagattgttgcacggaaccctaatcatgaaggattccaacttcagactggtgtcatcagagcaggcactaaaagaactcggcctcgccgaacatcaactgaggttcacttgcagagtgcacctgcacgacaccaggaaggaacaagagacggcactgcgggtgtattctcatttgaaatctgttctgaaggaccactgtgtgcagcacctcccggacggctcagtgactgtcgaatctgtcctgctccaggcagccgcccctagtgaagatccagggaccaaggttcttctggtttcctggacttatcaggacgaagagctgggctcctttttaacctccttgctgaaaaaaggactgcctcaggccccatcttag

SEQ ID NO: 26905 - DNA, 399 bp, synthetic construct
  source 1..399: mol_type = other DNA; note = Synthetic coding sequence
atgaagaaggtgcggctgaaggagctggagagccggctgcagcaggtggatggcttcgaaaagcccaagctcctgcttgagcaataccccaccaggccccacatcgccgcttgtatgttatacacaatccacaacacatacgacgatattgaaaacaaagttgtggccgatctgggttgtggctgcggggtgctgagcatcgggaccgccatgctgggggccggcctgtgtgtgggcttcgatatcgatgaggatgctttggaaatcttcaacaggaatgccgaagagtttgaactccaaattctcacctggtttaacgtgatgtgcgcttactatcttactgaatgcccatcccatagtatccaaaattatgagtccagcctgtgggaccagaaatag

SEQ ID NO: 26906 - DNA, 1371 bp, synthetic construct
  source 1..1371: mol_type = other DNA; note = Synthetic coding sequence
atgatggtgggcgacggcaccaccagcgtgaccctgctggccgccgaatttcttaagcaggtgaagccgtatgtggaggagggattgcaccctcagatcatcatccgtgcattcaggaccgcgacccagctcgcagtgaataaaattaaagaaatcgctgtgacagtgaaaaaagccgacaaagtcgagcagcggaaactcctggagaaatgcgcaatgaccgccttatcttctaagctgatctctcagcagaaagcatttttcgcaaaaatggtggtggacgccgtaatgatgctggatgacctcttgcagttgaagatgatcggcattaagaaagtacaaggcggcgcactggaagacagtcagctggtggctggagtggcgtttaagaagacgttctcctatgcgggctttgagatgcaacccaaaaagtaccataaccctaagatcgcattactcaacgtagagctggaactgaaagctgaaaaagacaacgccgagattcgtgtccatactgtggaggactaccaagccatcgtggacgccgagtggaatattctgtacgataagctcgaaaagatccaccattccggtgcaaaagttgtacttagcaaattaccaatcggagatgtcgccacacagtactttgccgacagggacatgttctgtgccggtagagtacccgaagaggacctgaagagaacaatgatggcctgtggcggctctatccagaccagcgtcaacgcactctcggccgatgttctggggcggtgtcaggtgttcgaggaaactcaaatcggcggagagcgttataacttcttcacagggtgtccaaaggccaagacttgtactttcattttgcgcgggggggcagagcagtttatggaggaaaccgagcgctctcttcacgacgcaattatgatcgtgcgaagagctattaagaatgattccgtagtggcaggcggaggcgccattgagatggagctgtcaaagtacctccgggactacagcaggacgatccctggaaaacagcagctgcttatcggagcctatgcaaaagccctggagatcattccaaggcaactctgcgacaatgcagggtttgatgccaccaatatccttaacaagctgcgggcccgacacgctcagggcggaacctggtacggagtggacattaacaacgaggacatagcggacaattttgaagcgtttgtgtgggaacctgccatggttcggatcaacgccctgactgccgcttccgaggccgcatgccttattgtctctgttgatgagactattaaaaaccccaggagcactgtagatgcccccacagccgctggacgtggccggggcagaggccgtccccactag

SEQ ID NO: 26907 - DNA, 2520 bp, synthetic construct
  source 1..2520: mol_type = other DNA; note = Synthetic coding sequence
atggacggcaaggccgacgtgaagagcctgatggccaagtacaacacaggggggaaccctactgaggacgtgagtgtgaactcccggcccttccgggtaactggaccgaactcctcgagtggtatacaagcccgcaagaatctcttcaacaaccagggcaacgcctcaccgcccgcaggcccaagcaatgtgcccaagttcgggtcacctaaaccccctgtggccgtgaagcctagctcagaggaaaaaccggacaaagagccaaagcctccattcctgaagccgactggtgcaggccagagattcggcacccccgcgtctctgacgacaagggaccccgaggccaaggttggatttctgaaacccgtgggccccaagcccataaaccttccaaaggaggacagcaagccaaccttcccatggccacccggcaataagccctcactgcactctgtgaaccaggaccacgacctgaaacctttagggcccaaaagcggacctactccacccactagtgagaatgaacaaaagcaggccttcccgaagctcaccggggtcaagggtaagtttatgtcagcctcccaggacctcgagcccaagccacttttcccaaaacctgccttcggccagaaacctcccttgtctactgaaaactcgcacgaggatgagagcccgatgaagaacgtcagttcgtcaaaaggttcccctgcccccttgggcgtgaggagcaagtctggaccgctgaagcctgcacgtgaggacagcgagaacaaggaccacgccggcgagatatctagcctgccgtttcctggagtggtgcttaagccggctgcatctcgtggcggtcccggcctatcaaaaaacggcgaagaaaaaaaggaggatcggaaaatagatgcagcaaaaaatacctttcagagtaagattaaccaggaagaactggcgagtggaacgccgcccgcacggttcccgaaggcccctagcaaactcacagtgggaggcccttggggacagtcgcaggagaaggagaagggagataaaaattccgcaacacccaaacagaagccactgcctcccctgtttacactgggaccaccacccccaaaacctaatcgcccacccaatgtggacctcacgaaatttcataagaccagttccggcaactcaacctccaagggccaaactagctatagtacgacctccctgcctccccctccccctagtcaccctgcctcacaaccccctctcccggcgagtcacccatcacagcccccagtgccttcccttccgccaagaaacattaaaccaccgtttgatttaaaatctccagtgaacgaagacaatcaggacggtgtcactcatagtgacggcgcgggcaacttggatgaagagcaggactcagaaggggaaacctacgaggacattgaagcatctaaggaaagagaaaagaagcgggagaaagaagagaagaaacgtttggagctagagaagaaggaacagaaggaaaaggagaagaaggagcaagaaatcaaaaagaagtttaagttgaccggcccgatacaggttatacatcttgccaaagcatgctgcgatgtcaaggggggaaaaaatgagctcagcttcaaacagggcgagcagattgagatcatcagaatcaccgataaccccgaaggaaagtggctaggaaggactgctagagggagctatggatatattaagacaaccgcggtcgaaatcgattatgattccctgaagctgaaaaaggattctctgggcgccccctccaggcccatcgaggacgaccaggaagtgtacgatgacgtcgctgagcaagatgatatttcctctcactcccagagcggaagtggcggaatttttcctcctccacctgacgacgatatatacgatggcatagaggaggaggacgcagatgatggttcaacactgcaggtccaggagaagtccaacacctggagctggggcatcttaaaaatgctcaaggggaaagatgaccggaagaaatccatcagagaaaagcccaaggtgtccgactccgacaataacgagggctcctcttttcctgcccctcctaagcagctggacatgggtgacgaggtgtacgacgacgtggacacgagtgatttcccagtcagcagtgccgagatgtctcaagggacgaatgtcgggaaggcaaagaccgaggaaaaggatctcaaaaaattaaagaagcaggaaaaagaggagaaggactttcggaaaaagttcaaatacgacggcgagatccgggtgctttacagcacaaaggtaaccacttccataacatccaagaagtggggcacccgagacctacaggttaagccgggggaatcactggaagtcattcaaacgacagatgataccaaagtgctttgcaggaacgaggagggaaagtacggctacgtgctgaggagctacctggcagacaatgatggggaaatttatgacgacattgccgacggttgtatatacgacaacgattag

SEQ ID NO: 26908 - DNA, 1017 bp, synthetic construct
  source 1..1017: mol_type = other DNA; note = Synthetic coding sequence
atgggccaccggtacatcgaggtgttcaagagccaccggaccgagatggattgggtcctcaaacatagcggcccaaatagtgccgatagcgctaacgatgggttcgtccgcctacgtgggctgccatttgggtgcaccaaagaagaaattgtgcagttcttctctggcctggagattgtccctaacggaattacactacctgtcgacccagaagggaaaatcacaggagaagccttcgtgcagtttgcctctcaggaactggctgagaaagccctcggaaagcataaagagaggataggccataggtatatcgaggtgttcaagtcttcccaggaggaggtaagaagctactctgaccctcccttgaaatttatgagtgtgcagcgcccaggcccctacgatcggcccggaactgccaggagatacattggaatcgtgaagcaggcggggctggaacggatgcgaccaggcgcatactctactggttatggcggctatgaggaatattccggtctatccgatggctacggtttcaccaccgatttgttcggaagggatctgagttactgtctgtctggcatgtacgatcataggtatggcgacagcgagttcacagttcaaagcactactggccattgcgtccatatgcgcgggttaccctataaggcaacagaaaatgacatctataatttcttctctccgctgaatcctgtgcgcgtccatatcgagattggcccagatggtagagttaccggagaggcggatgtggagttcgctactcacgaggaagctgtggccgcaatgtctaaagatcgagcaaacatgcagcaccggtatattgaactcttcctgaacagcactaccggtgcatctaatggagcctactccagtcaggtgatgcagggcatgggtgtctctgcagcgcaggccacttattccgggctggagtcgcagagtgtgtcggggtgttacggcgccggctattctggacagaactccatggggggctatgattag

SEQ ID NO: 26909 - DNA, 1536 bp, synthetic construct
  source 1..1536: mol_type = other DNA; note = Synthetic coding sequence
atggccagcgtggtggagtacaagggcctgcgggccggctaccactgtggctactgcgatagtaaagaaggcaaggcatcttgcgggatgtgggctcacagcatgactgtgcaggattatcaggacctcatcgataggggttggcggaggagcggaaaatacgtgtacaagcctgtgatgaaccaaacctgttgtcctcaatacactatccggtgtaggccactgcagttccagccttcaaagagccataaaaaggtactcaagaaaatgcttaaatttctggccaagggcgaagttccaaaaggcagctgtgaagacgagccgatggatagtaccatggacgacgctgtggctggggacttcgccctgattaataagctggacatccagtgcgatctgaagactttatccgacgacatcaaggagagtttggaaagtgaggggaaaaacagcaagaaagaggagccgcaggagttgctccaatcacaggattttgtgggcgagaagctggggtctggtgagccttcccacagcgtgaaggttcacactgttccaaagccaggcaagggagccgatctgagcaaacctccttgtcgaaaagcaaaggaaatcaggaaggagaggaagaggctgaagcttatgcagcagaatcctgcaggtgagctcgaaggatttcaggcccagggccaccctccatcactcttcccaccaaaagccaaaagcaatcagccaaagagtctggaagatctcattttcgagtctctacctgagaacgcatctcacaaacttgaggtgcgcctcgtgcccgtttccttcgaggatcctgaatttaaatcaagcttctcccagtccttttctttgtacgttaagtatcaggtcgccattcaccaggacccacccgacgagtgcggaaaaaccgagttcacccggttcttgtgctcctcgcctctggaggccgagacaccccctaacggtcctgactgtgggtacggctcctttcatcagcagtactggctggatggcaagataatcgcggtaggggtgattgacattcttcccaattgtgtatcatctgtgtacttgtactacgatcccgactactctttcttgtccctgggcgtgtattccgctctgagagaaatagccttcacacgccagctgcatgaaaaaaccagccagctgagttactattacatgggattctatatccactcctgcccaaagatgaaatacaagggacagtatcggcctagtgatctgctgtgtcccgagacgtacgtgtgggtccctatcgagcagtgtttaccatcgttagaaaacagcaagtactgccggttcaatcaggaccccgaagctgtggatgaggatcgctctaccgaacctgacaggctgcaggtctttcacaagcgcgctatcatgccctacggcgtgtataagaaacaacagaaggacccttccgaagaggccgccgttctgcagtatgcgtcattggtgggacagaaatgcagtgagagaatgctgctcttccgcaactag

SEQ ID NO: 26910 - DNA, 3963 bp, synthetic construct
  source 1..3963: mol_type = other DNA; note = Synthetic coding sequence
atgcaggacgacagcatcgaggccagcaccagcatcagccagctgctcagggaatcttatcttgccgagactcgacacaggggaaataatgaacggtccagagctgaacccagctcgaacccctgccatttcggttcgccaagtggagccgctgagggtggaggaggacaggatgacctgcccgacttgtccgcattccttagtcaggaggagctggacgagagtgttaacctcgccaggctggctatcaattatgaccccctcgagaaagctgatgaaactcaagccagaaaaaggctgtcacccgaccagatgaagcactctcccaacctgtctttcgagccaaacttctgccaagataatccgagatcccccacatcctccaaggaatctccgcaggaggccaaaagaccccagtactgcagcgagacccaatctaagaaggtatttcttaacaaagctgctgatttcatcgaagagttgagctctctattcaagtcccacagttccaaacgcatccgtccccgggcgtgtaaaaaccacaagagcaaactggagtcacagaataaggttatgcaggaaaactcctctagcttcagcgatctatcagagcgaagggaacgatcttcagtgcccatccccatcccggctgacactagagataatgaagttaaccacgccctggagcagcaggaggccaagcgcagagaggcggaacaggctgcaagcgaggccgcgggcggcgacaccacgcctggatcctctccttccagcctctactatgaagaaccgctgggccagcctccaagattcacccagaagctgagaagtagagaggttccagaaggaacccgagtgcaactagattgcatcgtcgtggggattccccctccacaagtcaggtggtactgtgagggtaaagagctggagaactctccggacatccacatagtgcaggcagggaacctgcacagcctgacgatcgccgaggccttcgaggaagacaccgggaggtattcatgctttgcatcgaacatctatggcaccgactccacatctgccgagatctatatcgagggcgtaagcagctccgacagcgagggggacccaaataaggaagaaatgaatagaattcaaaagcccaatgaagtgagctccccccccaccacctctgcagttatcccccccgctgttccccaggcacagcacttggtagctcagcctcgggtcgcaaccattcagcaatgccagtcccccacaaactatcttcagggactggatggcaagccgattattgcagcaccggtgtttaccaagatgttgcagaacctctctgctagcgagggacaactggttgtgtttgaatgccgggtcaagggagccccttcccccaaagtggaatggtatagggaaggcaccctgatcgaggactccccagatttccgcatcctgcaaaaacggccagtttgtatggagcatatagaagagatttgcacgctggtcatcgccgaagtattcgcagaggacagtggatgtttcacctgcacagcaagtaacaagtacggaacagtctcgtccatagcccagctgcatgtacgcggaaacgaggacttgagcaacaatggttctctgcactccgcaaatagcactactaacctggcagcaattgaacctcagccatccccaccacactcggagcccccatcagtcgagcaacctcctaagcctaagctagagggtgttttagtcaaccacaatgaacctcgatcatcctcccggatcggtcttagggtacattttaatcttcctgaggacgacaaaggcagtgaggcctcatccgaggcaggagtcgtcactactagacaaacaaggcccgattccttccaagagcgctttaatggccaggccactaagactcccgaaccaagttctcctgttaaggagcctcctcctgtactggctaagcctaaactcgattcaactcagctgcagcagctccataatcaggtactcttggaacagcatcagctgcaaaaccccccccctagctcacccaaggagtttcccttctctatgacagtgctaaatagcaacgctcctccggctgtcacaacgagcagcaaacaggtaaaggccccatccagtcaaactttctctctggcaagacctaagtatttctttcccagtaccaacacaaccgctgccactgtggccccatcatcttcacccgtgttcaccttatctagtacccctcagacaatccagcgaaccgtttcgaaagaatccctgttagtgtctcatccctctgtgcaaacaaaatcacctgggggacttagtatccagaacgaacctcttccaccaggccccactgagcccactccccctccttttacctttagcattccttctggaaatcagtttcagccccgttgcgtgtctcctattccagtgagtcctacatcaagaatccagaatcctgtcgcttttctgtcttccgtgttaccttccttgccagccattccccccactaacgcaatgggcctacctcgttcagccccttccatgcccagccagggcctcgctaaaaagaatactaaaagtccccagccagtgaatgatgataatataagagaaactaaaaacgcagtaatacgggatctggggaaaaaaatcacattttccgatgttagaccaaatcaacaggagtacaagatctcttccttcgaacagagactcatgaacgagattgaattccgacttgagaggactccagtggacgagtccgatgatgaaatccagcacgacgaaatccccaccgggaagtgtatcgcccctatttttgacaagaggcttaagcactttagagtgacagagggatcccccgtgacctttacttgtaagattgtggggatccctgtaccaaaagtgtactggttcaaagacggcaagcagatttctaagagaaatgagcattgcaagatgcgtagagagggggacggaacttgcagtctgcatatcgagtccacaacttcagacgacgatggaaactatacaattatggccgctaatcctcaaggccgcatatcttgctccggccaccttatggtacaaagcttgccgatccgaagccgcctcacttcagccggccaatcacaccggggccggtcaagagtgcaggaacgcgacaaggagcctttgcaggagaggttcttccgaccccattttctccaagcacctggggatatggtggcacacgagggccggctgtgtaggctcgactgcaaggtgtccggcttgccgcccccggagttgacctggcttctcaacggacagcccgtgcttcccgatgcttcccataagatgctcgtacgagagaccggggtgcactccctactgatcgaccccctcacacaaagagatgctggtacctataaatgtattgcaacgaataagaccggccaaaacagtttcagcctggaactgagcgtggttgccaaagaagtcaagaaggctccggtgatcctggagaagttgcagaactgcggcgttcctgaaggccacccagtcagacttgaatgtagggtgattggaatgccccccccagtattctactggaaaaaagataacgagaccatcccttgtaccagagagcgcatttccatgcaccaagataccacaggctacgcctgccttcttatccagccagcaaagaagagcgatgccgggtggtatactctatccgccaagaacgaggctgggatcgtgagctgtacagcacgccttgacatttacgctcagtggcaccaccagatccccccacctatgagcgtccgcccgagtggcagcagatacggctctcttacttcaaaaggtctagacatattttcagctttcagttctatggaaagcaccatggtctactcttgttcctccagaagcgtagttgagtctgatgaattatag

SEQ ID NO: 26911 - DNA, 2292 bp, synthetic construct
  source 1..2292: mol_type = other DNA; note = Synthetic coding sequence
atgcaggacctgggcgacaagctgcggatgatcgtgatgggccaccgacgggtccatatctctcgtcaattggaagttgaacccgaggagccggaggccgagaataagcataaaccacgtagaaaaagcaaaaggggcaaaaaggaggcggaggatgaactgtccgccaggcacccagctgaactggctatggaacctacccctgaactgcctgcagaagtcctgatggtggaggttgaaaatgtagttcatgaggattttcaggtgactgaggaagtaaaggctctgactgcagagatcgtgaagaccattagagatatcattgccttaaaccctctgtatcgcgagtcagtactgcagatgatgcaggctggccaaagagttgtggacaatcctatctacctttctgacatgggggcagctctgactggggccgaaagtcacgagttgcaagacgtcctcgaggaaaccaacattcctaaaaggctctataaagccctgtccttactaaaaaaagagttcgagctctctaagctgcagcagcggctcggccgtgaggtggaggaaaagataaaacagactcatcgtaagtatttacttcaggagcagctgaaaataatcaagaaggagcttggcttagagaaagacgacaaggacgctatagaagagaaatttcgggagagactcaaagagttagttgttcccaagcacgtcatggatgtggtggacgaggaattgtcaaagcttggcctgctcgataatcactcatctgagtttaacgtgactcgaaattaccttgattggctgacttccatcccatggggtaaatattctaatgagaacctcgatctcgcaagggcccaggccgtgcttgaggaagaccattacgggatggaggacgtgaagaagcgaatcttagagttcatcgccgtctctcaactgcgtggcagtacccagggcaaaatcttgtgtttttacgggcctccaggggtcggaaagacatctattgcccgatcaatagctagagcactcaacagggagtattttaggttttctgtcgggggtatgaccgatgtagctgaaattaagggacaccgacgcacctatgttggggccatgcctggcaagatcatccagtgtttaaagaagacaaaaaccgaaaaccctctgatactgattgacgaagtggataagatcggtcggggttatcagggtgacccttctagcgcactgctggagttactggatcccgaacagaatgccaactttctggaccactacttagatgtcccggtggacttgtcaaaggtgctctttatctgtacggccaacgtcactgacaccattcccgaacccctcagggatcgcatggagatgataaatgtctctggctacgtcgcccaggaaaaattggctattgctgagcgctacctggtgccccaggccagagctctttgcggcctggacgagtctaaagcaaaattgtcaagcgatgtcctgactttactgattaagcagtattgtagggagagcggcgttaggaatctacagaagcaggtcgaaaaggtcctccgcaagagcgcatataaaatagtgagtggtgaggcggagtcagtcgaggtgacccctgaaaacctgcaggattttgtgggtaagcctgtcttcaccgttgaacggatgtatgacgttacgccaccaggggtggtgatgggtttagcttggactgctatggggggatctaccctgttcgtcgaaactagcctgaggagaccgcaggataaggacgccaagggtgataaagacggctctctcgaggttacaggacagctcggagaggtgatgaaagaaagcgcgcggatagcatatacgttcgctagagcctttttgatgcagcacgcccccgccaacgactacctggtcacgagtcacattcaccttcatgtgcccgagggtgccactccaaaggacgggccttcagctggttgcacaatcgttacggcgcttctgagtctggccatgggaaggcccgtgcgccagaacctcgcaatgactggcgaggtgagtttgaccggtaagatcctgcccgtggggggcatcaaggaaaagaccatcgccgctaagcgcgccggagtgacctgtatcgtgctacccgcagagaacaaaaaagatttttatgacctcgctgctttcatcacggagggactggaggtgcatttcgtggagcactatcgcgagatcttcgacatagcattcccggacgaacaggccgaggcacttgctgtcgagcggtag

SEQ ID NO: 26912 - DNA, 558 bp, synthetic construct
  source 1..558: mol_type = other DNA; note = Synthetic coding sequence
atgaacaacaaccagatcgtggccaaggacctgcaggacgagaagatcttgtaccctgaattcaacaaacttaaggagcgaaacagagagctgaaaacacttctgagcattggagggtggaatttcggcacttccaggtttacaaccatgttgagtacctttgcaaaccgtgagaagttcattgccagtgtgatatccttactgcgtacccacgactttgacggactcgacctttttttcttatacccaggacttcgtggctcccccatgcacgatcgctggacattccttttcctgatcgaggagctgctgttcgccttccggaaggaagccctcctgactatgcgtccccgcctgctgctgtccgctgctgtgagcggcgtgccgcatatcgttcagacttcctacgatgttaggtttttgggacgtttcgtgcccttgagtggagagcggcggtctacagggcttatcacttccatgtcccgtatgcccacccgtggtaagtctgggttggccatgacgatgccttccgcctccgtcaccaggcacggtttatag

SEQ ID NO: 26913 - DNA, 1269 bp, synthetic construct
  source 1..1269: mol_type = other DNA; note = Synthetic coding sequence
atgagcggcggcaccccctacatcggcagcaagatcagcctgatcagcaaagccgagatacgatacgaaggtatcctgtacacaatagataccgagaattccacagttgcactcgccaaggttaggtcttttgggacagaggatcggcctacggaccgcccaattccaccaagggatgaagtcttcgagtacattatctttcgcggcagcgacatcaaggatctcacagtctgcgagcctccaaagccgcaatgtagcctgccacaagatcctgcaattgtgcagtcctctctgggctcctctacgtcgagctttcagtcaatgggtagttatggtccatttggaaggatgccaacatactcccagttctccccctcctccctggtcggtcagcagtttggggccgtcggcgttgggaggtcaagcccgcagctggacccactcaggaaaagccctactatggaacaggcggtgcagacagcatccgctcaccttccagcacctgccgctgttgggcgccgctcccccgtttcaacgcgccccttgccctctgccagccagaaggccggggagaatcaagagcatagaagggccgaggttcacaaggtgtccaggccagagaacgagcagctccggaacgacaataagcgccaagtcgcacctggggccccttccgcacctagaagaggcagaggaggacaccggggaggccgcggccgatttggtatccggagagacggtccgatgaagttcgaaaaggacttcgattttgagtctgccaacgcccagttcaataaagaggaaattgatagagagttccataacaaactcaagctcaaagaggataaattggagaagcaagagaagcccgttaatggtgaggacaaaggtgactctggcgtggatacgcagaacagcgaaggcaacgccgacgaagaagacccactgggacccaattgctattacgataagacgaaaagctttttcgataacataagttgcgacgataatcgggagaggcgcccgacgtgggctgaggagcgccgactgaacgctgagacctttggaattccactgcgtcctaaccgggggagaggaggctatcgcggcagaggcggactgggatttaggggcggaagagggcgaggaggcggcaggggcggaactttcacggctcctcggggcttcagaggggggttccggggaggcagaggtggccgtgagtttgctgattttgagtaccggaagaccacggcctttgggccctag

SEQ ID NO: 26914 - DNA, 1266 bp, synthetic construct
  source 1..1266: mol_type = other DNA; note = Synthetic coding sequence
atggccagcagcagcgtgccccccgccaccgtgagcgccgccaccgccgggccagggcccggtttcgggttcgcatctaagacgaagaaaaagcatttcgttcaacagaaggtgaaagtgtttagagcagctgatcctctggttggtgtgtttttatggggggttgcgcactcaataaacgaactcagccaggtccctccgcccgtgatgctgctgcccgacgacttcaaagcttcttccaagattaaagtgaacaaccacctattccatcgcgaaaatcttcccagccacttcaaattcaaagaatattgcccccaagtatttcgcaatctgagggatcgcttcggaatcgacgaccaggattatctggtttccctcactagaaaccccccttccgaaagcgagggatctgatggacggtttctaatttcttacgacaggacactcgtgataaaagaggtatctagcgaggacatcgccgacatgcacagcaatctctccaactatcatcaatatatagtgaaatgtcacggcaacaccctgctcccacagttcctcggcatgtacagggtatccgttgacaatgaagactcctatatgcttgtcatgcgcaacatgttttctcatagattgcccgtccatcgcaaatatgatctgaagggcagtttagtgtctcgcgaggctagcgataaggagaaagttaaagaactccctaccctaaaggatatggattttctaaacaaaaatcagaaggtttatataggcgaggaagagaaaaaaatttttttggaaaagttaaagcgcgatgtggaattcctcgtgcagctaaaaataatggactacagtctgttattgggcatccacgacattatcaggggctctgaacctgaggaggaagccccagtccgcgaggatgaatcagaggtcgatggcgattgttctcttactgggccaccagccctggtgggttcctatgggacatccccagaaggtatcggcggttatatccactctcataggccactcggccccggagagtttgaatctttcatcgacgtctacgccatcagaagtgcagagggcgctccacaaaaagaggtttactttatgggcctaatcgacatcctgacccaatacgacgccaaaaagaaagccgcccacgctgccaagaccgtgaaacacggcgctggtgccgagatcagcaccgttcaccccgaacaatacgcaaaaagatttctggacttcattacaaacatattcgcatag

SEQ ID NO: 26915 - DNA, 756 bp, synthetic construct
  source 1..756: mol_type = other DNA; note = Synthetic coding sequence
atggacagcgagctgatgcacagcatcgtgggcagctaccacaagccacctgagagagtctttgtgcctagctttacacaaaatgagccatcccagaactgtcatcccgccaacctagaagtgaccagccctaagatattgcacagccccaattcccaggccctgattctcgcactgaagaccctgcaggagaaaatccacaggctggagctggagcggactcaggcagaggacaacctgaacatcttatccagagaggctgcccagtataagaaggctttggaaaatgaaaccaacgaaagaaatctcgctcatcaggagctgatcaagcagaaaaaagacatcagcattcaactgtcatctgcccaatctaggtgcactctgcttgagaaacaactggaatatactaaacgcatggtcctgaacgtagagcgggagaagaatatgatcttggaacaacaggcccagctacaacgcgagaaagaacaagaccagatgaaactctatgccaagctggagaaactggatgtccttgagaaagagtgtttccgattaaccacgacccagaagactgctgaggataaaattaaacacctcgaggaaaaattaaaggaggaggagcaccagcggaaattgtttcaagataaggcatcagaactgcagactggtctggaaatctccaaaataattatgtcatccgtttccaatctgaagcactctaaagagaaaaagaaatcgagtaaagtgtgtatctag

SEQ ID NO: 26916 - DNA, 1980 bp, synthetic construct
  source 1..1980: mol_type = other DNA; note = Synthetic coding sequence
atggacagccagggccgggtgtgggcccaggagatgctgctgcgggtctcccccgatcatgtgacactgctggatccggcttcgaaggaagagctggaatcctatccgttgggcgccattgtgaggtgtgacgcagttatgcctcctgggcgatcgagatccctgctcctcttggtgtgccaggagcctgagagagcacagcctgatgttcatttctttcaggggctgcgcctgggcgccgaactgatccgggaggacattcagggagcgttacataattaccggagtgggaggggcgagcgccgggccgcagcattgagggctacgcaggaagaactgcagcgggacagatcacccgctgcagaaacacctcctctacagagacggccatcagtgcgcgcagtgatctccactgttgaacgcggcgccggtcgcggtagacctcaggcgaagccgatacctgaggccgaggaggctcagagacccgaacctgtggggactagtagtaacgctgactcagcttctcctgacttagggccacgagggcctgatcttgctgtgctgcaggccgagcgggaagtagatattctcaaccatgtgttcgacgatgtggagagcttcgttagccggctgcagaaatctgccgaagcagcgcgcgtgctcgagcacagagagaggggacggagaagtaggcggcgcgccgctggggagggactgctgaccttgcgggctaagccacccagcgaagccgagtacacggatgtgctgcaaaaaataaagtacgcttttagtttgctggcacgactgagaggcaatattgctgacccaagctctccagagttgttgcatttcctctttggaccactgcaaatgattgttaacactagcggcggccctgagtttgcttcaagcgttcgtaggccacatctgaccagcgatgctgtggctctgctaagggacaatgttacgcccagagagaacgagttatggacctccttgggagatagctggaccaggccaggacttgagctgtctcccgaagagggaccaccctatagacccgaatttttttctggttgggaaccacctgtaaccgaccctcagtcaagagcctgggaggatcctgttgagaagcaactgcaacacgagaggcgccgacggcaacagagcgccccccaggtcgcggtcaacggtcatcgcgatttagagcctgagtcagagccacagctagagtccgaaacagccgggaagtgggttctctgtaattacgatttccaggccagaaattcatccgagttgtccgtgaagcaaagagacgtactcgaggtccttgatgatagtaggaagtggtggaaagtgcgcgatccagcaggccaggagggttacgttccatacaacatcctgaccccgtatccaggcccaaggctgcaccattctcaatccccagccagatctcttaatagcactccaccccccccaccggcccctgcacccgcgccaccacctgctctggctagacctcgctgggacagaccccgctgggacagctgtgactctttaaatggccttgacccttccgaaaaagaaaaattttctcagatgttgatagttaacgaagaactgcaagctcgtctggcacaaggtagaagtggacctagcagggccgtgcctgggccaagggcaccagagccccagctgtcacctggaagtgacgctagtgaggtcagggcctggctgcaagcaaagggcttttcaagtggcacagtggacgccctgggggtgctgactggtgcccagctgtttagccttcaaaaggaagaactacgagccgtttctccggaagagggggccagggtgtattcccaggtgaccgttcagcggagccttttagaggacaaagagaaggtgagcgaactggaggcagtgatggaaaagcaaaagaagaaagtggagggagaggtggagatggaggtcatctag

SEQ ID NO: 26917 - DNA, 3702 bp, synthetic construct
  source 1..3702: mol_type = other DNA; note = Synthetic coding sequence
atgaacaccaagaagcggggcagccccgcccggacccacagcatgatgtcacttagcgtgcgtccacagagacgcctgttaagtgctcgagtcaacagaagccagtctttcgccggagttctgggcagccacgaacgggggccacgtagttttcctgtgttcagtcccccagggccccctcggaaacctccagccctgtccagggtgtcccggatgttctccgtggcccacccagccgcgaaggtcccacaacctgagagactggacctcgtatatacagctctgaaacgggggctgactgcctatttggaggtgcaccaacaggagcaggagaaactgcagggccaaatccgggagagtaaacgcaacagcagactgggcttcctctatgatctggacaaacaggtcaagtcgattgaaaggttcctgcggcgccttgagttccacgcttctaagattgacgagctctatgaggcctattgtgtgcagcgaaggctccgggatggagcctacaacatggtacgagcttacaccacgggcagccctgggagcagggaggctcgcgattcccttgcagaagcaacccgtggccatcgggaatacacggaatccatgtgccttctcgaaagcgagctggaggctcagctcggggagttccacttgcggatgaaaggcctcgctggtttcgcccggctgtgtgtgggagaccagtatgagatctgcatgaagtacgggaggcaacggtggaagttgcgggggaggatcgaaggaagcggaaaacaggtgtgggactcggaagagactatattcttacctctcttaaccgagttcctgtcaatcaaagtcaccgaactgaagggcctagccaaccatgtagttgttggaagcgtgtcttgtgaaacgaaggacctcttcgcagccttgcctcaggtagttgccgtcgacatcaacgacctcgggaccatcaagctgtcacttgaggtaacctggagcccattcgacaaggatgaccagcctagcgccgcctcctccgtgaacaaggcgagcacagtaaccaaacgattctcaacttacagccaaagccctccagacaccccctccctgcgcgaacaagcattttacaacatgctgagaaggcaggaagagctggagaacgggaccgcctggagcctctcgtccgagtccagtgacgacagcagctcacctcaattgtcgggaacagcacgacacagtccggctccccggcccctggttcagcagccagaaccactgccaatacaggtggccttccggagacccgaaactccaagttcaggcccactcgatgaggagggcgccgtggcaccagttctggctaatggtcacgctccatacagtaggaccttgagccacatttctgaagcctctgtcgacgccgccctggctgaagcctcggtggaagccgtaggccccgagtctcttgcttgggggccttcccctcccacacatcccgcgcccacacacggagagcatccaagcccagtgccacctgcattagaccccggacacagcgcaacttccagcactctaggcaccaccggcagtgtcccaacatccactgatccagcgccttcagctcacttggatagcgttcacaaaagtactgacagcggccccagtgagctaccaggtcccacccacacaaccactggcagtacatactccgccatcaccacaacccactctgcaccatccccattaacacacactactaccgggtccacccataaaccaatcatcagtactctcacaacaacagggcccactctgaatattattggacctgttcaaaccaccacatctcccacgcatacgatgcctagtcccacccatacgaccgcatctcccacacatacttctacctctccaacccacacgcctacatcgcctactcataagacgtcaatgtccccccctacaacgaccagcccaacgccgagcggcatggggctggtgcagactgcaacatcacctacacatccgacaaccagtcccacccaccctactacttcccctattctcataaacgtctcccccagcactagcttggagctagctacactgagctctccatccaagcattctgaccctactctgcctggaaccgactctctgccttgtagcccccctgtgtcgaattcttacacacaggcagacccaatggccccacggacgcctcaccccagcccagcacactccagccgaaagcctctaacatctccagcaccagacccaagcgagtcaactgtccaatcgctgagtccgactccatctccacccacacccgcgcctcagcattcagacctttgcctggccatggccgtgcagactcctgtaccgacagctgctggcggcagcggtgaccgctctctggaagaggctttgggcgccctgatggcagcactcgacgactaccgtgggcaattcccagaactgcagggtctggagcaggaggtgactagactggagtccttgctcatgcaacgccagggtttaacaaggagcagagctagttccctgtccatcactgtggagcatgctctggaatctttttctttcctgaacgaagatgaggatgaggacaacgacgtgccgggcgataggcccccgagcagccccgaagcaggcgcggaagattcaattgatagtccaagtgcacggcccctatctacgggatgtcctgcactcgacgccgctctcgttcgtcatttataccattgctcccgcctgctgctgaagctgggaactttcggtccccttcgctgccaggaagcttgggctcttgaacggctcctgcgggaagcgcgtgtgctcgaggctgtctgtgaattctccaggcgctgggagatcccggcttcatcagcccaggaagtagttcagttttctgcatctcgcccgggcttcctcaccttttgggaccaatgcaccgagcgactgtcctgtttcctgtgccctgtggaaagggtgctcctgacattctgtaaccagtacggggcccgcctatccctgcgacaaccggggcttgccgaggccgtttgcgtgaaattcttagaggatgctctgggccagaagctaccgagacggccacaaccaggcccaggtgaacaactcacagtgtttcaattctggtcctttgtagaaacgctcgactcccctacaatggaagcttacgtaactgaaacagcggaggaggtcctgctggtccggaacctgaactccgatgaccaggccgttgttctcaaagccctgagactggcccccgagggccggctgagacgtgacggcctgcgcgcgctgtcttctctgttggtccatgggaataacaaagttatggctgctgtgtcgacccagctgcgatctctgagcctgggacccacattccgcgaaagggccttgctgtgcttcttagaccaattggaggacgaagatgtgcaaacaagggtagcaggttgcctggccttggggtgtatcaaagcccccgaaggcatcgagccactcgtttacctgtgccagacagacacagaggccgtgagggaggccgcccgccaatctttacagcagtgtggagaagagggacagtcagcacaccggagactcgaggagtctcttgacgctctgcctcgaatcttcggacctggcagtatggcatccaccgcattctag

SEQ ID NO: 26918 - DNA, 1428 bp, synthetic construct
  source 1..1428: mol_type = other DNA; note = Synthetic coding sequence
atggaccagatggtgcagcaccccgccgccaagatgatcgtgatggccagccacatgcaggaacaggaagttggagacggcacgaatttcgtgctggtgttcgcaggcgcactgctggaattagcagaggaactgctgagaattggcctgtctgtgagtgaggtaatcgagggttacgaaatcgcctgtcgaaaagcacatgagattttgccgaacctggtgtgctgttctgccaagaacctcagggatattgacgaggtttcgagtctgctgcggacgtcaatcatgagtaagcagtatggaaacgaagtgtttctggcgaagctcatagcccaggcatgcgtaagtatttttcccgactccgggcatttcaatgttgacaatattagggtgtgcaaaatcctgggatctggaatcagctcctctagcgttttgcacgggatggtcttcaagaaagaaacggagggtgatgtaacatcagtcaaagatgccaaaattgcagtctattcctgcccttttgatggcatgattacagaaactaaagggacggtcctgatcaaaactgccgaggagctgatgaacttcagtaagggcgaggaaaaccttatggatgcacaagtgaaggcaatagcggatacgggtgccaatgtggtagtcacgggggggaaggtggccgacatggccttgcattatgccaataaatacaatatcatgcttgtgcggctgaacagcaaatgggacttgaggcgactgtgcaaaactgttggggccacagcccttccccggctgactcctccagtactggaggagatgggacattgtgattccgtctacctgagcgaagtgggtgatacccaggttgtcgtttttaaacatgagaaagaagatggcgccatctccactattgtgcttcggggatccaccgacaatttgatggacgacatcgagagagcagtagatgatggcgttaatacatttaaggtattaacccgggacaaaagactggtccctggcggaggagcaacggagatagagctggcaaaacagattacgtcttacggggagacatgccctggccttgagcagtacgcaatcaaaaagtttgctgaggcattcgaggccataccaagggccctggctgagaacagcggtgtgaaggcaaatgaagtcatttctaagctctacgccgtacaccaggaaggtaacaagaatgttggtctggacattgaagctgaagttcctgctgtgaaagacatgctcgaggcagggatcctagatacatacctggggaaatattgggccatcaagctggctacaaatgccgcggttacagtacttagagtggaccagattattatggccaagcccgccggtggtcctaagcccccatctggcaagaaggactgggacgatgaccagaatgattag

SEQ ID NO: 26919 - DNA, 1626 bp, synthetic construct
  source 1..1626: mol_type = other DNA; note = Synthetic coding sequence
atgcgggccctgctgcacaagcccgagatgatcaagcagatcctgccggaacacagcgtcctccagaatataaactttgtggaagccttccaggatgagctgctggtgaccgaggtatacgatctgccccagagacctaacgatgtgcagctgttctatggaagcatgtgtaaaatcatattgagcgtgataggcgaatttagggattgcatatcctcccgggaatttcttcaaccaagtagcaaagcaagcttagaaagtacctccgaccttggtgcaagtgggaaacacggcggtaatgtaagcctggacgtgctgccagttaaagggccccagggcagtccactgttgtcccgcgccgcccggccacctctggatcagctcgcttcagaggaaccttggacggtgctccccgagcatttgatcttggtggccccctccccttgcgatatggccaagaccggtcgattccagattgtaaacaatagtgtcaggctattgaggttcgagctctgttggccagcacattgtctgacagtcacaccgcaacatggatgcgttgcaccagagtctaaactccagattctggtcagccctaactcttctttaagcaccaaacagagcatgtttccctggtcaggcctgatctatattcactgcgatgacggacagaagaagatcgtcaaagttcagattcgcgaggacctgacacaagtggaactgctcacgagactaaccagcaagccgtttgggatcctgtctccagtttccgaaccaagtgtgtctcacctcgtcaaacctatgacaaagcctcccagcaccaaagtggaaatcagaaataagtctattacattccctacaaccgagcccggagagacaagcgagtcatgcctagagctggaaaaccacggtacgaccgacgtgaagtggcacctttctagtttggcacccccgtatgtcaagggggttgacgagtctggggacgtctttcgcgcgacctatgctgccttccggtgtagccctatatccggtctgctggagtctcatggtatccagaaggtgtccattacattccttccaaggggtaggggcgattacgcccagttttgggacgtcgagtgtcaccctctgaaggagccccatatgaaacacactctgcgcttccagctgtcgggtcagtccattgaggcagaaaatgaaccagaaaatgcctgcctgtccacagatagcttgataaaaatcgaccatctggtgaagccccgccggcaggccgtctcggaagcctcagctaggatccctgagcagctcgatgtgactgcacgaggtgtatacgcgccagaggatgtgtataggttccggcctactagtgtaggcgagtcaagaactctgaaagttaatctccgtaacaacagcttcatcacacatagtctcaaatttctctctccccgcgaacccttctacgttaagcactcaaaatacagcctgagggcacagcactatatcaatatgcccgtgcagtttaagccaaagtctgccggaaagttcgaagccttgcttgtgattcagaccgatgaagggaagtccatagccattaggctaataggcgaagcactcggaaagaattag

SEQ ID NO: 26920 - DNA, 1737 bp, synthetic construct
  source 1..1737: mol_type = other DNA; note = Synthetic coding sequence
atgagcagcaagggcagcagcaccgacggccggaccgacctggccaacggttctctctccagtagccccgaagaaatgagcggtgctgaggaaggacgggaaacgagcagcgggatagaggttgaagcatcagacttgtcacttagtctcaccggggatgacggtgggcctaaccggacttctatggaggatacgggacattactcaattaatgacgagaatagggtgcatgaccgcagtgaggaggaggaggaggaggaggaggaggaggaggaggaacagcctcgtagacgggtgcagcgtaagagagctaatcgggatcaggatagctctgatgacgagcgggccctggaagactgggtttccagtgagactagcgccctgcccaggccccgttggcaggcgctccctgcacttagagagcgagaactgggatcctccgctaggttcgtgtatgaggcatgcggtgccagggtgttcgtgcagagatttcggctacaacacggcctggaaggccacactggctgcgtgaacactctccactttaatcagagggggacatggctggctagcggtagcgacgatctaaaggtggtggtttgggattgggtgaggaggcaacctgtgctggatttcgagtcaggacataaatctaatgtgtttcaggcaaagtttctgcctaatagcggcgattccaccctggcaatgtgtgctagagatggacaggttcgcgtggcagagctgtccgccactcaatgttgcaagaataccaaaagggtggcacagcacaaaggggcctcccataagctggcgctcgagccagattcaccctgtacctttctgagtgcgggcgaagatgccgttgtgtttaccatcgatctgaggcaggatcgaccggccagcaagttggtggtgactaaagagaaagagaagaaagtcggcttatacaccatctacgtcaatcctgctaacactcaccaattcgccgtgggcggccgggaccagttcgttcgaatttatgatcagcgcaaaatcgatgaaaatgagaataacggggtgctcaagaaattctgtccccatcatcttgtcaatagtgagagtaaggccaacatcacctgcctagtttactcacatgatggtaccgaactgctggcatcgtacaatgatgaggatatctatctatttaacagcagccattcagatggggcccaatacgtgaaacgatataagggccacaggaataacgccacagttaaaggagtgaacttttatggccccaagtcagagtttgtagtgagcggttccgattgtggacacatctttctgtgggaaaagagttcttgtcagattatccagttcatggaaggggacaaaggcggtgtggtgaactgtctcgagccacacccccacctccctgtactagccacatcgggacttgatcatgacgtgaaaatctgggctcctacggctgaagcatccacagagctgaccggtctaaaagatgtaataaagaagaacaagagggagcgtgatgaggattctctgcaccagactgacttattcgactcccacatgctttggtttcttatgcaccacctgcgacagcgtaggcaccacaggaggtggagggaacccggggtgggagcaacagatgccgacagcgacgagtcaccgagctcgtccgacacttcagacgaagaggagggccctgacagagtccagtgtatgccctcctag

SEQ ID NO: 26921 - DNA, 426 bp, synthetic construct
  source 1..426: mol_type = other DNA; note = Synthetic coding sequence
atgggcggcaagccccggcacagcctgtacttcatcggctaccaggacgacttcctgctatatctagatcctcactattgtcagcccactgtggacgtgtcccaggctgactttcctctcgaatcctttcactgtacatctccacgcaagatggccttcgccaagatggatccgtcgtgcactgttggattttacgccggggatagaaaggaattcgagaccctctgttccgagctcactcgtgtgctgagttcttcctcagctactgagagatacccaatgtttacactcgccgaagggcatgctcaggatcactcattggacgacctctgctcccagctggctcagcctacactgaggctcccacgtacaggacgcctcctgagggccaagagaccaagctctgaagactttgtgtttttatag

SEQ ID NO: 26922 - DNA, 570 bp, synthetic construct
  source 1..570: mol_type = other DNA; note = Synthetic coding sequence
atggtgctgctgcacgtgaagcggggcgacgagagccagttcctgcttcaggctcccggaagcacagagctggaagaactcactgtgcaggtggcacgcgtttacaatggtcggcttaaagtccagaggttgtgtagtgcaccaaacgagaagatgaagcaggtgctcaagaagaccatcgaagaagctaaggccattatttcgaaaaaacaagtggaggccggggtgtgcgttactatggagatggtcaaggatgccctggatcagctgcgaggcgccgtcatgatcgtgtaccccatggggctgccgccctatgatccaatcaggatggagtttgagaataaggaagatctgtccggcacacaggcggggctgaacgttattaaagaggctgaagcccagctctggtgggccgcaaaggagctcaggcgcaccaagaaactatccgactatgtcggtaaaaacgaaaaaacaaaaatcatagcaaagatccagcaggtgtcaaccttttgcttcaatgtgtccgtggtgtttgtgatctcgcttcagacagacaaaaacgtccagtag

SEQ ID NO: 26923 - DNA, 2031 bp, synthetic construct
  source 1..2031: mol_type = other DNA; note = Synthetic coding sequence
atggccgccatccagcacggccacgaggccgtggtgcggctgctgatggagtggggggccgaccccaaccacgccgcaagaactgtgggctggtctcctcttatgctcgcagccctgacaggtcgcctcggggtcgctcaacagcttgtggagaagggagccaatcccgaccacctgtcagtgctggaaaaaacggcatttgaagttgcattggattgcaagcatcgtgatcttgtggattacttggatccattgaccacagtcaggcctaagaccgatgaggagaaacgacgccctgatatttttcatgcgctgaaaatgggcaacttccagctagttaaagagatcgcagacgaggatccgagccatgtcaatctcgtgaacggtgatggagccacccctctgatgctggctgctgtcaccgggcagctcgcgctggtccaactactagtcgagcgacacgcagatgtggacaagcaagatagcgtgcatggctggacagccctgatgcaagcaacctaccacgggaataaggagattgtgaagtatctcctcaatcagggggctgacgtcactttgagggctaagaacggctatactgcttttgaccttgtgatgctcttgaacgatccggataccgagctcgtgcgcctactggcatctgtctgcatgcaggtcaataaagataaaggtcgaccatcacatcagcctcctttaccccatagcaaggttcgtcaaccttggtctattccagtcctgcctgacgataaggggggtctcaagtcttggtggaacagaatgagcaatcgcttcaggaagctgaagcttatgcagacattgcctaggggcctgagcagcaaccaaccgcttccattttcagacgagcctgaaccagcactcgatagcacgatgagagccgctccacaggataagacgtctcgttctgcactgcccgatgcggccccagtcacaaaggacaacggcccgggcagtaccaggggagagaaggaagacactctgctgacaacaatgctgcgcaatggggcacctctgacgaggctgccctccgataaactgaaagcagtgatacctcccttcttacccccatcttcctttgaactatggtcttctgataggtcacggacccggcataatggcaaagccgatcctatgaagacagctctgcctcagagggctagtcgcggccatccagtgggcggcgggggcaccgatacgactcccgtccgacccgtgaaatttccctccctgcccagaagtcctgcctctagcgccaactctggcaacttcaaccatagtccgcattcatcaggaggatcctcaggcgtgggtgtatcgcgccacggcggcgaacttttaaaccggtccggtggctccatagacaacgtgctcagccaaattgccgctcagcggaagaaagctgcaggactgttggaacagaagccatcacataggtcctcccccgtcggcccagccccaggatctagtccctctgaactccccgcgagccctgctggtggctctgcccctgtgggcaagaagctggagactagcaagcggccgccatccggcacatccactacctcaaagtcaacctctccaaccttgaccccttcacccagccccaagggtcacacggcggagagctcagtatcttcatcctcgagccacaggcagtctaaatcatcaggcggatctagttctggtaccattacggacgaggacgaattgacaggtatcctgaagaaactctccttagagaagtaccaaccaattttcgaagaacaggaagtggacatggaggcctttctaacccttaccgacggggatctcaaggaactggggatcaaaactgatggctctcgccaacagattctggccgccatctctgaactgaatgcgggcaaagggagagagcgacagattttgcaggagactatccacaactttcactcttcttttgaatcttctgcatccaacactcgcgcccccggtaacagcccatgtgcatag

SEQ ID NO: 26924 - DNA, 2319 bp, synthetic construct
  source 1..2319: mol_type = other DNA; note = Synthetic coding sequence
atgcggcaccagaagcggaacgtgtaccactgcaacaagtgccggctgcagtttctatttgccaaggacaagatagagcataagctgcaacaccataagacatttcggaagcctaaacaacttgagggcctcaaacccggcacgaaagtgacaatcagggcgagcagagggcaaccccgtaccgtccccgtgtcctcaaacgacacgccgccgagcgccctgcaagaggcagccccactgacaagctcaatggatccgctgccggtgtttctatacccccccgtgcagaggtcaatacagaaaagggctgtgcgcaagatgagcgtaatgggaagacagacttgcctggaatgttcatttgagattcccgatttccctaatcattttcctacttatgtacactgctccctctgtcgatacagtacttgttgcagtagggcatacgccaaccatatgataaacaatcatgttcccagaaagtctcccaagtaccttgccctattcaagaattccgtttctggaatcaaacttgcctgtacttcctgcaccttcgtgaccagcgtgggcgacgccatggctaaacacctagtgtttaacccaagccatcggtcctcaagtatcttaccgcggggcctaacttggattgctcattccagacatggccaaactagagatcgcgtccacgacaggaatgtaaagaacatgtacccacccccaagctttcctactaacaaagccgccaccgtgaaaagcgcaggagcaaccccggctgagcccgaggaactcctgaccccactggccccagctctaccatcaccagcctctaccgccacaccccccccaacaccaacacatccccaggccctggccctccccccactcgctaccgagggcgcggaatgtttaaatgtggacgatcaggatgaggggtccccagtgacacaggagcccgagcttgctagcggaggtggcggcagcggaggagtgggcaaaaaggaacaactgtccgtgaaaaagcttcgcgtcgtgctttttgcactgtgctgtaataccgagcaggcagcggaacacttccggaatccccagcggcgcattcgacgttggttgcgccgctttcaggcgagtcagggagagaatctcgaagggaaatacctgtcattcgaagccgaggaaaaactagcagaatgggttctaacccagcgcgagcagcaactgccagtcaacgaggaaacgctcttccagaaggctacaaagataggacgtagtcttgaagggggattcaaaatctcttacgagtgggccgtgaggtttatgcttagacatcacctgacaccacatgcacggcgcgccgtcgcacatacgcttccaaaggatgttgcagagaatgccggcttgtttattgatttcgtgcagagacaaattcacaatcaagatctgcctctgtcaatgatagttgccattgatgaaatctccctgtttttagatactgaggtgctgtcttcagacgaccgaaaggagaatgccctccagaccgtcgggacaggggaaccttggtgtgatgtggtcctggccatcctggcagacgggaccgtcctgcccaccctggtgttctaccgcggccaaatggaccagcctgccaatatgcctgattcaatccttttggaagcaaaggaaagcggatattcagacgacgagataatggaactgtggagcacacgcgtttggcagaaacacacagcatgccagagatcaaaaggcatgctggtcatggactgccacaggactcatttatctgaagaggtgttagcaatgctgtctgcaagctctacattgccagctgttgttccggcaggttgctcttccaagattcagcctctagacgtatgcataaagagaacagtcaaaaatttcctgcataaaaagtggaaggagcaggcgagggagatggccgacacggcctgcgactctgatgtgcttctgcagcttgtcctggtgtggttaggagaagtgcttggagtcataggcgattgtccagaacttgtacagaggagcttcctggtcgcctctgtgttgcctggtccggatggaaatataaattctccgacgcgaaacgctgatatgcaagaagagctgatagcctccctggaggaacaactcaagctatccggcgagcattcagaatccagtacaccaagaccaaggagtagtcctgaggagacgatcgagcccgaatccctacaccagttgttcgaaggagagagtgagactgagtccttttacggatttgaagaagcggatctcgacctgatggaaatatag

SEQ ID NO: 26925 - DNA, 285 bp, synthetic construct
  source 1..285: mol_type = other DNA; note = Synthetic coding sequence
atggccatgaccgccggcaccaccaccaccttccccatgagcaaccacacccgagagagggtgactgtcgcgaagttgactctcgaaaatttctattccaaccttatactgcagcacgaggaacgcgagacccggcagaaaaaactcgaggtagcgatggaggaggaaggactggccgacgaggagaaaaagctcagacggtcacagcatgcacgtaaagaaactgagtttctgcgcctcaaacgaaccaggctcggacttgatgactttgagagtcttaaatag

SEQ ID NO: 26926 - DNA, 1047 bp, synthetic construct
  source 1..1047: mol_type = other DNA; note = Synthetic coding sequence
atgggcaaggactactacaagatcctgggcatccccagcggcgccaatgaagatgaaatcaaaaaagcctatcgcaagatggccctgaagtaccatccggataagaataaagagccaaacgccgaggaaaaatttaaggagatcgcggaagcatatgacgttctgtcggatccaaaaaagagaggcctctatgaccagtacggcgaggaagggttgaaaacaggaggcgggacctccggcggctcctcaggctcattccactacaccttccatggcgaccctcacgccacattcgccagcttttttgggggctccaatccctttgacatcttcttcgctagttctcgaagcaccaggccgttcagtgggtttgatcccgacgatatggacgttgatgaagatgaggatcccttcggtgccttcgggaggttcggttttaacggcctctcccgggggcctagacgggctcccgaaccactttacccccgccgtaaggtacaggatccacctgtcgtgcacgagctccgcgtaagcctggaggagatctatcatggatctacgaaacgcatgaagatcactcgcagacgcttgaaccctgacggacgtacagtacgtaccgaggataagattttgcacatcgtcatcaaacggggatggaaggaggggaccaaaatcaccttcccgaaggaaggggatgcgacccctgacaacatacctgcggatatcgtatttgtgcttaaagataagccccacgcccatttcaggcgcgatggcacaaatgtgctttattctgccctcatctccttaaaggaagccttgtgcgggtgcacagtgaacatccctaccattgacggccgtgtgattcctctcccctgcaatgatgtgatcaagccagggaccgtgaaaaggctcaggggggagggcctaccattccccaaagtgccaacgcaaaggggcgacctaatcgtggagttcaaggtgaggttcccagatcggctcacgccccagaccagacagatactcaagcagcatctaccttgctcatag

SEQ ID NO: 26927 - DNA, 888 bp, synthetic construct
  source 1..888: mol_type = other DNA; note = Synthetic coding sequence
atgcccgtgcacaccctgagccccggcgcccccagcgcccccgccctgccctgtcggttgcgcacccgcgttccggggtacctgttacgcgggccagcagatggcggtgcccgaaagcctagcgctgttgaaaggctggaggccgacaaagcaaaatacgtaaaaagcttacatgtagctaacactcgccaggaacctgtgcagccactgctgtccaagcagcccttattcagccctgagacccgcagaaccgtcctcactccctctaggcgggcgctcccaggaccctgtagaagaccccagctggacctggacattctgtcctcactcatagacttatgtgattcccctgtgtctccagctgaggcttctaggacccctggaagggcagagggagcaggacggccgccccccgccacaccaccccgcccacccccttccacaagtgctgtgagacgagttgacgtgagaccgctgccggcatccccggcgagaccctgtccgagccctggtccagccgcagccagctctcctgcaagacctccggggctacagagatcaaaatctgatctgagtgagaggttctccagagccgctgcagatctagaacggtttttcaatttttgcggacttgacccagaggaagcaagaggtctgggagtcgcccatcttgcccgagcttcctccgacattgtatctctggccggcccttctgccggcccaggatcttccgaaggaggatgctcccgacgtagttcggtcaccgtggaggagagggctcgtgaacgggtaccgtatggggttagcgtcgtggagaggaatgctagggtcatcaagtggttgtacggactccgccaagccagggaatcgcccgctgcagaaggctag

SEQ ID NO: 26928 - DNA, 258 bp, synthetic construct
  source 1..258: mol_type = other DNA; note = Synthetic coding sequence
atgccctacaacgaggccgagaacaagcggagctaccacctgtgcgatttgtgtgaccgtatcataataggcgatcgcgaatgggctgcgcatataaaaagcaaatctcatctcaatcaactgaagaaacgtaggaggcttgactctgacgccgtaaacactatagagagccagagcgtgtcccctgaccataacaaagagccaaaagagaaaggcagtccagggcagaacgaccaggaattaaagtgctcggtttag

SEQ ID NO: 26929 - DNA, 396 bp, synthetic construct
  source 1..396: mol_type = other DNA; note = Synthetic coding sequence
atggccatgaccgccggcaccaccaccaccttccccatgagcaaccacaccagagaaagagtcacagtcgccaaactgactcttgagaacttttacagcaacctgattttacagcatgaagaaagagaaactaggcagaaaaagttagaggtggcaatggaagaagagggtctggcagacgaagagaagaaacttcggaggtcacagcatgccaggaaagagactgagttcctgaggctgaaacgcaccaggcttggtctggatgattttgagagtctgaaagtgataggtagaggagccttcggtgaagtgcggctcgtgcagaaaaaagacacaggccacatctacgcgatgaagatcttgcggaagtctgacatgttggaaaaggaacaatag

SEQ ID NO: 26930 - DNA, 21 bp, synthetic construct
  source 1..21: mol_type = other DNA; note = Synthetic coding sequence
atggcccacgagatgatctag

SEQ ID NO: 26931 - DNA, 2199 bp, synthetic construct
  source 1..2199: mol_type = other DNA; note = Synthetic coding sequence
atgggcttccgggacgaggccgccggctacttccacaaggccgtgaaactcaaccccgatttttctgatgcaaaagagaacttctatagagtggctaattggttggtcgaaaggtggcacttcatcatgctaaatgacaccaaacgaaacaccatatacaatgccgctattcagaaggccgtgtgtctgggctccaaatctgtgctggatatcggcgccggaactggaatcctttccatgtttgctaaaaaggcaggcgcccactctgtgtacgcctgtgaactgagcaagacaatgtatgaactcgcatgtgatgttgtcgccgccaacaaaatggaggccggcatcaaactcctccacacaaaatctctagatattgaaattcccaagcatatccctgagcgggttagtcttgtcgtaaccgagacagtggatgccggcctttttggcgaggggatcgtggaatcactgatccacgcctgggagcacttgctactgcagcctaaaactaaaggagaatcagccaactgcgagaagtacggtaaggtgattccagccagtgccgtgattttcggcatggccgtggagtgtgccgagatccggaggcaccatcgcgtgggcatcaaagatatcgccgggattcatttgcccacgaacgtgaagttccagtctcccgcctactcctcggtcgacaccgaagaaaccatcgagccgtacacgacggagaaaatgagtcgggtaccaggaggatatctggccttgacggaatgcttcgaaattatgactgtcgactttaataacctgcaggagctcaaaagtctggcaacaaagaagccagacaagatcggtatacccgtgatcaaagaaggtattttggatgccatcatggtgtggttcgtgctgcagctagacgatgagcactccctgtctacaagtccgtccgaagaaacatgttgggagcaggccgtttatccagtccaggacttggccgattattggattaagccaggggaccacgtaatgatggaggtcagctgtcaggactgctacctgaggattcagagcatcagtgtcctgggccttgagtgcgaaatggatgtggctaagagcttcacacaaaacaaagatctgcttagtctgggaaacgaagccgagctgtgctcggccctggccaacctgcaaactagtaagcccgatgcggtggagcagacttgtattcttgaatctaccgagatcgcccttttgaataatatcccctaccacgaagggtttaaaatggccatgtctaaggtattgagctccctgacccccgaaaaactgtaccagactatggacacccattgtcaaaatgagatgagcagtggaactggacagtctaatactgtacagaatatactggagccgttctacgtcctcgatgtaagtgaaggtttcagcgttctgcctgtcatagccggcaccctcgggcaagtaaagccatactcctccgtagagaaagatcagcataggatcgccttagatctcatttccgaagccaaccattttccaaaggagactctggagttctggctgcggcatgtagaggatgagtcagcgatgctgcagagaccgaaatcagataagctttggagtatcattatccttgatgtgatcgagcccagtggacttattcagcaggagatcatggaaaaggccgccattagcaggtgcctcctccagtccggaggcaagatctttccccagtacgtactcatgttcggtctcctcgtggagtcacaaactttattagaggagaacgctgtgcaggggaccgaacggaccctgggactgaatattgcaccgttcattaaccagttccaggtgccaattagggtcttcctggacctgtcttcactgccctgcatacctctgtctaagccagtagaactcttgcggcttgacctaatgacaccatatctgaatacgtctaatagggaggtgaaggtctatgtctgcaagtccggtcgactaacggccatcccattttggtatcatatgtatctcgatgaggagatcagacttgataccagcagcgaggcttcacattggaagcaggcagccgtggtgctcgacaaccctatccaagtggagatgggcgaggaactggtgttgagcatccaacatcataaatctaacgttagtattacagtgaagcaatag

SEQ ID NO: 26932 - DNA, 1554 bp, synthetic construct
  source 1..1554: mol_type = other DNA; note = Synthetic coding sequence
atgtgcagcctggccagcggcgccaccggcggccggggcgccgtggagaatgaagaggaccttccagaactaagtgatagcggcgatgaggctgcctgggaagacgaagatgacgctgatctgcctcacgggaagcagcagaccccctgcttattctgtaaccggctgttcacgtcagctgaagagacattcagtcattgcaagagcgagcaccagtttaacatagactccatggtacataagcacggactggaattctatggctacattaagctcattaattttatccgcctcaagaaccccactgtcgagtatatgaatagtatttataaccctgtgccttgggaaaaagaagagtatctcaagcctgtcttggaggatgatctcctcttgcaattcgatgtggaggacctctatgagcccgtgtccgtcccattctcctaccccaacggcctctccgaaaacacctccgtcgttgagaagctcaagcacatggaggcgagggcactcagtgctgaagccgctttggcaagagcaagagaggatctgcaaaagatgaaacagttcgcccaagacttcgttatgcacaccgacgttcgcacctgctccagttcaactagcgttatagccgatttacaggaagatgaagacggagtgtatttttcctcatatggacactatggaattcacgaagaaatgctgaaggacaagatcaggactgagtcctacagggatttcatttatcagaacccacacatcttcaaagataaagtggtactggatgtgggctgcggcaccggcatactttccatgttcgccgcaaaggccggcgccaaaaaagttctgggggtagaccaaagcgagatactgtaccaggcaatggacatcatcaggttaaataaactggaagatactattactctgatcaaaggcaaaattgaggaagtgcatctgcccgtggaaaaggtggacgttataatcagcgagtggatgggatacttccttctgttcgagtcaatgctcgacagcgtgttgtacgccaagaacaagtatctggccaagggcggatcggtatatcccgacatctgtaccattagtctcgtggctgtgagcgatgtgaacaaacacgccgatcggatcgccttttgggacgatgtttatggttttaagatgtcctgtatgaagaaggccgtaatcccagaagctgtcgtagaggtgttagaccccaagacactaatttccgagccttgcggtattaaacatatcgactgtcatactacttccattagcgatctggagtttagctcagattttactctgaagattactaggacttctatgtgcacagctatcgccgggtactttgacatttacttcgagaagaactgccataaccgcgtcgtgttttccaccggaccccagtccactaagacacattggaaacagacagtcttccttttggagaagcctttctcagtgaaggccggggaggctctgaagggtaaagtgaccgttcataagaacaaacgggaagtccttattgtgggcatttag

SEQ ID NO: 26933 - DNA, 1560 bp, synthetic construct
  source 1..1560: mol_type = other DNA; note = Synthetic coding sequence
atggagcaggagaagttcgacctgcagaagcagcacaccgagaacatccaggaactcctggaggacacaaatgttaggctcaacaaaatggaatccgagtacatggcacaaacacagagcacgaatcatatgatcaaggaactcgaagccagagttcaacagctgacaggtgaagccgaaaatagtaacctgcagaggcagaagctgatacaagaaaaagctgaactggagcggtgttatcagattacatgttccgaactccaggaagttaaggcgcggagaaataccctgcataaagagaaggatcacctggttaatgactacgaacaaaacatgaaacttttgcagactaaatatgatgccgacattaatctccttaagcaagagcacgccctctcagcttctaaagctagctccatgatcgaagaactggagcagaacgtgtgccaacttaaacaacaactgcaggagagcgagctacagcggaagcagcagctgcgggaccaggagaataagtttcagatggagaagtcccacctgaagcacatttatgagaagaaggcccacgacctgcagtctgaactggataagggaaaagaagacactcagaagaagattcacaagttcgaagaagccctgaaagagaaagaggagcagctgacaagggtgacagaggttcagagactccaagcccagcaagcagacgccgcgctagaagaatttaagcgacaggtagagctcaacagcgagaaggtatacgccgaaatgaaagagcagatggagaaggtggaggccgatctcactcgaagtaaatcactacgagagaagcaaagcaaagagtttctgtggcagctggaagacatccgccaacgatatgagcagcaaatcgttgaactgaaactcgagcatgagcaggagaagacgcacctcttacaacagcataatgccgagaaggacagcttggtgagagatcacgaacgggagattgaaaatctggagaagcagttgcgggcggctaatatggaacatgagaatcagatccaggagtttaaaaaacgtgacgcccaggtgatagccgatatggaagcccaggtacacaaactccgggaagagcttattaacgtgaacagccagcggaaacagcaattagttgaactgggattgctgagagaggaagagaagcagagggcaacgcgtgaacacgagatcgtggttaacaaattgaaggccgagtcagagaagatgaaaatagagctgaagaagacacacgcagccgaaacagagatgaccttagaaaaagtcctgcaggacgaattagagaaccgatccaaccaggtgcggtgcgctgaaaaaaagctccagcataaggaactggagagccaggaacagataacctacatacggcaggagtacgaaacaaaactgaaggggttaatgcctgcatcgctcagacaggaactggaggacaccatttcctcattgaagagtcaagtgaatttcctgcagaagcgggctagtatcctccaggaagaactgacaacttatcagggccggcgctag

SEQ ID NO: 26934 - DNA, 1743 bp, synthetic construct
  source 1..1743: mol_type = other DNA; note = Synthetic coding sequence
atgaacaacatccacgtggagaacgagagcctggacaacttcctgaaggaaactaacaaggagaacctgttggatatcctcacagagccagagcgcaaacctgacccaaagctctacaccaggtccaaacctaagaccgacagttataaccagaccaagaatagtctcgtccctaaacaagctctaggtaaatcaagcgtcaactccgccgtgttgaaggatcgcgtaaacaagcagtttgtcggagagacccagtctcgaacatttccagtgaaatcacagcagctgtccagaggagccgacctggctcgcccgggcgtgaaaccttcacgcactgtcccttcacattttatccgaacgctctccaaagtacagtcaagcaagaagcccgttgtgaagaacataaaggatatcaaggtcaacagaagtcagtacgagcggccaaacgagaccaaaattcgctcctacccagttacagagcagcgcgtgaaacacaccaagccacgcacttacccaagcttgctgcagggagaatataataataggcacccaaatattaaacaggaccagaagagcagccaggtgtgtattcctcagacgtcttgtgttttacagaagtctaaagcaatctcacagagaccaaatctgacagtgggccggtttaacagcgccatcccatctacaccaagtatcaggccaaacggcacctctggtaacaagcacaacaacaatggttttcagcagaaggcacagacactggacagcaagttgaagaaagcggtgccgcagaaccacttcctgaataagaccgcccccaagacccaagccgacgttactaccgtcaatgggacacagaccaaccctaatataaaaaaaaaggccacagccgaggataggcgaaagcagttggaagagtggcagaagtcaaaaggaaagacttataaacggcctcctatggagttaaagaccaaacgaaaggtaatcaaagagatgaacataagtttttggaagtcaattgagaaggaggaagaagagaagaaggcccaacttgaactctcaagcaagatcaataatacgttaacagagtgccttaacttgattgagggcggggtccccagcaacgagatccttaatatcttatcttctattccagaggcagagaagttcgcaaagttttggatctgcaaggctaaactgcttgcgagtaagggcactttcgatgtcattgggctttacgaggaagccatcaagaacggagccacacctattcaggaactcagaaaggtcgtcctcaacatcttgcaggactctaataggacgactgagggcatcacgagcgactccctggtcgccgagacctctatcacttcggtggaagagttagcaaaaaagatggagagtgtcaaatcgtgcttgagccccaaggagagagaacaggtgaccgcaacaccacgaattgcaaaggccgagcagcacaactatcccggcattaaacttcagatcgggcccattccccgaatcaacgggatgcctgaggtgcaggacatgaaatttataacacccgtacgacgcagcagtagaatagagagggccgtctcccgctatccagaaatgctccaggagcacgacttggtggtggcttccctggatgagctactggaagtggaagagacaaagtgtttcattttccgcagaaatgaggctttgcctgtaacattgggattccagacaccagagagctag

SEQ ID NO: 26935 - DNA, 705 bp, synthetic construct
  source 1..705: mol_type = other DNA; note = Synthetic coding sequence
atgtacatggacctggtggacggcatcttcctgaaccagatcatgctccagatcgacccgagaccaaccaatcagcggatcaataagcacgtgaacaacgatgtcaatcttcgtattcagaacctaacaattctagtccgcaatattaaaacctactatcaggaagtcctgcagcagttgattgtgatgaacctgcctaacgtgctgatgatcggtcgcgacccattgtctggcaagtctatggaagagattaagaaagtcttactgctcgtgctgggatgtgccgtccagtgcgagaggaaagaggagttcattgagcgaatcaagcagctggacatagagacccaagcaggtatcgtggctcacatacaagaggtcactcataatcaagaaaacgtattcgacttgcagtggctggagctgccagatgtcgcacctgaggagttggaggccctgagtagaagtatggttctgcatctgaggagacttatcgaccagcgcgatgaatgtactgaacttatcgttgacctcacccaggaaagagattatctgcaggcacaacacccaccttccccaatcaaaagtagcagtgctgacagtactccttcaccaactagttctctgagctctgaggataagcagcatctggccgtcgagctggccgacactaaggccaggctaagacgagtgcggcaagagttatag

SEQ ID NO: 26936 - DNA, 1161 bp, synthetic construct
  source 1..1161: mol_type = other DNA; note = Synthetic coding sequence
atgaccgacatccggaagatccggctgggcgagcggctggtggaggtttttagtgccgagaaagtgtacatggtgaggctcagaaatcccctcgggaggcaggagtggtcaggaccttggtccgaaatcagcgaggagtggcagcagctaacagcatctgacaggaagaatctgggccttgtgatgagcgatgatggcgaattttggatgtctctggaagacttttgtagaaactttcacaaactcaacgtgtgcaggaacgtcaacaaccccatttttggtcgtaaagagctggagtcagtgctggggtgctggacagtcgacgacgatcctttaatgaacagatccgggggatgttataataatagagatacctttctgcagaatccacagtacattttcacagtaccagaagatggacataaggtcataatgtcgctgcaacagaaggatctcagaacatataggcgaatgggccgtcctgataactacatcatcggtttcgagctttttaaagtggaaatgaatcgcaaattcaggctccatcacctctatattcaggaaagggcaggcacttcaacctatatagataccagaacggtgttcctcagcaagtacctgaagaagggtaactacgtgttagttccgaccatgttccagcacggtagaacatcagagtttctgctccggatcttctctgaggtgcccgttcagctaagagaactgacactggatatgcctaaaatgtcctgttggaatctggcacgggggtatcccaaagtggtgactcagatcactgtgcactctgcagaagatctcgagaaaaagtatgccaacgagaccgttaatccatacctggtgattaagtgtggcaaggaagaagtgagaagtcccgtgcagaagaatacagtgcacgcaatctttgatacccaggcaattttctacaggagaactacggacattcctataatcgtgcaggtgtggaactctaggaagttttgcgatcagtttttgggtcaggtgacgttagacgccgacccatccgattgtagagacctgaagtccctctacttacgaaagaagggcggtcctacagctaaggtgaagcagggccacattagctttaaagttatctcaagcgatgatctgacggagctatag

SEQ ID NO: 26937 - DNA, 966 bp, synthetic construct
  source 1..966: mol_type = other DNA; note = Synthetic coding sequence
atgaccgagctgagcctgcagaaggagcagctgcagctgaagatcattgaaatcgaggacgaagccgaaaagtggcagaaggaaaaagatcggattaagagcttcacaacaaacgagaaagcgatactcgaacagaatttccgtgatctggtgcgcgacttagagaagcagaaagaggaagtgagagccgcgctggagcaacgggagcaggatgcagtggaccaagtaaaggtaatcatggacgccctggatgaaagagctaaggttttgcacgaggataaacagacaagagaacagctacactcgatttccgactctgtgctttttttacaagaatttggagccttgatgtcaaattactctttgcctccaccattgcctacttatcacgtgctgctggagggagagggcctcggtcagagtctaggcaattttaaagacgacctgttgaatgtgtgcatgcgtcatgtggaaaagatgtgtaaggccgatctgtcaagaaatttcattgagaggaatcatatggaaaacggcggggatcaccggtacgttaacaattacactaacagctttggtggggaatggtctgcgccggatacaatgaagcgatacagcatgtatctgacccctaaggggggagtcagaacatcttatcagccgtcctccccgggccggttcaccaaggagaccacccaaaagaacttcaataacctgtatgggaccaaaggcaattatacgtcaagggtttgggaatattccagctccattcaaaatagtgacaacgacttgccagttgtccagggaagcagttccttcagcctcaagggttatccctccctgatgaggtcccagtcgccaaaggcccaaccccaaacgtggaagagtggcaaacagactatgctgagccactaccgccccttttatgtcaataaggggaacggcataggtagcaatgaggccccttag

SEQ ID NO: 26938 - DNA, 687 bp, synthetic construct
  source 1..687: mol_type = other DNA; note = Synthetic coding sequence
atgtaccggcagcggttcctgtacagcctgtaccggcacacccactgggtgcggtgcgctaagttttcaccagatggccgactcattgtctcatgctccgaggacaaaactatcaaaatatgggatactaccaataaacagtgtgtcaacaatttcagtgattccgtcggttttgcaaactttgtggattttaacccttctggaacttgcatcgcaagcgctggatcagaccagaccgtgaaggtgtgggatgtgagggtgaacaaattgctgcaacactatcaggttcatagcggaggtgtgaactgcatttcctttcatccatcaggcaattacctaatcacagcctcctcggacgggacgttgaagatattggacctactcgagggccggctgatatatacactccaggggcacacgggccccgtattcacagtctccttttctaagggcggggagctcttcgcctctggtggagccgacacgcaagtccttctgtggcgcactaattttgacgaactccattgtaaagggctaactaaaaggaatctgaagcgcttgcatttcgattctccacctcacttacttgatatttatcctcggaccccacatccccacgaggaaaaggtcgaaacagtggaagatttctttctccatctgctccggctcattcagagcctgaggtag

SEQ ID NO: 26939 - DNA, 1686 bp, synthetic construct
  source 1..1686: mol_type = other DNA; note = Synthetic coding sequence
atgcgggccgtgcggcggcacctgttcccccagcacagcgcccccgggcgaggcgtggtatgggaatggctcagtgacgatggctcatggaccgcctatgaggctagtgtttgcgactacctggaacagcaggtcgctcgcggcaatcagttagtagatctcgcccctctgggctacaactacaccgtgaactacacgacgcacactcaaactaataagacatcgtcattttgtcgatcagtacggaggcaggcagggcccccatatcctgttactaccatcatcgctccccccggtcacacgggtgtggcctgttcctgccaccaatgcttgagtggtagtcggaccgggcctgtgtccggcaggtatcgccattctatgacgaatctaccagcctatccagtgccacagcaccctcctcaccggacggccagcgtgtttgggactcaccaggccttcgccccatataataagccaagcctgtccggggcaagatctgcccccaggctcaatacaaccaacgcgtggggagccgctcctccatcactgggtagccaacccctgtatcggtcatccctgagccatctgggcccacagcatctcccccctggtagttccaccagcggggcagtctccgcgtctcttccatccgggccttcatccagtcctggttctgtgcctgctacagtccccatgcaaatgccaaaaccgagtcgggtgcagcaggctctcgcagggatgacttcggttctgatgtcagcaatcggattacccgtgtgcctgtccagagccccacagccaacttcgccacctgcctctagattggccagcaaatcccacggatctgtgaagagactgcgaaagatgtctgtgaagggggccaccccgaagccggaacctgagcctgagcaggtcataaaaaattatacagaggagcttaaggtgccacccgacgaggattgtatcatttgtatggagaaattgagtactgcctctggatatagtgacgtaaccgactcgaaggcaatcgggtctttagcggtcggtcatttgactaagtgctcccacgcttttcacctgctgtgtctgttggctatgtattgcaacggtaataaagacggatccctgcagtgtccttcttgtaaaaccatatacggcgaaaagaccggcactcaaccacaggggaaaatggaagtcttaagattccagatgtctttacccgggcacgaggattgcggaacaatcctgatcgtctattcgataccacacggcattcagggccccgaacaccccaatccaggcaaacctttcactgcccgagggttcccacgtcagtgctatctgcccgacaacgcacaggggcggaaggtactggagttgttgaaagtagcttggaaaagacgtctaatcttcacagtaggaactagctccacaaccggggagacggatacggttgtgtggaacgaaatccaccataagactgagatggacagaaacattactggccacgggtatcccgaccccaattacctgcagaatgtgcttgctgagcttgccgcccagggtgtgaccgaggactgcttagaacagcagcacgccagactctggtggcccccgaggtgtccaatggctggttgggtggctcgacaggaagtgccttctcctagaggctgggaagtatgttag

SEQ ID NO: 26940 - DNA, 2565 bp, synthetic construct
  source 1..2565: mol_type = other DNA; note = Synthetic coding sequence
atgaaggtggaggcctgcacctgggccggctacagcggcctgtacgaggctattgaaagctgggactttaaaaaaattgagaagctagaggaatatcggttgctgctgaaacgacttcagccggaatttaaaacgcggattatcccaactgacattatcagcgatcttagcgagtgccttatcaaccaggagtgtgaagagatacttcagatctgctcgactaaggggatgatggccggggccgagaagctggtcgagtgtctgcttaggagcgacaaagagaactggcccaaaaccttaaagctcgcattggaaaaagagagaaacaagtttagtgagctgtggatagttgagaagggcatcaaggatgtggagacagaggaccttgaggacaaaatggaaacgagcgatatccagatcttctaccaggaggatccggaatgtcagaatctgagcgagaactcatgtccgccatctgaggtgtcagacaccaatctctattctccatttaaaccgaggaactaccagttggaactagctctgccagcgatgaagggcaagaatactattatttgcgctcctaccggatgcggtaaaacctttgtctctcttctgatatgtgaacaccatctaaagaaattcccacagggtcaaaaaggcaaagtggtattctttgccaaccagattccagtgtatgagcagcagaagagtgtctttagtaaatacttcgaacgccacggttatagagtcaccggtatatctggggcgacggctgagaacgtaccagtggaacagatagtggagaataatgatatcataatcctgaccccccagatactggttaacaacttaaagaagggaacaatcccatccttatccatttttaccctcatgatatttgacgagtgtcacaatacaagcaaacaacacccttataacatgatcatgttcaactacctagatcaaaagctaggcgggagcagcgggccacttccccaggtgatcggactgacagcctctgtaggtgttggggatgctaaaaatacagatgaggccctggactacatctgtaagttatgcgcatcccttgacgcgagtgtgatcgccacagtgaagcacaatcttgaggagttagagcaagtggtgtataagcctcagaagttctttcggaaagtggagagccggatctccgataaattcaagtatatcattgctcagctcatgcgagacaccgagagcctggcaaaaaggatctgcaaggatttagagaacttgtctcaaattcagaacagggagtttggcacccagaagtatgagcagtggattgtgacagtccagaaagcctgcatggtatttcagatgcctgacaaggacgaagaatctcgaatttgcaaagcactcttcctctatacatcccacctgagaaaatataacgatgctctgattatcagcgaacacgcccgcatgaaagatgcattggactaccttaaagacttcttctccaacgtgcgcgctgctgggttcgatgagatagagcaggacctgacccaacggtttgaagagaagcttcaggagctcgagagcgtttctcgggacccctcaaatgagaatccaaaactcgaagatctctgcttcatcctgcaggaagagtatcacctgaatcctgagacgattaccattctgtttgtgaaaactcgggccttagtagacgccctcaaaaattggatcgaggggaacccgaagttaagcttcctcaagcccggcatcctgacgggacgtggaaagacaaaccaaaacaccggaatgacgctcccagcccaaaagtgtatcctggacgcgtttaaggcaagcggtgaccataatattctgattgcgacctcggtcgccgacgagggtatcgacatagctcagtgcaatctcgttatattgtacgagtacgtcggcaatgtgattaaaatgattcaaacccggggacgagggcgggcacggggctcgaaatgttttcttttgacttccaacgctggagtgattgagaaggagcagataaacatgtataaggagaaaatgatgaatgattctatcctcagactccagacttgggatgaggcggtgttcagggagaagattctgcacatccaaacccacgagaagttcatcagagacagccaagagaaaccgaagcctgtgcccgataaggaaaataagaagctgctttgtaggaaatgcaaggcattagcgtgttacaccgcagatgttcgggttattgaagagtgtcattacacagtgcttggcgatgccttcaaagaatgtttcgtttctcgtccacaccccaagcctaaacaattctcgtcctttgagaagcgcgctaaaatcttctgtgcccgacagaattgttctcacgattggggaatacacgtcaaatataaaacatttgaaattcccgtgatcaaaatcgagtcttttgtggtcgaagacattgctacaggggtccaaacattgtacagtaagtggaaagatttccactttgaaaaaatccctttcgacccagctgaaatgtcaaagtag

SEQ ID NO: 26941 - DNA, 813 bp, synthetic construct
  source 1..813: mol_type = other DNA; note = Synthetic coding sequence
atgcagatcgagcacatcatcgagaacatcgtggccgtgaccaagggcctaagcgaaaagctgcctgagaagtgggaatcggtcaagctgctgtttgttaagaccgagaaatccgccgctttgccaattttctcgagcttcgtgtctaactgggacgaggccacgaaaagatctcttttgaacaaaaagaaaaaggaagctagaaggaaaagacgcgagagaaattttgaaaaacagaaggagagaaagaagaaacggcaacaggctcgaaaaactgccagtgttctgtccaaggatgacgtggctccagaatctggagataccacagtgaagaagcccgagtccaaaaaggagcagacgcctgaacatggaaagaagaagcgaggacgcggcaaggcccaggtcaaggccaccaatgagtctgaggacgaaatccctcaattagttcctattggtaagaagacccctgcgaacgaaaaggtggaaatccagaagcatgctacagggaagaaatctcccgctaagtcgccaaacccctccactccacgggggaaaaagcgcaaggctttacccgcatccgaaacacccaaggcagctgaaagtgagactcctggtaaatctccagagaagaaaccaaagattaaggaggaggcggtcaaagagaaaagccctagcctaggaaaaaaagacgccagacagacgccaaaaaagccggaggccaaattcttcacgactccctcgaagtctgtgcgaaaagctagtcacacccccaagaagtggccgaaaaagcccaaggttccccagagcacttag

SEQ ID NO: 26942 - DNA, 1059 bp, synthetic construct
  source 1..1059: mol_type = other DNA; note = Synthetic coding sequence
atgagcagccggaagctgagcggccccaagggccggcggctgagcatccacgttgtgacatggaacgtggcatcagctgcccctcccctcgacctcagcgacctactgcagctgaataatagaaacttgaatctcgatatctacgtaatcggtctgcaggagctgaattctggcataatcagtctgctttcggacgccgccttcaacgacagttggagctccttcctgatggacgtgctttcacctctatccttcatcaaggtctcacacgtgcggatgcagggcattctgctacttgtatttgccaaataccagcacctcccctacattcagatattgtcaacaaagagcacccccacaggcctgtttggctactggctctcaatcgcgaaaaaacatgatccactactgcgggaatttcaggaggggcggctcctgtttccccctacttataagtttgataggaattccaatgattacgacacatctgaaaagaaacgcaaacctgcatggactgatcggatcctatggagactgaaaaggcagccatgcgcaggtcccgatacacctataccccctgcttcccacttctccctaagccttagaggatattccagccatatgacttacgggataagcgaccataagcccgtgtctggtaccttcgacttagagctgaagcctctggtaagcgctcccctgatcgtcctgatgcctgaggacttgtggactgtggagaatgacatgatggtcagctactccagcacctcagactttccttcgtccccatgggactggatcggtttgtacaaagtcgggctccgcgatgtgaatgactatgtgagctatgcatgggtcggagactccaaggtgtcttgtagtgataaccttaaccaggtctacattgacatatcaaatatccctacaaccgaagacgagttcttgttgtgctactactcaaactccctaaggtcagtcgtgggaatttcccggccattccaaatcccgcctggatccctgagggaagaccctctgggggaagctcagccgcagatctag

SEQ ID NO: 26943 - DNA, 375 bp, synthetic construct
  source 1..375: mol_type = other DNA; note = Synthetic coding sequence
atgaccggcagctgctgcggcagcaccttcagcagcctgagctacggcggcggctgctgccagccatgctgttgcagagatccatgttgttgtcgacctgttacctgtcagaccaccgtatgcagacctgtcacatgtgtccctaggtgtacaaggcccatctgtgaaccatgtcgacgccctgtttgttgcgatccctgttctctccaggagggatgttgcagacctatcacctgttgccccagcagctgtactgccgtcgtctgccgcccctgttgctgggcaactacttgttgccagccaccagtctccgttcagagtccatgtggacagcctacaccctgctccactacatgtcggacgtccagttgttag

SEQ ID NO: 26944 - DNA, 927 bp, synthetic construct
  source 1..927: mol_type = other DNA; note = Synthetic coding sequence
atgaagcgggcccaccccgagtacagcagcagcgacagcgagctggacgagacaatcgaggtagagaaagagtctgccgacgagaacggcaacctgagctctgcgctaggatcaatgagtccgacaacatcctcccagattctggctaggaaaagacggcggggcataatcgaaaagagaagaagagaccggatcaacaattctctgagtgagcttagaagactggtaccctccgctttcgagaaacaggttatggagcaggggtcagcaaagcttgaaaaggcagaaatccttcagatgacagttgaccacctcaagatgctccataccgccgggggaaagggctacttcgatgcccacgcacttgctatggattatcgtagcctgggttttcgagaatgtctagccgaggtggcgcggtacttatctatcatcgaggggcttgatgcaagcgatccactgcgtgtgcgtcttgtaagccacctgaataactacgccagccagagagaagctgcttctggagcgcatgcaggacttggccatattccttggggcacggtatttggacatcatccacatatcgctcacccactactgctcccgcagaatggccacgggaacgccgggactaccgcatctcccactgaaccacaccatcagggacggcttggctcagcacatcctgaagctcccgcactgcgcgctcctccgtctggcagtctgggccccgtgctacctgtggtgacctccgcatcgaagctgtcccctcccttactttcgtctgtcgcgtccctctccgcattcccattcagttttgggagctttcacttgctttcgcccaacgccctgtcaccttcagcacccacccaagcagctaatctcgggaagccttacagaccttggggaacagagattggtgctttttag

SEQ ID NO: 26945 - DNA, 2943 bp, synthetic construct
  source 1..2943: mol_type = other DNA; note = Synthetic coding sequence
atgaccgagggccggcactgccaggtgcacctgctggacgaccggagactggaactgctagtccagcctaaacttctggcaagggagctgctcgatctcgttgcctcccatttcaatctcaaagagaaggaatattttggcatcactttcattgacgataccggccaacagaattggctgcaacttgaccatcgcgtcttggaccacgacctgcccaagaagccaggacctaccatcctccacttcgctgttaggttctacatcgagagcattagctttctgaaggataaaactaccgtggagctcttcttcttaaacgcgaaagcttgtgttcacaagggccagatcgaggtggagagcgagaccatctttaaactcgccgcattcattttgcagtcccccaaggtgagcctgactcatgatgagaatgcccggaaggacctcaaaacattaccggctttccctacaaaaactttgcaggagcatccaagtcttgcatattgcgaggatcgtgtgattgaacactacctgaagattaaaggattaacacgaggccaggcagtcgtacaatatatgaaaatcgttgaggctctccctacgtacggggtccattactacgcagttaaagataaacagggactgccttggtggctggggatcagctataagggcataggacagtacgacattcaggacaaggtgaagcccaggaagctgttccagtggaaacaactggaaaacttgtactttcgggagaagaaatttgccgtggaggtgcatgatcctcggcgaatctccgtaagtcggaggacctttgggcagagcggcctgttcgtgcagacgtggtacgctaattccagcctgattaagtctatttgggtaatggccatctcccagcatcagttctacttagataggaaacagagcaaagcaaaaattccttcggcccgcagcttggacgagattgccatggatttgacagagactggaactcaaagggcctctaaactagttaccctcgagacaaaatctcagttcatcatggcctccaacggaagcttaatctccagtgggtctcaggatagcgaggtgagcgaagaacagaagcgcgaaaagatcctggaactgaagaagaaggaaaagctacttcaggagaaactcttgaaaaaggtagaagaattgaaaaagatttgcttacgggaggcagagcttactggcaaaatgcccaaggagtaccccctgaacataggcgaaaagcccccgcaggtaaggaggagggttggcaccgccttcaaactggacgataacctgctccccagcgaggaagacccggccctgcaagagctggagagtaacttcctaattcagcagaagctggtggaggctgccaagaagctggccaatgagcccgatctgtgtaaaactgttaaaaagaagcgaaaacaggactacaccgacgccatgaaaaaattgcaagaaatagaaaatgctattaacgagtataggatacggtgtgggaagaaaccctcacaaaaagccacagtgctccctgaagacatcattccaagcgagagttcaagcttgagtgacactacaacttatgatgatccaagcgacgctttcacattcccgggacagagaagtagctccgtaccccatagcccccgaattcttcctcctaagagtcttggcatagaaaggatccacttcaggaaaagtagcatcaacgaacagttcgttgacaccaggcagagtagggaaatgctgtcaacacattcaagcccctataagaccctggagaggaggcctcaaggcggtcgcagcatgccaacgacacccgttctcacgcgaaatgcatatagctcgagccatcttgaacctgagtccagttctcagcattgccgccagagatctggctccttggagtcacaatctcatctcctgtcagagatggacagtgacaagccatttttcagcttgagtaagtcccagcggagcagttcaactgagattcttgacgacggctcttcctacaccagtcagtcctctaccgagtattattgcgtcacccccgtgacgggaccatattataccactcagacactagatacacgcacacgaggtcgccgccgcagtaagaagcaaaatgtgagcacctccaacagtggctccatgccaaatctagcccagaaggatagcctccgtaacggggtctattccaagtctcaggagcccccttcctcaagctactatatcgccggatatacaccgtacgccgagtgtgacttctactatagcggcgggtatgtctacgaaaatgacactgagggccaatattcggtcaatccctcataccggagttccgctcattacggctacgagcggcagagagactactcccggtcgttccacgaggatgaagttgaccgtgtcccccacaacccctatgccaccctgaggttaccacgtaaagccgcagctaaaagcgagcacatcaccaagaatatccacaaggccctggtcgcggaacatttgcgagggtggtaccagcgggcatcgggccagaaggatcagggccatagccctcaaacctcttttgacagcgatcgcgggagtcagaggtgtctaggttttgcaggcttgcaggtaccctgcagccctagctctcgcgcgagcagctactccagtgttagctcgaccaatgccagtgggaactggcgcacacagttgaccatcggtctttcggactatgaaacaccggctcattcttcctatacctcctgttacgggaatgtgtataatcctctccctagcccttccagacagtacactgagatctcccagttggatggcacagatggcaaccaactagaagataacctcgaatcctctgagcaacggctgttttggcacgaggacagtaagcctggaacgctggtatag

SEQ ID NO: 26946 - DNA, 2979 bp, synthetic construct
  source 1..2979: mol_type = other DNA; note = Synthetic coding sequence
atgtacggcagcgcccggagcgtgggcaaggtggagcccagcagccagtcacctggacgcagccctaggttgccccggtctcctaggctaggccacagacgcacgaattccactggaggatcgtccgggagttctgtgggcggcgggtccgggaagacactttccatggagaacatccagtcactgaacgcggcttatgccacatctgggcccatgtatctcagcgatcacgagaacgtcgggtccgaaaccccaaagtcaactatgactctgggccggagcggggggagactcccgtacggtgtcaggatgaccgctatgggttcctctcccaatattgctagcagcggagtggcctccgacactatcgccttcggagaacaccatctaccacctgtgagtatggcgtccacagtgccccatagtctacgccaggccagggataatacaattatggacctgcagacccagcttaaggaagttctgcgggagaatgacctcctgagaaaagatgtggaggtgaaagaaagcaaattgtcctcttccatgaactcaataaagacattttggtccccggaactaaagaaagagagagccttgagaaaagatgaggcgagcaagattactatttggaaggagcaataccgtgtcgtgcaggaagagaaccagcacatgcagatgacgattcaggcgcttcaggacgagctgagaatccagagagacttgaaccagctctttcaacaggacagttccagtcgaactggcgagccctgcgtggccgagttaactgaggagaacttccagcgattgcacgcggagcatgagcgacaggccaaggagctctttctcttgcgtaagacccttgaagagatggagttgaggattgagactcagaagcagaccttgaatgcacgcgatgagtccattaagaagctactggagatgctacagtcgaagggcctctctgctaaagccactgaggaggatcacgaacggaccaggcgtttagccgaggctgagatgcacgttcaccacctcgaatctcttttggagcagaaggagaaggaaaacagtatgcttcgggaggagatgcataggaggttcgagaatgctccagatagcgccaaaaccaaggccctgcagaccgtgatagaaatgaaagacagcaagatttcctctatggaacggggtctccgggatttggaagaagaaatccagatgctcaagagcaatggggcactgtctactgaagagagagaggaggagatgaaacagatggaggtgtatagatcacattctaaatttatgaaaaacaagattgggcaagttaagcaggaactctcacgcaaggatacggagctgctggccttgcagacgaaacttgaaacattaactaaccagttctccgactcaaaacagcacatagaggttttgaaagagagtctgaccgctaaggaacagcgggctgctatacttcagactgaagtcgacgcattgagacttcggcttgaagaaaaagagaccatgctcaacaagaaaactaagcagattcaggatatggcggaggagaaaggcacgcaagccggcgagattcacgaccttaaggacatgttggacgtcaaggagaggaaagtgaacgtcctgcagaagaaaatagaaaatctgcaagagcagcttcgcgataaagaaaaacaaatgagtagcttgaaggagcgcgtgaagagcctgcaagctgacactacaaacactgatactgcactaacaaccttggaagaagctttggctgaaaaggaaaggaccattgagcggttaaaagaacaaagagatcgcgacgagagggagaaacaggaggagatcgacaattataagaaggacttgaaagacttgaaagaaaaagtatccctgcttcaaggagacctgtcggaaaaggaagcctcccttttggaccttaaagaacacgcatcaagtctggcgtccagcggcttgaaaaaagattcccgcctgaaaaccctcgagatcgccctcgagcagaaaaaggaggaatgtctgaagatggagagccagttaaagaaggcccacgaagccgcacttgaagccagagcctcccctgagatgtctgatagaattcaacaccttgaaagggaaattactcggtataaggatgaaagcagcaaggcccaggccgaggtcgataggctcctggaaattttgaaagaagtggagaacgagaagaacgacaaggataaaaagatcgccgagctggaatctctgaccagtaggcaggtgaaagatcaaaataagaaggtcgctaacctcaaacataaggagcaagtagaaaaaaagaagtccgcccagatgctggaggaagcacggaggcgggaggacaacttaaatgactcctcccaacagttacaggatagcctgcggaaaaaggacgaccgcattgaggaacttgaagaagccttgagggaaagtgtccagatcacagccgaaagggaaatggtactggcccaagaggagtccgccagaacaaatgcagagaagcaggttgaggaactcctaatggctatggagaaagtgaaacaagagctcgagtccatgaaagcaaagctatcctccacacagcagagcctcgcggagaaggagacccatctaacaaatctgcgggcggagaggaggaaacacttagaagaagtcctggaaatgaagcaggaagctctcctcgccgcaatttctgagaaggacgctaatatcgcacttttggaactcagctcgagtaaaaaaaagacacaggaagaagtggctgccctgaaaagagagaaggacaggttagtgcagcaattgaagcaacagacacaaaaccgaatgaaactgatggccgataactacgaagacgaccatttcaagagttctcacagtaatcaaactaatcataagcccagtcccgatcaagacgaagaggagggcatttgggcatag

SEQ ID NO: 26947 - DNA, 3138 bp, synthetic construct
  source 1..3138: mol_type = other DNA; note = Synthetic coding sequence
atgctgaccgtgcaggtgaagaccagcagcgccatcgagctgcccgatagcctggcctttctgtggattatccctatgtggtactgcgaaggcaaggaactagagaacagcccagacattcacattgtgcaggccgggaaccttcacagtctgactatcgccgaggctttcgaggaagataccggacgctacagctgctttgccagcaacatttatggtaccgactctaccagcgcggaaatctacattgaaggggtttctagcagtgattccgagggggacccgaataaggaggagatgaaccgaatccagaaacccaacgaggtgagcagccctcctacaacatcagctgtgattcctccggctgtgcctcaggcccagcatctagtggcacagccaagggtggcaacaatccagcagtgccagtccccaacgaactacctgcaagggctggacgggaagcctataatcgcagcaccggtatttactaagatgctgcagaatttgtctgcttcggagggccagttagtggtgtttgagtgtcgagttaaaggagctccgagcccgaaggtggagtggtacagggagggaaccctaatagaagatagtccagatttccgaattctgcagaaaaggccagtttgcatggagcacatcgaagagatctgtacactggttatcgccgaagtcttcgcagaagacagtgggtgcttcacatgtacagctagcaataaatatggtactgtttcttctattgctcagctgcacgtcaggggcaacgaagacctttccaataatggctctttacattcagccaactcaaccaccaacttggccgctatcgagccacagccctccccaccccattccgagccgccatcagtggagcagcccccgaagcccaaacttgagggggtccttgtgaaccataacgagcctagatcaagctcacggataggccttcgggtgcatttcaacctgcccgaggatgataaaggtagcgaagcttcctcagaggccggcgtggtcacaacgaggcagacacggccagattctttccaagaacggttcaacggacaggcaaccaaaactcccgagcctagttcccccgtgaaggagccccctccagtgctagctaagcccaagctcgactccacccagctgcagcagctgcataaccaggtgctcctggaacaacatcagctgcaaaatcctcctccttcatctcctaaagaattccctttttcaatgaccgttctcaactcgaacgctcctccagccgtgacaaccagctccaaacaggtcaaggctccctccagccagaccttctctctggccaggccaaagtatttttttccatccactaatacaactgcagcaaccgtagctcctagctcctcgcccgtgttcacactgagttccaccccacaaacaatacagcgaaccgtttcaaaagagagcctactggtgagccatccatccgtccagacgaaatccccaggaggcctttccatacagaacgagcccctcccaccagggcccaccgagcccaccccaccccctttcaccttctcaattccttctggaaaccagttccagccgagatgcgtcagcccaattcctgttagtcctacgtcccgcatccagaacccggtagcttttttgtcctcagtgctcccaagcctgcctgccatccctcctaccaatgccatgggattgcctcgctctgcaccatcgatgccttctcaagggctggcgaagaagaatacaaaaagtccccagcccgtgaatgacgacaatatccgcgaaacaaaaaatgcggttattcgtgacctggggaaaaaaattactttctctgatgtgcggcctaaccagcaggaatacaaaatctcttcatttgaacagcgcttgatgaacgagattgaattcagactggagcggaccccagtcgatgagagtgatgatgagatccaacatgatgagatccccaccggaaagtgcatcgcgcctatctttgataaaaggttgaaacactttagagtcactgagggttcccccgtgacatttacctgtaaaattgtgggaatccccgtcccaaaggtgtactggttcaaagatggcaagcagatcagtaaacgtaacgaacactgcaaaatgcgcagagaaggggatggaacctgcagtctccatatcgagtccacaacatccgacgacgacggtaattacaccattatggccgccaacccgcagggtaggatcagctgctctgggcacctgatggtccagtctctgccgattaggtcccgtctaacgagcgctggacagtcacacagaggtaggtcaagagtgcaggaacgtgacaaagagccattgcaggagcgcttttttagacctcacttcctccaggcccccggggatatggtagcccacgagggcagactctgccggctcgactgcaaggtatccggtttacctcctcctgagcttacatggctactgaatgggcaacctgtactccccgatgcctcccacaaaatgctcgttagggaaacaggggtgcattctcttcttattgatcctctgactcaaagagatgccggtacttataagtgcatcgcaaccaacaaaaccgggcagaattctttttccctggaactaagcgtggtcgctaaggaagtcaagaaagcacctgtgatcttagagaaactccaaaattgtggagtgcccgagggtcatcccgtccgactagagtgtagggtgattggtatgccacctcccgttttctattggaaaaaagataacgagacgatcccgtgcactagagagcggatctctatgcaccaggatacaaccggttatgcctgcctgctcattcagcctgccaaaaaaagtgacgcaggttggtacaccctgtccgctaaaaatgaagcagggattgtctcatgcactgccagactggatatttacgcacagtggcaccatcagattccccccccaatgagcgtgagaccatccgggagtcgatatggatcactgaccagtaaggggcttgatatattttctgctttctcctctatggagtctaccatggtgtattcatgttccagcaggtccgtggttgagtctgatgagctatag

SEQ ID NO: 26948 - DNA, 72 bp, synthetic construct
  source 1..72: mol_type = other DNA; note = Synthetic coding sequence
gtgcggctggcctggggcttcgtgagcgccctgggcagcttccacacagccgatcctgaaggggcagcttag

SEQ ID NO: 26949 - DNA, 1608 bp, synthetic construct
  source 1..1608: mol_type = other DNA; note = Synthetic coding sequence
atggaggcccccaccgtggagaccccccccgaccccagccccccctccgctcccgctcccgctctggtaccactcagagcaccagacgtcgcgaggctccgggaggagcaggaaaaggtggttaccaattgccaagaaaggattcagcattggaagaaagtagataacgactataatgccctgcgggagaggctgtccacgctgcccgacaagcttagctataacatcatggtaccatttggacccttcgctttcatgcctggcaagcttgtgcatacaaacgaagtgacagtcctgctgggcgacaattggtttgcaaaatgttccgcaaaacaggcagtgggtctggtggaacacagaaaggagcatgtgcgcaagacaattgacgacttaaagaaagtgatgaagaacttcgagagccgggtcgagttcactgaggatctgcagaaaatgagcgacgctgctggcgacatcgtagatatccgtgaagagattaagtgcgacttcgagtttaaggccaaacataggatcgcgcacaaacctcattcgaaacccaagacctctgacatcttcgaagcagacatagccaacgacgtgaagtctaaggatctcctggcggacaaggagctgtgggcgagactggaggagctggaaagacaggaagagcttcttggagagctcgattccaagcccgacaccgtaatcgccaacggcgaggataccacatcatctgaggaggaaaaagaggatcgaaatactaatgttaacgcaatgcaccaggttacagattctcacacgccctgccacaaggacgtagcctccagcgagcctttttccgggcaggtgaacagccagctgaattgttccgtgaatggatcctcctcatatcactctgacgatgatgacgacgacgatgacgacgatgatgacgataacatcgacgacgacgatggcgacaacgaccacgaagctctgggagttggagacaactccattccaactatatacttctcacatactgtggagcctaagagagtgcgcataaacacaggaaaaaacaccactttaaagtttagcgaaaagaaggaagaggccaagcggaagcgcaagaactccaccggtagcggacatagtgcccaggaacttccaaccatccgcacacctgccgacatttatcgagcgttcgtggacgttgtgaacggggaatatgttccgagaaagagcatcctgaaatcccgctccagagagaactctgtgtgcagcgacacgtctgagtcttcagctgccgaattcgacgatagacgaggggtactgcggtccatcagttgcgaggaggcaacttgttccgatacatctgagtccatcctcgaagaagagccacaggagaaccagaaaaagctgctgccactctccgtcacccccgaagcattttcaggcactgtgattgagaaggaatttgtgtccccaagcttaactccccccccagcgatcgcccatccggcccttccaaccatccctgagcggaaagaagttctcctagaagcatccgaagaaaccggcaaaagggtatccaagttcaaggcagcaagactccagcagaaagattag

SEQ ID NO: 26950 - DNA, 1731 bp, synthetic construct
  source 1..1731: mol_type = other DNA; note = Synthetic coding sequence
atggagggcctgcggcggcggcggggccgggaggccggccccccccaacccatggtgcccctggctgtcgaaaatcaagctggcggggagggagctggcggtgaactcggtatcagcctgaacatgtgcttgctgggtgccctcgtgctcttggggctgggagtcctgctgttcagcggcggactttccgagtccgagacgggccctatggaagaggtggagagacaagtcttgcccgacccggaggttctggaggccgtgggcgatcggcaagacggtctcagagaacagctgcaggctcctgtcccacctgatagcgtgccttctttgcaaaacatggggctgctcctagacaagttagcaaaagagaatcaagatattagattactgcaggcacagcttcaagcgcagaaggaggagttgcagtcattgatgcatcagcctaaggggttggaagaagagaatgcacagctgcgcggggcacttcagcagggggaggcattccaacgcgccctcgaaagcgaacttcagcaactccgagcccgactgcagggcttagaggccgattgcgtgagggggccagacggcgtttgcttgtctggagggagaggacctcagggggacaaggccattagggagcaaggccccagggaacaagaacccgagttatctttcttaaagcagaaggaacaactcgaggcggaagctcaggccctacgacaggaattggaacgacagaggagactcctgggtagtgtacagcaggatctcgagcggtcacttcaggacgcgagccggggagaccccgcacatgctggattagcggagctaggccaccggctggcccagaagctgcagggcctcgaaaactggggacaagatcccggggtgagcgcgaatgcatcaaaggcatggcatcagaagtctcacttccaaaattctcgagaatggagcggaaaggaaaagtggtgggacggccagagagacagaaaggcagagcattggaaacacaaaaaagaggaaagcgggcgcgaacgcaaaaaaaattggggcggacaggaagaccgggagcctgcgggccgctggaaggagggacgcccgcgggtcgaagaatccggaagcaaaaaggagggcaaacgccagggcccgaaggaacctccacgcaagagtggtagtttccacagttcgggcgaaaagcagaaacagcccagatggcgtgagggtaccaaggactctcatgatcctttacccagctgggctgaacttctgcgccccaagtatcgcgcaccccaggggtgttcgggagtcgatgagtgtgcgcggcaggagggactcacattctttggcaccgaactggctcctgtccgacagcaggaactagcaagcctgttacggacatacctggcacgactcccctgggctggccagctcaccaaggaactgccactttctcctgcgttctttggcgaggatggaatcttcagacatgatcgccttcggttcagggatttcgtggatgcactcgaagactcactggaagaggttgcagtgcagcaaaccggggatgatgatgaggtcgatgacttcgaagacttcattttttcccactttttcggggacaaagccttaaagaagcgttctgggaaaaaagacaaacattcccagagccctcgcgctgctggcccacgggaagggcacagccattctcatcatcatcatcaccggggatag

SEQ ID NO: 26951 - DNA, 2244 bp, synthetic construct
  source 1..2244: mol_type = other DNA; note = Synthetic coding sequence
atggccaagtacaacaccggcggcaaccccaccgaggacgtgagcgtcaacagccgaccttttagggtgaccgggccaaactcctccagcggaatccaggctcggaaaaacttgttcaataaccaggggaacgcctccccacctgccggcccaagcaatgttccaaagttcggctcccccaaaccccctgtggccgtgaaaccctcgtctgaggagaagcctgacaaggaacccaagcctccattcttgaagcctacaggcgcaggccagaggtttgggaccccagcaagcctgactactagagatcccgaggcaaaagtcggcttcctgaagccagtgggacctaagcccatcaacctcccaaaggaggatagcaaacctacttttccatggcctcctggcaataagccttctttacactcagtgaaccaggatcatgatttgaaacctttggggcctaagtcaggccccaccccccctacgtcagaaaatgagcagaaacaagccttcccaaaacttacaggggtgaagggtaagtttatgtcagcgtctcaggacctggaaccaaagcctctgttccccaagccagcctttggtcagaagccaccgcttagcactgaaaactcccatgaggatgagagtccaatgaaaaacgtgtctagctcgaaaggatctcctgctcctctcggcgttcgctccaagagtgggcccctaaagccagctagggaagattcggagaacaaagatcacgcaggagagatttctagtttaccctttcccggcgtagtcctcaagccagccgcaagccggggtggaccaggcttgagcaagaatggcgaggaaaaaaaagaggaccgcaagatcgatgcagctaagaacacattccaatctaaaattaaccaggaagagctggcaagtggaacaccccccgcacgatttccaaaggccccatcaaagctcactgtaggcgggccatgggggcaatcccaggagaaagagaagggagacaaaaactccgcaacaccaaagcagaagcctctgcctcccctatttaccttaggtccaccaccgccaaaacccaatcgtcccccaaacgtcgacctgaccaaattccataaaaccagctcaggcaatagcacaagcaaaggccaaacctcctactccacaaccagcctgcccccacccccaccaagtcatcctgcatcccagcctcccctgccagcttcccatccaagccagccacccgtgccaagcctcccaccccgcaacatcaagcctcctttcgacctgaaatcccctgtgaacgaagataaccaggacggcgtgactcactcagacgtggtgattcctttagaccacgagcaggactctgaaggtgagacctacgaggacattgaggcttccaaggagcgagagaagaaaagggagaaggaagaaaagaagagactggagctggaaaaaaaagaacagaaagaaaaggaaaagaaggaacaggaaatcaagaagaagttcaaactgactggtcctatccaggtgattcatttggctaaagcttgctgcgatgtgaagggcggtaagaacgagttgtccttcaaacaaggcgaacagatagaaatcatcagaatcacggataatccagaagggaaatggctcggccggacagctcggggatcatatggctatatcaaaacaaccgctgtggagattgattacgacagtctgaagctcaagaaggatagtctgggagcccccagcagacccatagaagatgatcaagaagtttatgacgacgtggctgagcaggacgatataagttctcactcacaaagtggtagtggaggcatctttccccccccccccgacgatgacatttacgatggcatcgaggaggaagacgcagatgacggctctacacttcaggtgcaggaaaagtccaacacctggagttggggcattctcaagatgctcaagggcaaggatgatagaaagaagtccattcgtgagaagcctaaggtctctgattctgacaacaatgaggggtcttccttccccgccccaccaaaacagttggatatgggggacgaagtatacgatgacgtcgacacatcagattttccagtgtcatctgccgagatgagtcagggaacaaatgtaggtaaggccaagaccgaggagaaggatttgaagaagttaaaaaagcaggaaaaggaggagaaggattttcggaagaagtttaaaaagtag

SEQ ID NO: 26952 - DNA, 1566 bp, synthetic construct
  source 1..1566: mol_type = other DNA; note = Synthetic coding sequence
atgaccagcgccttcaagctggacttcctgcccgacatgatggtggagggccggctcttggtgcccgatcgaattaacggaacagccaacaaaatgaacggagccttggatcacagcgaccagccagacccagacgctataaaaatgtttgtgggccagataccaaggagttggtctgaaaaggagctcaaagagctgttcgagccgtatggcgccgtctaccagatcaacgttctgcgcgaccgcagccagaatccgccgcaaagcaaaggatgttgctttgttaccttctatactcgaaaagcagccttggaggcccagaatgccctccataacatcaagacgctccccggcatgcatcatccaattcagatgaaaccggcggatagcgaaaagagcaatgccgtggaggaccgaaaactctttataggcatggtgagcaagaaatgcaacgagaacgatatccgcgtgatgttcagcccattcggccagatcgaagagtgtcggatccttcgagggccagacggcctgagccgcggatgtgcttttgtgacattttcaacccgcgctatggctcaaaatgccatcaaggctatgcaccagagccagaccatggagggctgcagtagcccgatcgtggtgaagtttgctgacacccagaaggataaagagcagcgcagactgcagcagcagctggcacagcaaatgcagcagctgaacaccgccacctggggtaatctgactggcctgggaggactgactcctcaataccttgcactcctgcaacaagctacaagctcatcgaacctgggcgccttttccgggattcagcagatggctggaatgaacgccctgcaattacaaaacctggccactcttgcagctgccgccgctgccgcacaaacaagtgcaacttccacaaacgctaatccccttagtaccacctctagcgccctgggagcattgacctctcctgttgcggcctcaaccccaaattccaccgcaggagctgctatgaatagcttgacttcattgggcaccctccagggtctagccggggctactgtcggactgaataacattaatgcccttgccgtcgcacagatgctgagtgggatggcggcattgaatggtgggttgggcgccacaggacttactaatggcaccgcagggactatggacgcattaacccaggcctatagcggaattcaacagtatgctgctgcagccctgccaaccctgtattcccagagcctgttacagcaacagtctgcagctggctcacagaaggagggtccagagggcgcgaatctctttatctaccatttacctcaagagttcggcgatcaagacatcctgcagatgtttatgccttttggaaacgtaatctctgctaaggtgttcattgataagcaaaccaacctgagcaagtgcttcggatttgtgtcatatgacaatcccgtgtctgctcaagccgctattcaggctatgaatggttttcagatcggcatgaagcgactcaaggttcagctcaagcgatctaagaacgactctaaaccatattag

SEQ ID NO: 26953 - DNA, 1710 bp, synthetic construct
  source 1..1710: mol_type = other DNA; note = Synthetic coding sequence
atgctgcgggacatgaccggcctgccccacaaccggaagtgcttcgattgtgaccagaggggccccacttatgtgaacatgactgttggaagtttcgtttgcacatcctgtagcggatctctgcggggactcaatcctcctcacagagttaaatctatttcgatgacaacgttcacccagcaagaaattgaatttcttcagaaacatgggaatgaggtgtgcaagcagatttggcttggccttttcgacgatagatcctctgcaatccctgactttagggatccgcagaaggtcaaagaatttctgcaggagaagtatgaaaaaaaacggtggtacgtcccccccgaacaggccaaggtcgtggcctctgtgcatgcctcaatctcaggctcgtccgccagtagtacatctagtacccctgaggtgaagcccctcaagtccctgctgggcgatagcgcacctactctccacctcaacaaaggaacccctagccagagccccgtagtaggaagatcgcagggacagcagcaggagaagaagcagtttgacctcctatccgatcttggtagcgacatctttgctgctccagccccccagtcaaccgccacggcaaatttcgcaaactttgcacactttaatagccatgcagcccagaatagcgctaatgccgattttgcaaatttcgacgctttcggccaatcatctggaagtagtaactttggagggtttcctactgcatcccactcacccttccagccacaaaccacagctttccggatgctctcttcttcctgcagttttggagagttcacaagtgcgttccccctgcaggccacgcattctggctctgccgccagcgtaaacgctaattttgcccattttgacaatttcccaaagagtagttctgccgatttcggaacttttaatacctcgcagtcacatcagaccgcatctgctgtaagcaaagtgtccacgaacaaagcagggcttcagacggccgataagtatgctgccttagccaacttggacaatattttctctgctgggcagggcggcgaccaggggtcaggcttcggcactaccgggaaggctccagtggggtctgtggtgagcgtgcccagccagtcttcagccagtagtgacaagtacgccgcgcttgcggaacttgatagtgttttttcatcagccgcaacctccagcaacgcatatacgtccacaagcaacgcatcatccaacgtgttcggcacagtgccagtggtggcttcagcgcagacgcagcccgcgtccagcagcgtgccagctcccttcggagctacaccttctacaaacccctttgtggctgccgcaggcccgagcgttgctagtagcactaaccctttccagacaaatgcacgaggcgcaacggccgccacatttggtactgcgtctatgagtatgcctacggggttcggtacacctgcaccctacagtctgcccacgagcttttccggatcttttcagcaacccgcattccctgcccaggccgctttccctcagcaaacagccttttcccagcaacctaacggcttcgccgcatttggccaaaccaagcctgtggtgaccccttttggccaggtggccgcagccggggtgagctctaatccctttatgaccggtgcccccacagggcaatttccaacagggtcatcgtctacgaatccttttctgtag

SEQ ID NO: 26954 - DNA, 2007 bp, synthetic construct
  source 1..2007: mol_type = other DNA; note = Synthetic coding sequence
atgagcaagctggccgccgcccaccggggcgccatccgggccctgcaaatgttcgtcacccagtttacggaccgcggcgaacatccgttgcctgctagatgcaaggaattgggctcccttattcgtcagctgtccctgtgtagtgtaaagctcgacgccgaccctagcgtgccagacgtagtcattgatatcctgcagcaaatagaggccctggaaagcctgctcgagaaaaagctttcaccgaaaaaggtcaaaaaatgtttctccgaaatccggtcgagattccctatagggagccagaaagccttggagaggtggccatcgacctctcccaagggggaaaggcggcccctgaccgcaaaagacacctttccacaagaaacctcacgaccttcagtagccaagcaactcctcgctgataagtaccagccagacacagagctcccggaaacccagcgcctgcaatctgagttggacgtcttagacgcagacatagtgctggaggaggggccatttattctggatcagagcgcctccttcaaggatgaggtcctcgccgtagctaagactaaggccgggaaaaagaagcccgtgaccgagaacgttcctttccgtaaaaaagatacactggcacccgcaagacaacaaggccttagaaaggccgaaagaggacgccagtctcagcctcactctaagagtcgcgttcagcaaactacagtttcctccaggctgaagatgaacagacagccagtcaaggacagaaaggctccatggattccgcccaatcctacctcaccacccgcatctcctaagtgcgccgcctggctgaaagttaagacaagcccacgggatgctaccaaggaaccactgcagcaggaggatcctcaggaggagagccacttgaccggggcagttgagcatgaggctgcccggctggcctggttagatgccgaaacatcaaaaagactcaaagagctggaagagctgaaggccaaagaaattgatagtatgcagaagcaacggttggattggcttgacgcagaaacaagccgcaggacaaaagaactgaacgagcttaaagcggaggagatgtacagactgcagcagctgagcgtttctgctactcacttggctgataaggtagaggaagcagtgttggataggctgaagcccctactggtcaaggcgcagagagtgaactccacaactgaggctaacatccacctgaaggacggtagctctgtgaacaccgccaaggcccaacctgcacaggaggtcgcagctgttgattttgagtccaataatatcaggcagctagacgactttctggaagattgcgctagcgaactgtgggccgttactcacgccaaaattctcgggtcggaaacgctcgccacagttgaagacagcaaggacagtcctgatctcgaaatcatgatgcgcaggatggaggagatggaaaaatatcaagaatccgtcagacagcgatacaataagatagcatacgctgatccccgcctctggatgcaagaggagaataatgaccagaagatttctgccatttccgagaaacctcttagtccccaccccatccgcattaccaaaacagttgacaggaaagaccctgccgtgaacattatgctcgagagaccatgcaatgggaactcattagatgaatctgttggaacagaagaaggaagtgaaaaaagagaggcccccctattgtccctggcagaagacagccagcagaaggagggaagagcccctctgttcgttccgccagggatgcaacattcaatcggcgattactgcagccggttcgagcaatacctccggataatctcccatgaggcagtggggtcttttaacccgtggctaatcgcagagtctttctctgaagaattagtggacgaggctctgggggctgttgccgccgagctgcaggatatgtgtgaggattacgcggaggcagtattcacttccgaattcctggaagctgctacatag

SEQ ID NO: 26955 - DNA, 3612 bp, synthetic construct
  source 1..3612: mol_type = other DNA; note = Synthetic coding sequence
atgcccgcccggatcggctactacgagatcgaccggaccatcggcaagggcaattttgctgtcgttaaaagagcaactcatctggttactaaagcaaaggtagcaataaaaatcattgataaaactcagcttgatgaggaaaatctgaaaaagatctttcgggaggtgcagattatgaagatgctttgccaccctcacataatcaggctttaccaggtgatggaaaccgaaaggatgatttatctggttaccgagtacgcttctggcggagaaatcttcgatcacctggttgcccatggaaggatggctgagaaagaggcgcggcgcaaatttaaacagatagtaactgcggtgtatttttgccactgcaggaacatcgtccaccgcgatcttaaagccgaaaatctgctcctcgatgctaacctcaacattaaaatagcggacttcggtttttcaaatttgttcactcctggccagctgttgaaaacgtggtgtggatcccccccatatgcggctccggaactgttcgaggggaaggaatacgatggtccgaaagtggacatttggagcctgggagtggtgctgtacgtgctggtttgcggcgcactgcccttcgacgggagcaccctgcagaacctcagggcccgagttctttccgggaagttcagaattcccttttttatgagcacggagtgtgagcatctgattcgtcatatgctggtgcttgaccccaacaagagattgtccatggagcagatctgtaagcacaagtggatgaaattaggagatgccgacccaaatttcgatagactgatcgccgagtgccaacagctgaaagaagagaggcaggttgacccactgaacgaggatgtgcttttggcaatggaagatatgggcctggataaggagcaaaccttgcaagccgaacaggccggaactgccatgaatatcagcgtgccccaggtccagctaataaatcctgaaaatcaaatcgtagagcccgatggaaccctgaacttggattccgatgagggcgaggaacccagcccagaggctctggtgcgctacctgagcatgcgacggcatactgtcggagtggccgatccgcggacggaagtcatggaagacttgcagaaactcttaccaggttttccgggtgtgaacccacaggctccgtttttgcaggtcgccccaaatgtaaatttcatgcataacctcctccccatgcaaaatctccagcccacgggccagctggaatacaaggaacagagcctgctacagccacctactctccagcttttaaatggaatgggccccctggggagacgagcatcagacggcggagcaaatatccagttacatgcgcagcaactgctgaagcgtcccagaggtccctcccccctggtaacaatgaccccagccgtgcccgccgtgacacccgttgacgaggagtcttccgacggagaaccagaccaggaggccgttcagcgttacctcgccaatagatctaagcgtcacactctggctatgaccaacccaacagctgagatccccccagacttgcaaaggcaactaggacagcagcccttcaggagccgcgtgtggcctccgcatcttgtgcctgatcagcataggtcaacatacaaggattcgaatacgctccacctgcccacggaaagatttagtcctgtacggagattcagcgacggtgcagcctccattcaagccttcaaagcgcacctcgagaagatgggcaacaacagcagtataaaacagctgcagcaggagtgcgagcagctccagaaaatgtacggcggtcagatcgacgaacgcaccctcgagaaaacccaacagcagcacatgctctatcaacaggagcaacatcatcaaatcctgcaacaacaaattcaggattcaatctgtcccccgcagcccagtcctcccttgcaagctgcctgtgaaaatcagcccgcccttttaacacaccagctacagaggctcagaattcagccgtcttcaccgcccccaaatcaccccaacaaccatctgtttcgccagcctagcaacagtcctcccccaatgagctctgccatgatacagccgcacggggccgcaagtagttctcagttccaaggtctccctagcagatcggcgatctttcaacagcagcctgaaaactgttccagcccaccaaatgttgccctgacctgcttgggaatgcagcaaccagcccagtcacagcaggtgacaatacaagtgcaagagccagtggacatgttgagcaacatgccgggaactgctgccggatcaagtggccgcggaattagcatctcacccagtgctggccaaatgcaaatgcaacaccgtaccaatctgatggcgactctgagctacggtcaccgcccccttagcaagcaattaagcgctgactctgcggaagcccattctgcccaccagcagccaccgcattacacaaccagtgcattgcagcaggctttgctatcgcctaccccaccagattatactagacatcaacaggtaccccatatcctccaggggctgctctccccaaggcattccttaactgggcatagtgatatccgccttccaccaactgaatttgcccaactcatcaaacggcagcagcagcaacgacagcagcagcagcagcaacaacagcagcaggaatatcaggaactattcaggcacatgaaccagggggatgccggatcgcttgcgccttctctgggcggtcagtccatgaccgaaaggcaggccctgagttatcagaacgccgactcataccaccaccacacatccccacagcatctcctgcaaattcgtgcacaggagtgtgtgagccaagcatctagccccacaccccctcacggatacgctcaccagcccgccttaatgcactccgaatcaatggaggaggactgcagctgcgagggagctaaagatggctttcaggatagcaaatcatcttccacgctgacaaagggctgtcatgattccccattgctgctgagcacagggggccccggagaccccgaaagcctccttgggaccgtttcacatgcccaggagttaggaatacacccatacggtcaccagcccactgccgctttttcgaagaacaaggtgccctcacgggagccagtgattggtaactgcatggacaggtcctctccaggtcaggccgtagagctcccagatcataacggactgggttatcctgcaaggcccagtgtgcacgagcaccatcggcctcgcgctctgcagcgacatcacacgatccagaatagtgatgacgcatacgttcagttagacaatctgccaggaatgagtctggttgctgggaaggctctctccagcgcacgtatgtctgacgctgttctgagtcagtctagccttatgggctctcaacagtttcaggacggcgagaacgaggaatgtggggcgagccttggcggccatgaacacccagacctgtcggatggcagccagcacctgaattcttcttgttatcccagcacatgtattactgacatcctcctcagctacaaacacccggaagtgtcttttagcatggaacaggccggagtctag

SEQ ID NO: 26956 - DNA, 2046 bp, synthetic construct
  source 1..2046: mol_type = other DNA; note = Synthetic coding sequence
atgatcgagaagatgcagggcagccggatggacgagcagcggtgctccttccctcccccgctcaaaaccgaggaagactacattccatatccctctgtccacgaagtgttggggcgcgagggcccatttcccttaattcttttgccacagtttggcggctactggattgaaggaacgaatcacgagataacctctattcccgagaccgaaccacttcagagcccgaccacgaaggtgaagctggaatgcaacccaacagcacggatctatagaaaacactttctcggcaaagaacactttaactactactctctcgatgctgctctggggcacttagttttctctctgaagtacgacgtcatcggtgatcaagaacatctgcggctcttgttacgtacaaaatgccgcacttaccatgacgtaatacccatcagctgcctgacggaatttcccaatgtagtacagatggctaagctcgtgtgcgaggacgtcaacgtggatagattttaccctgtattgtatcctaaagctagcagactcatcgttacatttgacgagcatgtgatcagcaataattttaagttcggagtgatatatcaaaagctgggccagacctctgaagaggaattattttctaccaacgaggagtcccctgctttcgttgagttcctggagtttctcgggcaaaaagtgaaattacaagactttaaagggtttaggggcggcctcgatgtgactcacggccagacagggacagagagcgtgtattgcaactttaggaacaaggaaatcatgtttcatgtgtccactaaattgccatacacagagggggacgctcagcaattgcagcgcaagcgacacatcggcaacgatattgtggcagtggtatttcaggacgagaacacccctttcgtacccgacatgatcgcaagcaactttcttcatgcctatgtcgtggttcaggctgagggcggaggccccgacggcccgctgtacaaggtgtcagttacagcaagggatgacgtgccattcttcggacctccattgccagaccccgcagtctttaggaaaggccctgagttccaggagttcctgctgacaaaactcatcaatgccgaatacgcatgttataaggccgagaagtttgcgaaacttgaggaacgcacacgtgccgcacttctcgagacattgtacgaggagcttcacatacatagccagagtatgatgggactgggcggcgacgaggacaaaatggagaatgggagcggcgggggaggattctttgagagcttcaaaagagtgattaggagccggtcccagtctatggacgctatgggattaagtaataagaaacctaacacagtgagtaccagtcattccggctcattcgccccgaataatccagatctggctaaagccgctggtatctctcttctcattccaggaaagtctgctagtcgtttcggcagacgaggcagcgctatcggaattggtactgtcgaagagtccttaattgtccctgggaaatccccaacccgcaaaaaatcaggcccgttcggcagccgaagatccagcgcaattggcatcgagaatatccaagaggtgcaggagaaacgcgagtccccccccgccggacagaagactccagatagtggtcacgtctcacaggagcccaagtccgagaatagttcaacacaatccagcccagagatgcctaccaccaaaaatagagcagagaccgccgcccagcgggctgaggctctgaaagatttcagccgatcatcctcctctgcctctagctttgcaagtgtggtggaagaaactgagggcgtcgatggcgaggatacggggttggagtctgtatcttcttctggcacccctcataaaagggactcttttatatattcaacctggttagaggattccgtgtcaactactagcggtggttcatcacctgacgccggtaaacttggcgacccagcctgtccggagatcaaaattcagctggaggcatctgaacagcacatgccccaactcggatgctag

SEQ ID NO: 26957 - DNA, 675 bp, synthetic construct
  source 1..675: mol_type = other DNA; note = Synthetic coding sequence
atgagcgtgggctacgccaacggcatccgggtgatgagcatgacccacaccggggaaccaggctttatgctctatattccaatcgaatacgcccttcacgtgtacaacgaagttatgtcagtgggtcagaaatatggtattaggaacgcggggtattacgcactgcgcagtttacgtatcgaaaaattttttgctttctggggccaagacattaacaatctgaccacaccactggagtgcggacgggaatctagggtaaaactcgaaaagggtatggatttcattggccgcgacgcgctgctgcaacagaagcagaacggcgtctataaacgcttgaccatgtttatccttgatgatcatgactccgatctggacctgtggccttggtggggcgaacctatctaccgcaatggtcagtatgtagggaagaccacaagcagtgcctactcatactcactggaaagacatgtgtgcctgggcttcgtgcacaacttctctgaagataccggcgaggaacaggttgtcacagctgacttcattaatcgcggcgagtatgagattgacattgccggttaccgattccaggccaaggccaagttgtaccccgtagcttccctcttcacccaaaagcggagaaaggatgacatggaactgagtgatctgcatggcaagtag

SEQ ID NO: 26958 - DNA, 1590 bp, synthetic construct
  source 1..1590: mol_type = other DNA; note = Synthetic coding sequence
atgcacttcagcggcctggaggaggccgtgtaccggaacatccaggcttgcaaagagctcgctcagaccacccgcacagcatacgggccgaacggaatgaacaaaatggtcatcaatcatctggagaaactgttcgtgacaaacgatgccgcaaccattctccgggaactggaggttcagcatccagccgctaagatgattgtgatggctagtcatatgcaagagcaggaggtgggggacggaaccaactttgttctcgtgttcgccggcgctttgttggagctggctgaagaactcctgcgcataggcctgagcgtgtcagaagtgatagagggctatgaaatagcctgccgaaaggcacatgaaattctgcccaaccttgtatgttgctcagctaaaaacctcagggatatcgacgaggtatcatctctcttgcgcacctccatcatgagcaagcaatacggcaacgaggttttcttggccaaactgattgcacaagcatgcgtgtccatattccccgactcaggccacttcaatgtggataatattagggtgtgcaagatcttgggctctggaatttcaagctcttcagtgctccatggcatggtgttcaagaaagagaccgagggggatgtaacgtccgtgaaagatgccaaaatcgcagtgtatagttgtccattcgacggtatgatcactgaaaccaaaggaactgtgttaataaagactgctgaggaattgatgaatttctctaagggggaggagaacctgatggatgcccaggtgaaggccattgctgacaccggcgcaaatgtggtcgtcaccggcggaaaggtggctgacatggcactccactacgccaataaatataacattatgctagtcaggttgaacagcaagtgggatctacggcgcctatgtaaaacagtcggggctacagcactccccagactgacacctccagtgcttgaagaaatgggtcattgcgacagtgtgtatctgtccgaggtgggcgacactcaggtagttgtcttcaagcatgaaaaggaagacggcgcaatttcaactatcgtgctgaggggcagcaccgacaacttgatggatgacatagaacgcgctgtagatgatggcgtcaacactttcaaagtgctgacaagggacaagagattggttcccggcggaggagccactgagattgagcttgccaagcagattaccagctatggggaaacttgcccggggctggaacagtacgccatcaaaaagtttgcagaggccttcgaagcaatccctagggctctggccgagaattccggcgtgaaggcaaacgaggtgatctcaaagctgtacgctgtgcaccaggagggaaacaaaaatgtagggctggacattgaggctgaggtgccagctgtgaaagacatgttggaggctggtattcttgacacctacctggggaagtactgggcaatcaaactggcgactaacgcagctgtgacagtgctaagagtggaccaaattataatggctaagccggcgggaggacctaaacccccttccggaaagaaggattgggacgacgaccagaacgactag

SEQ ID NO: 26959 - DNA, 2193 bp, synthetic construct
  source 1..2193: mol_type = other DNA; note = Synthetic coding sequence
atgttcggccggaagcggagcgtgagcttcggcggcttcggctggatcgacaagacgatgctggcctcactcaaagtgaagaagcaggagctcgccaactcttcagacgcaacacttccggaccgccctcttagcccacccttgaccgccccacccactatgaaatcttcggagtttttcgaaatgctggaaaaaatgcaggggatcaagctggaagagcagaaacccgggccgcaaaaaaacaaggatgactacattccatacccttctatagacgaggtggtggaaaaaggcggtccgtaccctcaagtcatccttcctcagttcggcgggtattggatagaggaccctgaaaatgttggaacacccacttcgctaggatcctcgatttgcgaagaggaagaagaggataacctaagtcctaacacttttggctacaagctggagtgcaagggtgaggccagagcgtatagacgccacttcctggggaaagaccacctcaatttctattgcactgggtcttccctcggcaatctcatccttagcgtaaagtgcgaagaagccgaaggaattgagtacctcagagtaattctcaggtccaaactgaaaaccgtgcacgagaggattccactagcgggtttgagcaagcttcccagcgtgccccaaattgcaaaagcattctgcgatgacgcagtgggacttcggtttaacccagtattgtatccaaaagccagtcaaatgattgtaagttacgacgaacatgaagtgaacaataccttcaagttcggcgtgatctatcaaaaggctcggcagacactggaagaggagcttttcggcaataatgaagaaagccccgcattcaaggagttcctcgacctgttaggtgacaccatcacactgcaggatttcaagggctttcggggaggtctggacgtgacacatgggcaaacgggcgtcgagtccgtgtataccaccttcagagatcgcgagataatgttccacgtttcaaccaagcttccatttaccgatggcgacgcgcaacagttgcagagaaaacgccatatcggaaatgacatcgtggccatcattttccaggaagagaacaccccttttgtacccgatatgattgcttccaactttttgcatgcctacatagtggttcaagtagagacccccgggaccgaaacaccgtcctataaggtgtccgtgacggcccgtgaagacgtccccacattcggcccacctctaccatctcctcctgtgttccaaaaaggccccgagttcagggagttcctgctgactaaactgaccaatgcagagaatgcatgttgtaagagcgataaattcgccaaacttgaagacaggaccagggccgcgctcctggataaccttcacgacgagttgcacgcacatacacaggctatgctgggtctcggccccgaggaagataagttcgaaaatgggggacatggaggtttcctcgagtccttcaaaagggctattcgcgtgcggagccactctatggagaccatggttggcggtcaaaagaaatcacacagcggggggattccagggtcactgtcggggggcatttcacacaactctatggaggtaaccaaaacaacattttccccgccggtagtggcagctacagtcaagaaccagtctagatctcctataaaacgacgttccggcctgttcccaaggttacacacagggtcggagggccagggggactccagagccaggtgtgacagcacttcctcaacacccaagacaccggatggcggacatagcagccaggagattaagagtgagacttccagtaacccttcctcccccgagatatgtccaaacaaggaaaagccctttatgaagctgaaagaaaatggtagagctatctctcgctcatcctcatcgacttcctcagtttcctccacggcaggtgagggcgaagccatggaggagggcgactctggtggaagtcaaccgtccaccacgtctccgttcaaacaggaggtctttgtgtattcgcctagccccagcagtgagtcacccagcctgggggctgccgctacccccattattatgtcccggtctccgacagacgccaaatccagaaatagcccacgcagtaacctgaagttccgcttcgacaaactgtcccatgcttcctctggcgctgggcactag

SEQ ID NO: 26960 - DNA, 2271 bp, synthetic construct
  source 1..2271: mol_type = other DNA; note = Synthetic coding sequence
atggtggcccccgtgctggagaccagccacgtgttctgctgccccaacagggtacggggagtactaaattggtcctcaggcccacgcggcctgctagcgttcggcactagctgcagtgtcgttttgtacgatcccctgaaacgcgtggtggtaactaacctcaacggccacacggctcgggttaattgtattcagtggatttgcaagcaggatggctccccctcgacagaactggtttcgggcggaagcgacaatcaagtaatccattgggagatcgaagacaatcaactattgaaagcagtccatctgcagggacacgaaggaccagtgtacgccgtgcatgccgtttatcagcgtcgcacatctgacccggcattgtgtaccttgatcgtatccgccgcagccgatagcgccgtgcgcctctggagcaaaaagggccccgaagtccccatccttgcctgtggaaacgacgattgccgcatccacatatttgcccagcagaacgaccagttccagaaagtcctgtctctatgtgggcatgaggattggatacgcggagtagagtgggccgcctttggccgtgaccttttcttagctagttgcagccaggattgtctgattcgaatttggaaactttatatcaaaagcacgtccctggagactcaggatgacgacaatatccgactgaaggagaacacctttaccatagagaacgaatccgtcaagatcgcctttgcggtgacactcgagacagtgcttgccgggcacgaaaattgggtcaacgctgtgcattggcagcctgttttttataaggacggtgtgctgcagcagcccgttcgcctgctgagcgcatccatggacaaaaccatgattctatgggcccctgacgaagagtccggggtatggctggagcaaagggagtggacccctgagatcgtgatatccggccacttcgacggagttcaggatttagtgtgggacccagagggagaattcattatcacagttggaaccgaccagacaacaaggctttttgccccgtggaaacgaaaagaccaatcacaagttacctggcatgaaattgcgcgacctcagattcacggatatgacttgaagtgcctggctatgatcaaccgatttcagttcgttagtggcgctgacgagaaagttcttcgcgtcttcagtgctccgcgcaatttcgtggagaacttctgcgccatcacaggccagtccctcaaccacgtcctgtgcaatcaggattcagatctgcccgaaggcgcaaccgtgccggcgctgggactttctaacaaggctgtgttccagggtgatattgcatcccagccgtcagatgaggaagagctgctgacatcaacaggatttgagtaccagcaggttgcatttcaaccatccatactgaccgagcccccaacagaagatcaccttctgcagaatactctctggcccgaggttcagaagctgtacggtcacggttacgagattttttgcgtgacctgtaacagctccaagaccttgctggcctccgcctgtaaagctgccaagaaggagcacgcagctattatcctgtggaacaccaccagctggaagcaggtccagaaccttgtttttcacagccttactgtcacacaaatggccttctcccctaacgaaaagttcctgctcgctgtctccagagataggacatggtccttgtggaaaaaacaggatacaatctcgccggagtttgaaccggttttcagtctgtttgcttttaccaataaaattactagtgttcactctcgaattatttggtcttgtgactggtcacctgattcaaaatatttttttaccgggtccagggataaaaaggtggtggtttggggggagtgcgactctactgacgattgtattgagcacaatattggtccatgcagcagtgtgctggacgtaggcggtgcagtgacagctgtgtccgtgtgcccagtccttcatccctcccagcgatacgtagtcgcagtcggactcgaatgcggtaagatttgcctgtatacgtggaagaagaccgaccaggtccccgagattaacgactggactcactgtgtggaaacctctcagtcacaatctcacacccttgcaattaggaaactgtgctggaaaaactgtagcggtaaaactgagcaaaaggaagccgagggcgcagaatggctgcacttcgccagttgcggcgaggatcataccgttaagattcaccgagtgaataaatgcgccctatag

SEQ ID NO: 26961 - DNA, 1272 bp, synthetic construct
  source 1..1272: mol_type = other DNA; note = Synthetic coding sequence
atgaaccggcagcccgtgaaggaccggaaggccccctggatccccccaaatccgacttctccacctgctagcccaaaatgtgccgcttggctgaaggtgaagacctcacctagagatgccacaaaggaacctctgcaacaggaggaccctcaggaagagagtcacctcaccggagccgtggagcatgaggcggccaggctagcctggttggatgcagagactagcaaacgtctgaaggagctagaagagctgaaggcgaaggagatagacagcatgcagaagcagcgactagactggctggatgccgagactagtagaaggaccaaagagcttaacgaattgaaggctgaagagatgtaccggctccaacaactgtctgtttcagccacgcacctagccgacaaggtagaggaagcggtcctagacagactcaagccgctgctagtgaaagcccagcgcgtcaacagcaccaccgaggccaacatccacctgaaagacggctcatctgtgaacaccgctaaggcccagccagctcaggaagtcgccgctgtggacttcgagagcaacaacatccgacaactggatgatttcctggaggattgcgctagtgagctctgggccgttacccacgccaagatcctcggctcagagactcttgccaccgtggaggactctaaagactccccggatttagaaataatgatgcgaagaatggaggagatggaaaagtaccaggaaagcgtccggcaacgctacaacaagatcgcttatgccgatccacggctctggatgcaggaagagaataacgaccaaaaaatctctgccatttcggagaagcctctgtcccctcaccccattaggatcaccaagacagtcgacagaaaggatcccgcagtaaacattatgctggagcggccctgtaacggcaacagcctggacgaaagcgtgggcacagaggagggcagcgaaaagcgcgaggctcccctgctcagtctcgcagaagatagccagcagaaggagggaagagctcccctgttcgtcccacctggcatgcagcactctataggcgactattgcagtcgatttgagcagtacttgagaataatctcacatgaggcagtcggctcgttcaatccttggctcatagctgagagtttctcagaagaactggtcgacgaggcactgggcgctgtagcagcagagcttcaagatatgtgcgaggactacgcagaagcggttttcacgtccgagttcctggaggccgcgacttag

SEQ ID NO: 26962 - DNA, 777 bp, synthetic construct
  source 1..777: mol_type = other DNA; note = Synthetic coding sequence
atggcccggctgcaggaggagcacggcgaccagctgctgagcatccgatgtcagcatcaggagcaagtggaggaccttaccgcttctcatgacgcagcgttgttggaaatggagaacaaccataccgttgcaattacaattctgcaggacgatcatgaccacaaggtccaggagctgatgtctactcatgagctggaaaagaaggaactcgaagagaattttgaaaagttgagattgtctctacaggaccaggttgataccctgacattccagtcccagagcctaagggatcgggccaggagattcgaagaagccctgaggaagaataccgaggagcagctggaaatcgcactggctccctatcagcacctcgaggaagacatgaaatccctgaaacaggtcctcgaaatgaaaaatcagcagatccatgagcaggagaagaagatcctggaattggaaaaacttgcagaaaagaatattattctggaagagaagatccaggtgctccagcagcagaacgaagatttgaaagcccgaatcgatcagaataccgtggtcactcggcagctgtccgaggagaacgccaatctgcaagaatatgttgagaaggagacacaagaaaaaaagagactttcgaggactaacgaagagctgttgtggaaactgcaaaccggcgaccccacttcacctattaaactgtccccaaccagtccggtctaccgcggatcttcctccggcccaagtagtccagcccgcgtctccaccacgcccaggtag

SEQ ID NO: 26963 - DNA, 1053 bp, synthetic construct
  source 1..1053: mol_type = other DNA; note = Synthetic coding sequence
atgtgccccaccaccacctggccccggggccggcggtggagccggaacctgagagatactcaggcagtgcgccattataaaatctggcgccgcgccggcggccgtctgcacctgaacgaagctgtgtctttcctgtcactccctgagcttgtaaattatcatagagcacagtctctcagccatggcctaagactagcggccccgtgcagaaaacatgaacccgaacctctgccgcattgggacgattgggagagaccgagagaggagttcacactctgtcgaaagttaggctctgggtatttcggtgaagtattcgaggggctgtggaaggacagggttcaagtagcaatcaaagtaatttcacgcgacaaccttctgcaccaacagatgctccaatctgagatccaggccatgaagaagcttcggcataagcatattcttgccctgtacgctgtagtaagtgtgggggatcccgtgtatattattactgaacttatggcaaagggctctctgctggaattactgagagactccgacgagaaagtgctccccgtgagcgaacttcttgatattgcatggcaggtggccgagggaatgtgttatctggagtcgcaaaattatattcacagggatctcgccgcccgcaacatactagtgggcgagaatacactgtgtaaagtgggagacttcggcctggctcggcttatcaaagaagatgtatatctctctcatgatcataacatcccttacaaatggacagctcctgaagcattatctcgcggtcactacagcacaaaaagcgacgtctggtccttcggcatcctgttgcacgaaatgttctcgcggggtcaggtgccataccctggcatgagcaaccacgaggcctttttgagagtggacgccgggtaccgaatgccgtgtcccctcgaatgcccgccaagcgtgcacaagctgatgctgacatgttggtgtcgcgaccctgaacaaagaccttgtttcaaggccctccgagaaagattaagctcttttacatcttacgagaaccccacctag

SEQ ID NO: 26964 - DNA, 3480 bp, synthetic construct
  source 1..3480: mol_type = other DNA; note = Synthetic coding sequence
atggtgagcagcagccccagcacccccagcaacatcccccagaagccctcacaacccgctgcaaaggagccgtccgccacccctcccatctcaaacctcactaaaacagcaagcgaatccatatccaatctttcagaagccggatctatcaagaagggagaaagagaactgaagattggggaccgtgtcctggtgggagggacaaaggccggtgttgtgagattcctgggcgagacggattttgcaaagggtgaatggtgcggcgtggagcttgacgaaccactcggcaagaatgacggagctgtcgctggaacacgctatttccagtgccaacctaagtacgggctgtttgcacctgtccacaaggtcactaagatcggattcccgagcacaacccctgcaaaggctaaagcaaacgctgtccgtagggtgatggccaccactagtgccagcttaaagaggtctccttccgcgagctctctgagtagcatgtcaagtgtagcctcttcggtctcttctcgcccatctcgcaccggactgttgacagagaccagcagccgatacgcccgaaaaatcagcggaaccacggccttgcaagaagctctcaaggaaaaacagcagcatatcgaacagctgctcgcagaaagggatttggaacgcgcggaagtggctaaggcaaccagccacgtcggagagatagaacaggagctggcccttgcccgcgacggacacgatcagcacgtgctggaactcgaagctaaaatggaccaattacggactatggtggaagcagccgacagggaaaaagtggaactcctgaatcaactggaagaagaaaagcgcaaggtcgaggatctccagttccgggttgaggaggagtcaatcaccaaaggcgacttggagactcagacaaagctcgaacacgctaggattaaagaattggagcagtccctcctgtttgaaaaaaccaaggctgacaagttgcagcgggagttagaagacacaagagtagccaccgtgagtgagaagtcccgaatcatggagctggagaaggacttggctctcagagtccaggaggttgctgaactgaggagaaggctagaatccaataagcctgcaggtgatgtcgacatgagcctgagtctgctgcaagaaatttcttccttgcaggagaaactggaggtgacaaggacagatcatcagcgagagattaccagcttaaaagaacattttggagcacgggaggagacccatcagaaagagatcaaggcgctgtatacagctacggagaaactgtctaaggagaatgagtccctgaagtcaaagttagagcatgccaataaagagaactccgacgtgatcgctctatggaagtccaaattggaaacggccatcgcatctcaccagcaggccatggaggagttgaaagtgagtttctcaaaaggcctgggaacagagacagcggagtttgccgaactcaaaacccagattgaaaaaatgagactagactaccagcacgagatcgagaacctccaaaatcagcaagactcagaacgggctgctcatgctaaggaaatggaagccctgcgagcgaaactgatgaaagtgattaaagagaaggagaactccctggaggctatcagatccaagctggataaggccgaggaccagcaccttgtggagatggaggataccctgaataagctccaggaggctgaaatcaaaaaggaaaagtttgctgaagcgtccgaggaagctgtttcagtgcagcgatccatgcaggagacagtcaataagctgcatcagaaggaagaacagttcaatatgcttagctctgacctcgaaaagctgagagagaatttggcagatatggaggccaagttcagggagaaggacgagagagaagaacagctgattaaagcgaaggagaagttagaaaacgatatcgcggagataatgaaaatgtcaggggataacagttctcagctcactaagatgaatgacgaattaaggctcaaagagagagacgtcgaggagctgcagctaaagctgacgaaggctaacgagaacgcgagctttttgcagaagtccattgaagacatgactgtcaaagcagaacagtcccagcaagaagctgccaagaaacacgaagaagaaaaaaaagagttagaaaggaaactatcggatctcgagaaaaagatggaaacgtctcacaatcagtgccaagagcttaaggctcgctacgagagagccacgagcgagaccaaaactaaacacgaggaaatattacagaatcttcagaaaaccctgttggataccgaggacaaacttaagggcgcccgcgaagaaaactccggtctgctgcaggagctggaggagctcaggaagcaagctgataaagccaaagctgcccagacagcagaggacgccatgcagattatggaacagatgactaaagagaagaccgaaaccttggcctctttggaggacacgaagcagacgaacgcaaaactgcaaaacgaactggacactctgaaggagaacaatctgaaaaatgtcgaagaactaaacaagagtaaggagttattgacagttgaaaaccaaaaaatggaagagttccgaaaggagatagagacactgaagcaggccgctgcacagaagagtcagcaattaagcgctcttcaggaagagaacgtcaaattggccgaagaacttggtcgatctcgggacgaggtcacgtctcatcagaagttagaggaggagcggagcgtgcttaataaccagctccttgagatgaagaagagagaaagcaaatttattaaagacgcagacgaggagaaggcatcactgcagaaatccatcagtatcacatcggctctgctgactgagaaagatgcagagctggagaaactgagaaacgaggtgacagtgttgcggggagaaaacgcatctgctaagtctctccactctgtcgttcaaacccttgaatctgacaaagttaagctcgagctgaaagttaaaaacctggagctccaacttaaagagaataaacggcaattaagctcatccagcggcaacactgatacacaggctgacgaggacgagagggctcaagagagtcagaaccaaatcgactttctaaactctgttatcgtggatctacaacgcaaaaaccaggacctcaaaatgaaagtggagatgatgagtgaagctgctctaaacgggaatggcgacgatctgaacaactatgatagtgatgatcaggaaaaacagtccaagaagaagccccgcctgttttgtgacatttgcgactgcttcgatttgcacgacaccgaggactgtcccacacaggctcaaatgagtgaggatccgccccactccacacaccacggatctaggggggaagagaggccctactgcgaaatatgcgagatgttcggtcattgggcaaccaactgtaatgacgacgagactttttag

SEQ ID NO: 26965 - DNA, 756 bp, synthetic construct
  source 1..756: mol_type = other DNA; note = Synthetic coding sequence
atgaccaccgagcagcggcggagcctgcaggccttccaggactacataagaaagaccctcgacccaacttatattctgtcctatatggcaccatggttcagagaagaagaagtgcagtatatacaggctgaaaagaataataaaggacccatggaagcagccaccctgttcctgaagttcctcctagaactccaagaagagggatggttcagaggctttctggatgccttggaccacgcgggatattccggtctttatgaggccattgaatcatgggatttcaagaagatcgagaaacttgaagagtatagactgctgctcaaaagactgcagcccgaattcaagactagaatcatcccaaccgacataatcagcgacctttccgagtgcctgattaaccaggaatgtgaggagatcctgcagatatgtagcacaaagggtatgatggccggtgcggagaaactcgtggagtgcttattacgatcagacaaggagaattggcccaaaacactgaagctggcactggagaaggaacgcaataagttctccgagttatggatcgtggagaaaggcataaaagatgtcgaaacggaagatttggaagacaaaatggagacttctgacatccaaattttttatcaggaagaccctgaatgtcagaacctgtcagagaactcatgcccaccttctgaggtgtccgatactaatttatatagcccatttaagcccatcaagaaaaaaaaaaagaaaaagtag

SEQ ID NO: 26966 - DNA, 3189 bp, synthetic construct
  source 1..3189: mol_type = other DNA; note = Synthetic coding sequence
atggtgagcagcgcccagatgggcttcaacctgcaggccctgctggagcagctctcacaagatgaattaagtaagttcaagtacctcattacaaccttttccctggcccatgaactgcagaagattccacataaagaggttgataaagccgatgggaaacagctggtcgaaatcctgaccacacactgtgatagctactgggtcgagatggccagcctgcaagttttcgaaaaaatgcatcgcatggacctgagcgagagggcaaaggacgaagtgagagaagctgccctgaaatcattcaacaaacggaagccactgtccctgggcattacaagaaaagagaggccccccctggacgtggacgaaatgttagagcggttcaaaaccgaagctcaagcattcactgaaacaaagggtaatgtgatctgcctggggaaagaggtattcaaagggaaaaagcctgataaggacaaccgatgtagatatatcctgaagaccaagtttagagagatgtggaaatcttggcctggggacagtaaagaagtccaagtgatggctgagcgctacaagatgttgatccctttctctaaccctcgcgtcttgcccggtccatttagctacacagtggtactgtacggccctgcagggcttggcaagaccacattggctcagaaactcatgctggactgggcggaggacaatttaatccataagtttaagtacgcattctacctcagttgcagggaattgagtagacttgggccctgctctttcgcagaattagtatttcgtgattggccagaattacaagacgatattcctcacatcctggcccaggctcggaaaatcctgttcgtaatcgacggcttcgatgagctgggcgcggcgcccggtgccctgatcgaggacatttgtggcgattgggagaaaaagaagcccgtcccggttttgctcgggagtttactgaacagggtaatgctgccaaaagccgctttattggtgacaacccgaccacgggccctacgcgatctgcgcatattggctgaggaacctatttatattcgagtggaaggattccttgaagaagatcgcagagcttatttcctgaggcatttcggggacgaagatcaggctatgagggcctttgagctgatgcggagcaacgccgccctgtttcagctgggaagtgctccagctgtgtgctggattgtgtgcaccactttaaagctgcagatggagaagggggaagacccagttcctacatgtctgacaagaacggggctattcctcaggttcctctgttcaagattcccacagggcgctcaacttagaggtgccctgcgtactttgtcgttactggcagctcaggggctgtgggcccaaacatctgtcctccacagggaagatctggaaagattgggagtacaggaaagtgacttgagactgtttttggatggggatatcctgcggcaggatagggtctccaaaggctgctatagttttatacacctgtcctttcagcaattcctcaccgctcttttctatacactagagaaagaggaggaggaagacagggatgggcacacctgggacatcggggacgtccagaaactcttgagcggagttgaacggctacgaaaccccgacctgattcaagctgggtattactcctttggcttggctaatgagaagcgagctaaggagctggaggccacgtttggatgccgcatgtcacctgatattaagcaagagctcctacggtgcgacatctcctgcaaggggggccactccaccgtcaccgacctgcaagaacttcttggctgtctttatgaatcccaggaggaggagctcgtcaaggaagtcatggcacagttcaaagagatatcattacacctgaacgctgttgacgtggtaccctctagtttttgcgttaaacattgcagaaacttgcagaaaatgtctttgcaggtaataaaggaaaatcttcctgaaaatgtgacagcatcagagtcagacgccgaagtcgaacggtcccaggatgatcagcacatgctcccattttggacagatctctgttctatcttcgggtctaacaaagacttaatgggtctggcaatcaacgactccttcctgagcgcttctctggttagaatcctatgcgaacagattgcaagcgacacatgtcatctgcagagagtagtctttaagaacattagccccgccgatgcccatcgaaacttatgcctcgcccttcgaggacacaaaactgtcacctacctgacgctccagggcaacgatcaggatgacatgttcccagctttatgcgaagtgctaagacatcctgagtgtaacctcagatacctcggtctggtgagctgcagcgccactacacagcaatgggccgatctctctctggctttggaggtaaaccagtcacttacatgcgtcaacctaagcgacaacgagttactggatgaaggcgcgaaacttctctacaccacgctcaggcaccctaagtgtttcctgcaaaggctcagcttggagaattgccatctgactgaagcgaactgtaaggacctggctgccgtactggtcgtgtctagggaactgacacatctctgtttagcaaaaaacccaatcgggaacacaggggtcaaatttctctgtgaaggcctgcgatacccagagtgcaagcttcaaactctcgtcctctggaattgcgatatcacatcagacgggtgttgcgacctcaccaaactgttacaggagaagtcaagcctcttatgtctggatctgggtctaaaccacatcggggtgaagggtatgaagttcctttgcgaagcccttcgaaaacccctatgcaaccttagatgtctgtggttgtggggatgtagcatccctccttttagctgtgaagacctttgtagcgccctgtcttgtaaccagtccctcgtgacccttgacctgggccagaatccccttgggagtagcggtgtgaagatgctgttcgaaaccctgacctgcagctctggtaccctgagaaccctccggctaaagatagacgactttaacgacgaactgaacaaactgctggaagaaattgaggagaaaaatccccagctgatcatcgatacagaaaagcaccacccatgggctgagcgcccctcgagccatgattttatgatctag

SEQ ID NO: 26967 - DNA, 363 bp, synthetic construct
  source 1..363: mol_type = other DNA; note = Synthetic coding sequence
atgtggagcatcgagaacatcgccttcggcagcggcggcggcctgcttcagaaacttacccgcgatctcctgaattgcagttttaaatgttcatacgtcgtgacgaacgggctgggaatcaacgtttttaaagaccccgttgcagacccaaataagaggtcgaagaaggggaggctgagcctccacagaacacccgcgggcaatttcgtcaccctagaggagggtaagggggaccttgaggaatacggacaggatctcctgcacaccgtttttaaaaatggcaaggtgaccaaatcatactccttcgatgagatacgcaagaacgcccaactgaacattgaattggaggccgcccaccattag

SEQ ID NO: 26968 - DNA, 936 bp, synthetic construct
  source 1..936: mol_type = other DNA; note = Synthetic coding sequence
atgtaccacctggacaaccaccccgagaagcagttcagcaccgacgttcttaagcaggccattgagctttcaccagataatcagtatgttaaagtgctgttaggcttgaagctacaaaaaatgaacaaggaggccgagggtgagcagttcgtggaagaggctctcgaaaaaagcccatgccaaacagacgtgctcagaagtgccgcaaagttctacaggcggaagggcgaccttgacaaggccattgagctctttcagagagtgttagagagcaccccaaataacggctatttgtaccaccagatcgggtgttgttataaagccaaggtacgccagatgcagaatacaggagagagtgaggccagcggcaataaagaaatgattgaggcactcaagcagtacgctatggattactcaaacaaagcgctggagaagggtcttaacccacttaatgcatacagtgatttagctgagttcctggagaccgagtgttaccagacacccttcaataaagaagtgccagacgctgagaaacagcagagtcaccagaggtactgcaatttgcaaaagtacaacgggaaatcagaagatactgccgttcaacatggccttgaaggcttatctatatccaagaagtctaccgacaaagaggagattaaggaccagccacagaacgtttccgaaaatcttcttccacaaaacgcgcctaactactggtatctgcagggtttgattcacaagcaaaacggagaccttctccaggcagccaagtgctatgagaaggagttaggccgcctgctccgagatgccccaagcgggattggcagcatcttcctgagtgcctctgaattagaagatggaagcgaggagatgggacagggtgccgtcagttcctctccccgagaacttctgtctaattcggaacagctgaactag

SEQ ID NO: 26969 - DNA, 3267 bp, synthetic construct
  source 1..3267: mol_type = other DNA; note = Synthetic coding sequence
atgtacggcagcgcccggagcgtgggcaaggtggagcccagcagccaatccccaggcaggtccccccgacttccgaggtccccgcgacttggccacagaagaacaaactcgactgggggatcttcaggatcctccgtgggggggggatctggtaagactctgagcatggagaacattcagtccctcaatgcagcttatgccacatctggcccaatgtaccttagcgatcacgagaacgttggctctgagaccccaaagtcaaccatgactttaggtagatcaggtgggcgtctgccctacggggtccgcatgacagccatgggctctagtccaaatatagcgtcctcaggtgtcgcctcagacacaattgcatttggagagcaccacctaccacccgtctccatggcctccacagtgccacactcattacgacaggcacgcgataacaccatcatggacctgcagacacagctgaaagaagtgctgcgcgagaacgacctgctgcggaaagacgtcgaagtgaaagagagtaaattgagctcctctatgaattcaatcaagactttctggtctcccgaactcaagaaagaaagggctctgcgtaaagatgaggcttctaagattaccatatggaaggagcagtaccgggtggttcaagaggagaatcagcacatgcaaatgaccatccaggcccttcaagatgaactgagaatacaacgcgaccttaatcagctgtttcagcaggacagcagttccagaaccggtgagccctgcgttgctgagctgacagaggagaacttccagcgcttacacgccgaacatgagagacaggccaaagagctttttcttctgcgaaagaccttggaagaaatggagctgaggattgaaactcagaagcagactctcaatgcccgagatgaatccattaagaagttgctggagatgttgcagagcaaaggtctttcagcaaaggccaccgaagaagatcatgagcggacccgacgactggctgaggccgagatgcacgtgcaccacttagagtccttgctggagcaaaaagaaaaggagaacagcatgctgcgcgaggagatgcacagacggtttgagaacgccccagactcggccaaaaccaaagcactgcaaaccgtcatcgaaatgaaggacagcaagatttcctccatggaaagggggttgagggatctggaagaagagatccagatgttgaaatcaaacggggccttgagcacagaagagcgtgaagaagagatgaaacaaatggaggtgtatcgttctcattcaaaattcatgaaaaacaaaattggccaggtcaaacaggagctgtctaggaaggacacagaactgctcgccctgcagaccaaactcgaaaccttgacaaatcaattttccgattctaagcagcacattgaggtgttgaaagaatcgctaacagctaaggagcagcgggccgcaatcttacagactgaagtggatgctttgcgcctgcgcctggaggagaaagagacaatgctgaataagaagacaaaacagattcaggacatggcagaggagaagggcacacaggctggcgaaattcacgatctcaaagatatgttggatgttaaagaacggaaggttaacgtcctccagaagaagatagaaaacctccaagaacagttgcgcgacaaagagaagcagatgagcagtctaaaagaaagggtaaaaagcttgcaggcagatactaccaacactgatacagcactcactaccctggaggaagcattggcagaaaaagaaagaactattgaacgtctcaaggagcagagggacagagacgaaagggagaaacaagaagaaatcgacaattataaaaaggacctgaaagacttaaaagagaaggtgtccctattacagggcgacctctcagaaaaggaggcaagtctgcttgacttgaaggaacatgcatcatccctggccagctcagggctgaagaaggattctcgcttaaaaacgttagagattgctctggaacaaaagaaggaggaatgtctgaagatggaaagccagcttaagaaggcccacgaagccgccctcgaagcccgtgcctcccctgaaatgtctgatcgaatccagcacctcgagagagagattacgcgttataaggatgagagcagcaaggcacaagctgaggttgatcgcctgttagaaattttgaaagaggtggagaatgaaaagaacgacaaagataagaaaatcgcagagctggaacgtcaggtgaaagatcagaacaagaaagtggccaaccttaaacataaggagcaggtagagaagaagaagagtgctcaaatgctagaagaagcgcgacggagggaagacaatctgaatgacagctcgcagcagctgcaggactctctccgaaagaaagatgataggattgaggaactggaagaggctttgagagagtctgtccagattaccgcagagagagaaatggttctagcgcaggaggagtccgcacgtactaacgccgaaaagcaggtggaggaacttctgatggccatggagaaggtaaagcaggagctagagtccatgaaggcaaagctctcgtccactcagcaaagcctcgcagagaaggagacgcacctgaccaatttaagagcagaacgccgaaagcatctcgaggaagttctggaaatgaaacaggaggcactgctggccgctatttctgaaaaagacgctaacattgcactgttagagctctcctctagcaagaagaaaacacaggaggaggtcgcagcactgaagagggaaaaagatagactggtccaacagctaaagcagcagactcagaatagaatgaagctgatggccgataactacgaggatgaccactttaaatccagccactcaaatcaaactaaccataaaccatctcctgaccaaattattcagcccctgctggagcttgaccagaatcgatctaagctgaaattatatatcggccacctgactactttatgccacgacagagatccattaattctcagaggcctgacccccccagcttcttataaccttgatgatgaccaggcagcgtgggagaatgagcttcagaagatgacacgtggtcagctccaggacgaattggagaagggtgaacgggacaatgccgagttgcaggagttcgctaatgctattctacagcagatagcagaccactgcccagatatcttagagcaggtcgtgaacgcgcttgaagagtccagttag

SEQ ID NO: 26970 - DNA, 1485 bp, synthetic construct
  source 1..1485: mol_type = other DNA; note = Synthetic coding sequence
atgaagctggtgaacctgtacaagggcgccgtgctgtacctgctgcgtggacgtaaaaccttcctgatccccgtcctgttcaataattatataactgcagccctgaaactgctggagaagttgtacaaagttaaccttaaagtgaagcacgtcgaatacgacaccttctacatcccggaaatcagcaatctggttgatatccaggaagattatctcatgtggttcctgcaccaggctggaatgaaggcaaggcccagcataatccaggatactgttactctatgcagctatccgtttattttcgatgctcaggcaaaaaccaaaatgctccagacggacgccgagctccagatgcaggtggccgtaaacggggccaatctgcagaacgtcttcatgctcctcaccctcgaacctctcttagcacgaagcccttttcttgtactgcatgtgcgtcggaataacctcgtgggcgatgcgctccgggagctgagtattcactctgacatcgatttgaaaaagcctctgaaagtgatcttcgatggtgaagaggctgtggatgcgggaggggtcactaaagagttttttctcttgttactgaaggagctcctcaatcccatttacggcatgttcacttactaccaggactctaacctcctgtggttctccgacacttgtttcgtggagcacaattggttccatttaattggtatcacttgtggattggccatctacaactcgactgtggttgatctccacttccctttagctttgtacaaaaaattgttgaatgtcaaaccaggacttgaagatttgaaagagcttagccctaccgagggacggagcctacaagaactgttggactacccaggcgaggacgtagaagagaccttctgtctgaactttactatttgcagggagagttatggggtgattgaacagaaaaagctcattcctggcggagataatgtgacagtgtgcaaggataaccgccaggagttcgttgacgcatatgtgaactacgtgtttcagatctccgtgcatgagtggtacacggccttttccagcgggttcctgaaagtttgtgggggaaaagtgctggagttgttccaaccaagcgagcttcgagccatgatggttggcaacagcaactataattgggaggaactagaggaaaccgctatttacaagggagactacagcgctacacaccccaccgtcaagctgttctgggaaacctttcacgaatttccattagaaaagaagaagaagttcctcctgttcctgacgggttccgatcggatacctatttacggaatggccagcctccagatcgtgatacagagcactgctagcggggaggaatatctccctgttgcccatacatgctacaatctactcgacctccccaagtactcctcaaaagaaattcttagtgcgcgcctgactcaggcactggacaactacgaaggcttttccctggcctag

SEQ ID NO: 26971 - DNA, 2370 bp, synthetic construct
  source 1..2370: mol_type = other DNA; note = Synthetic coding sequence
atgtgccccagcagccagagcccccggccccccctgctgcggcccccttgcagctaccgggaagtaccttcatccgtccagtccccagcacagcagcaagtgccggcgcgccctggagcgccctcggtacaggtgccttccccatttctgcttcagaatcagtatgaacccgtccagcctcattggttttattgcaaggaagtggagtataagcaactgtggatgccctttagcgtgttcgactccctgaatcttgaggaaatctataattctgtgcagcccgaccccgagtcagtcgtgctcggcacggatggaggcaggtacgacgtgtacctctatgaccggattcgcaaggccgcttactgggaggaggagccagccgaggtgaggcgctgtacttggttttacaagggggataccgacagtaggttcatcccctacacagaagaattttctgaaaaacttgaagccgagtataagaaggctgtgacaacaaaccaatggcacaggcgcctcgaatttccctcaggagagaccattgtgatgcacaacccgaaggttatagtgcagtttcagccgtctagtgtgcccgacgagtggggtaccacccaggacggacagactcgccctagagtcgttaagagagggattgatgacaatctggatgagatcccagacggggaaatgcctcaagtggaccatctcgtgttcgtcgtacacggcattggcccagtttgcgatcttcggttcaggtccatcattgaatgcgtagatgacttccgggtggtttccttaaagctgctgcggacccatttcaagaaatcgcttgacgacgggaaggttagccgggtggagtttctccctgtacactggcattcctctctgggcggcgatgccactggtgtggacagaaacataaaaaaaatcacccttcccagcattggccggttcaggcattttacaaatgagacgctgctggacatactgttttacaattcccctacctattgccagacaattgtggagaaggtcggcatggagattaaccacctccatgctctgtttatgtccaggaatcccgactttaagggaggggtgtccgtggcggggcattctctcggctcccttatcctttttgatatcctgagcaatcagaaggatctcaaccttagcaagtgccccggccctcttgccgttgctaatggagttgtgaagcaactacactttcaggagaaacaaatgcccgaggagcccaagcttacgttagatgagtcttacgacctggtcgtcgagaataaggaggtcctgacactacaggagacacttgaggctttgtccttgtccgagtatttctccacattcgagaaagagaagattgacatggagagcctcctgatgtgtaccgttgatgatttgaaggaaatgggcatccccttgggtcccagaaagaagattgctaatttcgtggaacataaagcagctaaactaaagaaggctgcctccgagaagaaagccgtggctgcgacctcaacgaagggtcaagaacagagtgcgcagaaaacaaaagacatggcctccctgccaagtgagtccaatgaaccgaagcgcaaactcccagtgggtgcctgtgtgagctctgtttgcgtcaactacgaaagtttcgaagtgggggcggggcaagtgagcgtagcctacaactcactggattttgagccagagatcttcttcgcgctggggtcaccaatcgccatgtttttgacgattcggggcgttgaccggattgatgaaaactattctctgccaacgtgtaagggctttttcaatatatatcatccactggatccggtggcttacaggctcgagccgatgattgtccccgatctcgatctaaaggccgtgctgattccgcatcataagggtaggaagcgactgcacctggagctgaaggaaagcttgagccgaatggggtcagacctgaaacagggctttatttcaagtcttaaatccgcatggcagactctgaatgagtttgccagggcccatacgtcctccacacaattacaggaagaactggagaaagtcgcgaaccagatcaaagaagaagaggaaaagcaggtggtagaggccgaaaaagtggtggagtcgcccgacttctctaaggacgaggattacctaggaaaggtaggaatgcttaatggtggccgcagaatcgattacgtattgcaggaaaagccgatcgagtcatttaatgaatacttgttcgccttgcagtcccacctgtgctactgggaatctgaggacacagcattactgctattaaaagagatttaccgaaccatgaacatatcacccgaacagccacagcactag

SEQ ID NO: 26972 - DNA, 828 bp, synthetic construct
  source 1..828: mol_type = other DNA; note = Synthetic coding sequence
atgagcgccgaggtgaaggtgaccggccagaaccaggagcagttcttattgctcgctaagtctgccaagggggctgctctcgcaaccctcatacaccaggtgttagaagcaccaggggtttacgtcttcggcgaattgcttgatatgcccaatgtcagagaactggcggagagtgatttcgcatctactttccgtctactgaccgtttttgcttatggtacatatgccgactacctggctgaggctcgcaatctgccgccactgaccgaggctcagaagaacaaactaaggcatctatcggtcgtaaccttagccgccaaggtcaaatgcataccttatgccgtcttgttagaggccctggcgctgcggaacgtccggcagcttgaagatttggtgattgaggccgtctacgcagatgtgctaaggggttcacttgatcagagaaaccaaagactcgaagtcgattattcgatcggcagagacatccagagacaggacctgagcgctatagctaggaccctgcaagaatggtgtgtgggctgcgaagtggtcctgtccggtattgaagagcaggttagtagggctaaccagcacaaagaacagcagttgggcctgaaacagcagatcgagagcgaagttgcgaatttgaagaagacaatcaaggtgaccaccgctgccgcagcagccgctactagccaggaccctgagcagcatttgaccgagctcagagaacctgctccgggaactaatcagcggcagccttcaaaaaaggcaagtaaaggtaaaggcctgagaggatctgctaaaatctggtcaaagagtaactag

SEQ ID NO: 26973 - DNA, 240 bp, synthetic construct
  source 1..240: mol_type = other DNA; note = Synthetic coding sequence
atgaacggcaccctggaccaccccgaccagcccgacctggacgccatcaaaatgttcgtcggacaagtgcctcgtacctggtctgaaaaagaccttcgcgagctgtttgagcagtatggggccgtctacgaaataaacgttttgcgtgaccgctcccagaacccaccccaatcaaaggggtgctgtttcgtaacattctacactaggaaggcagccctcgaagctcagaacgccctttag

SEQ ID NO: 26974 - DNA, 738 bp, synthetic construct
  source 1..738: mol_type = other DNA; note = Synthetic coding sequence
atggtgctgctgcacgtgaagcggggcgacgagagccagttcctgctccaagcccctgggtccacggagctcgaagaactaaccgtacaggtagctagggtgtataatgggcgcctgaaagtacagcgtctttgctcagaaatggaagagctggccgaacacgggatctttctgccgcctaatatgcagggtcttacagatgaccagattgaagagctgaaactcaaagacgaatggggcgagaagtgtgtccccagcgggggagctgtgtttaaaaaggatgacattggacgtagaaatggccaggcacctaatgagaagatgaagcaggtgttgaagaagaccattgaagaggcgaaggcaataatctctaaaaaacaagtggaggcgggtgtttgcgtgactatggagatggtgaaggatgctcttgaccaacttagaggtgccgtaatgattgtctacccaatgggactgccaccatatgatcctatccgcatggaattcgaaaataaggaggatctgtcgggaacacaagcgggactgaacgtgataaaagaggctgaagcgcagttgtggtgggcagcaaaggagttgcggcgcacaaagaaactcagcgactacgtgggtaaaaatgaaaagactaagatcatcgcaaaaattcaacaagtatccacattctgcttcaacgtgagcgtggtgttcgtgatttccctgcaaaccgataagaatgtccagtag

SEQ ID NO: 26975 - DNA, 396 bp, synthetic construct
  source 1..396: mol_type = other DNA; note = Synthetic coding sequence
atggccatgaccgccggcaccaccaccaccttccccatgagcaaccacacgcgggagcgggtgactgttgcgaaactgacattggagaatttctattctaatctgatcctgcaacacgaagaacgagagacaagacaaaaaaaactggaggttgctatggaagaggagggcctggcagacgaggagaagaagctgagaagatcccaacacgctcgcaaagagaccgagttccttaggctcaagcgaactaggcttggtctcgacgatttcgaatcgctgaaagttatcgggaggggcgcgttcggtgaggttcgactggtgcagaaaaaagatacaggacacatttacgcgatgaaaattttacgcaaatctgacatgctggagaaagagcagtag

SEQ ID NO: 26976 - DNA, 2517 bp, synthetic construct
  source 1..2517: mol_type = other DNA; note = Synthetic coding sequence
atgaccggcgccgagatcgagcccagcgcccaggccaagcccgagaaaaaggcaggcgaggaagtcatcgccggtcctgaacgggagaacgatgtcccccttgtcgtccgtcccaaggtgaggacgcaagccaccacaggagctcgccctaagacagaaaccaagtcagtgcctgctgcccgtcctaaaactgaagcccaggcaatgagtggcgctaggcccaaaaccgaggtacaggtcatgggaggggcgagaccgaagacagaggcgcagggaattacgggagcacggccaaagacagacgcacgggctgtgggaggggcacgcagcaaaactgatgccaaggccatcccaggggcaaggcctaaggatgaggcccaggcttgggcccaatccgagttcggcaccgaggcagtgagccaagccgagggggtttctcagaccaacgctgtggcatggcccctggccactgctgaatcagggtcagtgaccaaatccaaagggcttagcatggatagggaactcgttaacgtggacgcggagacattccccggtacgcaaggtcagaaagggattcagccctggttcgggccaggagaagaaaccaacatggggtcctggtgctattcacggccgagagcacgcgaagaggccagcaacgagagcggattctggtccgctgatgaaacaagcaccgcaagctctttttggaccggggaagaaaccagtgtcagatcctggccaagagaggagtccaatacaaggtccaggcatcgtgctaagcaccagacaaaccctcgcagccggcccagaagcaagcaggaggcctatgtggatagttggtccggttccgaagatgaggcctcaaacccattttcattctgggtcggcgaaaatacaaacaatctctttcgccctcgcgtccgagaggaagccaatatacgatccaaactgcgcaccaatagagaagactgcttcgagtctgagtctgaggatgaattctataaacagtcctgggttctgcccggcgaggaagcaaactcacgttttaggcacagagacaaagaggatccaaataccgctctgaagctcagggcacagaaagacgtcgattccgaccgcgtcaagcaagagcccaggttcgaggaagaagtgatcattggcagttggttctgggcagagaaggaggcaagcttggaaggcggggcgagcgctatctgtgagtcagagccaggaacagaggagggtgccatcggcggttcagcctactgggctgaagagaaatcttctctcggagccgtagcccgggaagaggccaagccagaatccgaggaagaggccatctttggatcctggttctgggaccgcgatgaggcctgtttcgacctgaacccttgtcctgtctataaggtctctgatcgctttagagacgcagcagaagagctcaacgcaagcagccggcctcagacttgggacgaagttacagtggagtttaagcccggtctgttccatggggtggggtttcgttcgactagcccattcgggattcctgaagaagcctccgaaatgctcgaggccaaacctaaaaacctggaactgagccctgagggcgaagagcaggagtctcttctgcagccagatcaacctagccctgaatttacattccagtacgatccttcctaccggtccgtaagggaaatcagggagcacctacgagccagagaatctgctgaatccgagagctggtcctgcagttgcattcagtgcgagctgaaaatcgggtccgaggagttcgaagaatttctgctactcatggataaaatcagggatccctttatccacgagatatccaaaatcgccatgggcatgaggagcgcatcccaatttactagagacttcatcagggactcaggcgtagtgagtcttatcgaaaccctgctgaattacccatcttcccgcgtcagaaccagttttctggaaaatatgattcacatggccccaccctaccctaatctaaatatgatagaaacctttatttgccaggtatgtgaagaaacactggctcatagtgtggactcccttgagcagttgactggtattagaatgctgcggcacctgaccatgaccatagattatcacacgctgatcgcgaactacatgtccggatttctgtccctgctgaccactgccaatgcccgtacaaagttccatgtgcttaaaatgttgcttaatctctcggagaacccagctgtggctaagaagctgttttctgccaaggctttgtccattttcgtgggcctgttcaacattgaggagaccaatgacaacatccagattgttattaagatgtttcagaacatctctaatatcattaaaagtggcaagatgtctctgatcgatgatgactttagtttggagccacttatatctgccttccgggagtttgaggagctggcaaagcagttacaagctcaaatcgataaccagaacgatcccgaagtagggcagcagagctag

SEQ ID NO: 26977 - DNA, 1215 bp, synthetic construct
  source 1..1215: mol_type = other DNA; note = Synthetic coding sequence
atggacttcaacatgaagaagctggccagcgacgccggcatcttcttcaccagggccgtccaattcactgaggagaagttcggacaggctgagaaaaccgagctcgatgctcactttgagaatttactcgcacgggccgatagcactaagaactggacggaaaagatattgcgacagactgaggtgctcctacaaccaaacccgagtgcacgcgttgaggagtttctttacgagaaattggacaggaaggtaccaagtagagtgactaacggcgaactgcttgcgcagtacatggcagatgcagccagtgagttggggcccaccacaccttatggaaagacactgatcaaagtagccgaagcggagaagcaactgggagccgccgagcgggactttatccacaccgcgtcaattagcttcctgacgcccctcaggaattttctggaaggagactggaagaccatctcaaaggagcggaggctgctccaaaataggcgattggatctggacgcatgcaaagcacgtctaaagaaggcaaaggccgccgaagccaaagccacggcggaggggcccaccgtaccagacttccaggagactcgcccccgaaattacatcttgtccgccagcgcaagcgctctctggaacgatgaggtggacaaggctgagcaggagcttcgcgttgcccagacagagttcgatcgacaggcagaggtgacacgattgctgcttgaagggattagctccacccatgttaaccacctgaggtgccttcacgaatttgtcaaaagtcagacaacgtactatgctcagtgttaccgacacatgcttgatctgcagaaacaattagggagctcacagggcgctatttttcccggcactttcgtcggcaccacggaaccagcctctcctccactgtcctccacgagcccaactacggccgcagcaactatgcctgtcgtcccctctgtggcctccctggccccgcccggagaggcttcactttgtctcgaagaagtagcccccccggctagtggcactaggaaagctcgggtgctgtacgactatgaagccgcagactcttccgagctcgccctcctggcagacgaactgattactgtctactctcttccaggcatggatcctgattggcttatcggagaaagaggtaataagaaggggaaagtacccgtgacatacctggaactgctgtcgtag

SEQ ID NO: 26978 - DNA, 495 bp, synthetic construct
  source 1..495: mol_type = other DNA; note = Synthetic coding sequence
atgacctgctgccagaccagcttctgcggctaccccagcttcagcatatccggcacctgcgggagctcctgttgccagccaagctgttgcgaaacctcctgttgtcaacctaggtcttgtcagacaagtttctgtggcttcccttctttttctacctctggcacctgttcatcctcctgttgccagcctagctgttgcgagaccagctgctgccagccttcttgctgccaaatcagttcctgcggcacaggctgcggcatcgggggagggattagctatggccaagagggctcaagtggcgcagtgagcacacggatccgctggtgccgcccggattccagagtcgagggaacatacttgcccccatgttgcgtggtttcctgcacaccgcccagctgttgtcagctgcaccatgcccaggcgtcttgttgccgcccctcttattgcggacaaagctgttgccggccggtgtgctgttgtgagcccacttgttag

SEQ ID NO: 26979 - DNA, 846 bp, synthetic construct
  source 1..846: mol_type = other DNA; note = Synthetic coding sequence
atgctgaccaagctgcagatcaagcagatgatggaggccgccacccgtcagatcgaagagcgtaaaaaacagcttagttttattagtcccccaactccccagcctaaaactcctagcagctcacagcccgagagactgccaataggtaatacaattcagccatcacaggccgcaacctttatgaatgacgccatcgagaaggccagaaaggccgctgaactgcaggctcgcatccaggcccagctggccctaaaacccggcctgatcggtaacgctaacatggtgggcctcgcgaatctccatgccatggggatcgccccccccaaagtggagttaaaagatcagacaaagccaacgcctctgatacttgacgagcagggcagaacggtggatgccacaggtaaggagatcgaactgacccatcggatgccgaccctgaaggccaatatccgggctgtaaaacgggagcagttcaaacagcagctcaaggaaaaacccagcgaggacatggagagcaatactttctttgacccgcgggtgagcatcgccccgtctcagaggcagcgtagaaccttcaagttccatgataagggcaagtttgaaaagattgcccagcggttgaggactaaagcacaactggaaaagttgcaagcggaaatctctcaggcagctagaaaaaccggcattcacaccagtaccaggctcgccctaatcgccccaaagaaagagctcaaggagggtgatattcctgagatagaatggtgggattcctacatcatcccaaacggcttcgatctggggaaatcacaggagaggcgcttattttggaatcacaagtcctgttag

SEQ ID NO: 26980 - DNA, 693 bp, synthetic construct
  source 1..693: mol_type = other DNA; note = Synthetic coding sequence
atgcggggccacgagagcagcgtgttcagcatcagcgtgcacgcctccgggaagtacgctatcactacctcttctgatactgcccagctttgggacctggacacatttcagagaaaaagaaaactcaatatcagacagtctgtggggatccagaaggtattctttctgcccctgtcaaacaccatcttatcttgttttaaagacaactcgatattcgcttgggagtgcgatacactgttctgcaaataccaattacccgcacccccggagtcttcgtcgattctttataaagtgttcgcggtcactagagatggacgcatcctggcagcgggaggtaaaagcaaccacttacatctttggtgtctcgaggctagacaactgttccgtatcatccagatgcctactaaggtgcgagctatccgccacctggaattcttaccggactccttcgacgctggcagcaaccaagtgctgggcgtgttatcccaggatggaattatgaggtttatcaatatgcagacctgtaagttgcttttcgagattggtagtctggacgaaggcatttcgagctcggctatttctcctcacggacgttatatcgcgtctatcatggaaaatggcagtctaaacatatactctgtccaggcattgacgcaggagattaataaggaagaggtgagggcccaaaattag

SEQ ID NO: 26981 - DNA, 1212 bp, synthetic construct
  source 1..1212: mol_type = other DNA; note = Synthetic coding sequence
atggacagcaccatggacgacgccgtggccggcgacttcgccctgatcaataaactggatattcagtgcgatttaaagactttatcggacgacattaaggaatcacttgaatctgaggggaaaaatagtaaaaaggaagagccgcaggaactccttcagtcacaggattttgtcggcgagaagttaggttcaggggagccatctcacagtgtcaaggttcatacggtcccgaagcctggaaagggggctgatctgtcaaaaccaccctgtaggaaagccaaggaaataaggaaggaacggaagcggctgaagctcatgcagcagaaccctgccggcgagcttgagggctttcaggctcaaggccatccacccagcctttttcctccaaaagcaaagtctaatcagccaaaatcgttggaggacctcatttttgagtcacttcccgaaaacgcttcacataaactagaagtgcgggtcgttaggtcgagtccaccctcctcccaattcaaggccacactgttggaatcctaccaggtctacaaacgataccaaatggtgatacataaaaacccgccggacacgccaacagagtctcagtttacacgctttctctgttccagccccctagaggctgagacacccccgaacggccccgattgcgggtatgggagctttcatcagcagtattggttggatggcaaaatcatcgctgtgggcgtgattgatatcctgcccaactgcgtgagcagtgtgtacctctactacgacccagactattcattcctaagcctcggggtttacagcgccctgagggaaattgcttttaccaggcagctccatgaaaagacctcccagctcagttactactacatgggtttttacattcacagttgccctaagatgaaatacaagggccagtatcgtccatccgacctgctttgcccagaaacctacgtgtgggtgccaatagaacagtgcttgccatctttggaaaactcgaagtactgccggtttaaccaggacccagaggcagtggacgaggacagaagtaccgaacctgaccggctccaggtgttccacaagagggcaatcatgccctacggagtctacaagaagcagcagaaagatccctctgaagaagccgcagtgctgcagtatgcctcgttggttggacagaaatgcagcgagcgcatgctgttgtttcggaactag

SEQ ID NO: 26982 - DNA, 909 bp, synthetic construct
  source 1..909: mol_type = other DNA; note = Synthetic coding sequence
atgcccctgtacgagggcctgggcagcggcggcgagaagaccgccgtcgtcatagacttgggggaggcatttacaaagtgcggcttcgcgggtgaaaccgggccacggtgtatcatcccctctgtaattaagcgcgccggaatgcctaagccggtccgagtggttcagtataacatcaacacagaggaattgtattcctacctcaaggagtttatccatattctttactttagacacttgctggtgaatcccagggaccgccgagtggtgatcatcgagagtgtgctttgtccatctcactttagagaaaccctgacacgagtgctcttcaagtactttgaagttccatccgtccttctcgccccctcccatctgatggccctgctaacgctgggaatcaatagtgcaatggtgcttgactgtggctatagagagtctcttgtcctccctatctacgaggggatccctgttctgaattgctggggggccctcccgttgggaggtaaagccctgcacaaagagctcgaaacacagttgctagaacagtgtaccgtggataccagcgtggccaaggagcaatcccttccgagtgttatgggttctgtgcctgaaggcgttctagaggatatcaaggccagaacctgctttgtcagcgatctaaaaaggggactaaagatccaagctgccaagtttaacatcgatggtaataacgaacgtccatcccctcccccaaacgtggactatccccttgacggagagaaaatactgcatatactgggatctatccgtgattctgtagtggagatcttatttgagcaagataacgaagaacagagcgtggccactctcattctggactccctcatacagtgctgttcttgttgtccaggctggagcgctatggcatag

SEQ ID NO: 26983 - DNA, 378 bp, synthetic construct
  source 1..378: mol_type = other DNA; note = Synthetic coding sequence
atgagcagctgcgtgagcagccagcccagcagcaaccgggccgcccctcaggacgagctagggggtcgtgggagtagttcctcggagtcccagaaaccatgtgaggcactgcggggtctttcatcacttagcattcacttaggcatggaatccttcatcgttgtcaccgaatgtgagccaggctgcgccgtcgatttgggcctggcccgggataggccgctagaagcggatggccaggaagtgccgctcgatacatctggttcacaggctaggccccacctgtccggccgaaagctgtcactgcaagaacgaagccagggaggcctagcggcagggggatccctcgatatgaatggtagatgcatatgcccaagttag

SEQ ID NO: 26984 - DNA, 1161 bp, synthetic construct
  source 1..1161: mol_type = other DNA; note = Synthetic coding sequence
atggccgacagcctggagagcacccccctgcccagccccgaggaccggctggcaaagctgcacccttcgaaggagctgttagaatactatcagaagaagatggccgagtgtgaggcagagaatgaagacctgctgaagaagctggagctgtataaggaggcctgcgaaggacagcacaagctggaatgcgaccttcaacagagggaggaagaaatcgccgaactgcaaaaagctctcagtgatatgcaggtctgcctctttcaagaacgggagcacgtgctgcggctgtactccgaaaacgaccggctgcgcattcgcgagctggaagacaagaaaaaaatccagaacttattggcgctcgtcggcaccgacgcgggtgaagtcacatatttctgcaaggaacctcctcacaaggttaccatcttacagaaaactatacaagctgttggggagtgcgagcagagcgagagtagcgcctttaaggccgacccgaagatctctaaacgacggccatccagggagaggaaggagagtagtgagcattaccagcgggatatacaaaccctaatactgcaagtcgaggcccttcaagctcagctaggagagcaaacaaagctgtctcgggagcagattgaagggctgatcgaggacagacggatccacctggaggaaattcaggttcagcatcagcggaaccagaataagattaaagaactgaccaagaatctccatcacactcaagagctcctgtacgagtcaacaaaggacttcctccaactgaggagcgaaaaccagaacaaggagaagagttggatgctagaaaaagacaatctgatgtccaaaattaagcagtacagagtgcagtgtaaaaaaaaagaggataaaattggcaaggtgctgcctgtaatgcatgagtcccaccacgcccaatctgaatacataaagagtctgaaggacaagctcgtccaggaaaaaaagctgagcaacatgtatcaggaacagtgtatatctctggaggaagagcttgcaaggatcagagaagaggagggcatgcgacgtgaaatattcaaagatagaactaacaaaatgggaaagcgacttcaaatcatgactaagaggtatgaggccttagagcgtcgaaggattttggaggtcgagtag

SEQ ID NO: 26985 - DNA, 999 bp, synthetic construct
  source 1..999: mol_type = other DNA; note = Synthetic coding sequence
atggagtacctgggcggcggcagcgccctggacctgctgaagcccggtccattagaagagacttacattgcgacgattctgcgcgagattctcaagggcctggactatttgcacagcgaaaggaaaatccaccgggacattaaggcagcaaatgtgctcctgagcgagcagggagacgtgaagctggccgattttggagtcgctggacagttgaccgacactcagattaagcggaataccttcgttggaacacctttttggatggcacctgaggtgatcaaacaatccgcttatgactttaaagccgatatctggtctcttggtatcaccgccatagagctggccaaaggcgagccacccaattccgatttgcatccgatgcgtgtacttttcctgatccccaaaaatagcccaccaacgctggaggggcagcactccaagccctttaaagagttcgtcgaggcctgtctgaacaaggatccccgattccggccgactgctaaagagctgctgaaacacaagtttattacgcggtatacaaaaaaaacctcattccttaccgaactgattgacaggtacaaacgttggaagagcgagggacacggagaggagtcaagcagcgaggattccgacatcgacggagaagctgaggacggtgagcaaggcccgatatggacctttcccccaacgatccgcccaagtcctcatagcaagctacacaagggtacggctctgcactctagtcagaaaccggcagagccagttaagaggcagccaagatcccaatgtctgagcacactcgtcaggccagttttcggggaactgaaggagaaacataaacagagcggcggaagcgtcggtgccctggaagagctggagaatgccttctccctagctgaggagtcttgtcccggcatttctgataagctaatggtgcacctggttgaacgcgttcagcggttctcacacaacagaaaccatcttacctctactcgttag

SEQ ID NO: 26986 - DNA, 1524 bp, synthetic construct
  source 1..1524: mol_type = other DNA; note = Synthetic coding sequence
atggaggaggtggagcggcaggtgctgcccgaccccgaggtgctggaggctgtcggcgataggcaggacggccttcgggagcaactgcaggccccagttcctccagattccgtccccagcctgcagaacatgggcctactgctggacaagctggcaaaagaaaatcaggacattagacttttacaggctcaacttcaggctcagaaggaagagctccagtcacttatgcaccagccgaaggggctggaggaagaaaacgcacaattacgcggagcattgcagcaaggcgaggcattccagagagcactagaaagcgaattacaacagctaagggcaaggctgcaggggctcgaggccgactgcgtgcgcgggccggacggggtctgtctgtccgggggacgggggccacagggcgataaagccatcagggagcaaggacccagagagcaggaaccggaactgtcattcttgaaacaaaaagagcaactcgaagccgaggctcaggctctgcgccaggagttagaaagacaacgccgcctgctcgggagcgtccaacaagatctggaacgctcacttcaggacgcttcccgtggagaccctgctcatgcgggcttggcagagttgggtcatcggttagcacagaagcttcagggcctggagaattggggccaggacccaggtgttagtgctaacgcaagcaaggcatggcaccagaagtcacattttcagaattcccgcgaatggagcgggaaagagaaatggtgggacggtcagagggacaggaaagcagaacactggaaacacaagaaggaagaatctggccgggaacgcaaaaaaaactgggggggccaggaggatcgcgagcctgcaggacgatggaaagagggccgcccccgcgtagaggagtccggcagcaaaaaggagggtaagcgccagggacccaaggagcctccaaggaagtctggtagcttccatagcagtggagagaagcaaaagcagcctcggtggcgtgaagggaccaaggattcacatgacccccttccttcttgggctgagttgctgcggcccaaatatcgcgctccgcaggggtgtagcggtgttgatgaatgtgcgagacaagagggcctaacattttttggaacggaactcgcccccgttcggcagcaggaattggcttcgctactacggacttatctggcacggctcccctgggctggtcagttaactaaggagttacctctgtcaccagccttcttcggcgaggatggcatctttaggcacgaccgtcttagattccgagacttcgtggatgctttggaggactccctggaggaggttgccgtgcagcagaccggggatgacgacgaagtggacgacttcgaggatttcatcttttcccatttcttcggtgacaaagcactgaagaagcgctcgggcaagaaggataaacattcacaaagtccgcgcgcagccggacctcgagaagggcactcacactcacaccaccatcatcatcgagggtag

SEQ ID NO: 26987 - DNA, 2472 bp, synthetic construct
  source 1..2472: mol_type = other DNA; note = Synthetic coding sequence
atgaccctgctgagcagccagagcagcagcctggtggcccccagcggctccgtatccgcagagaaccctgagcagaggatgcttgagaaaagagcaaaagtcattgaggagctgctgcagaccgagagggattacatccgcgatctcgaaatgtgcatcgagcgtattatggtccccatgcaacaggctcaagttcccaacatcgatttcgaaggcctgttcggcaacatgcagatggtaatcaaggtgagcaagcagctactggccgctctggaaatttcagatgcagtggggcctgtgtttctcggacatagggatgaacttgaaggaacttataagatctactgccagaatcatgacgaggccattgccttgctggagatctacgagaaagacgagaaaatccagaagcatctccaggatagtttggccgacttaaagtcactctacaacgaatggggctgtacaaattacattaatctaggcagcttccttattaagcccgtgcagagagtgatgcgatatcccttattgctgatggagctgctgaatagcacaccagaatcccaccccgataaggtgccacttaccaatgcggtcctcgctgtcaaagagattaacgtgaacataaacgagtataagaggcggaaagatttggtgctcaagtaccggaaaggagacgaggactcactaatggagaaaatctcgaaactgaacatccattcaattattaaaaagagcaatcgagttagttcccaccttaagcacctgaccggttttgccccccagatcaaagacgaagtgttcgaggagacagagaagaatttccggatgcaggaaagactgattaagtcttttatcagggatctgagcctgtatctacagcacatcagagagagtgcctgcgtaaaggtcgtggccgcagtatcaatgtgggacgtatgtatggagcggggccaccgggatctggagcagtttgagagagtgcacagatatatcagcgaccagcttttcaccaacttcaaggaacggaccgaacgactcgttatctcacctttgaaccagttgctatcaatgtttactggacctcataagctcgtacagaaacgcttcgacaagctgttggatttctataattgcaccgagagagctgagaagctcaaagacaagaagacactcgaagaactgcaaagcgctcggaacaactacgaagccctgaacgcacaactactggatgaattaccaaagtttcaccaatatgcccaggggcttttcactaattgtgtccatggttacgctgaggcccactgcgacttcgttcaccaggcgctcgagcaactgaaaccactcctgagcttactcaaggtcgccggtagagagggcaatctcattgccatttttcacgaggaacactccagagtccttcagcagttacaggtgtttacattcttccctgagagcctgccagccaccaaaaagccttttgaacggaaaacaattgacagacaatccgccagaaaaccccttctgggactcccaagctatatgctgcagtcagaggagctccgggcatctctactcgctaggtaccctcctgagaagcttttccaggcagaacggaactttaatgccgcacaggacctggacgtgagtctcctggaaggggatctggtgggcgtgatcaaaaaaaaggacccgatgggcagccaaaacaggtggttgattgataatggcgtgacgaagggctttgtctacagcagtttcttaaaaccatacaatcccaggcgatctcacagcgatgcctcggtaggatcacactcgtcaaccgagtcggaacatggatcctcctcgccgcgatttccacgtcagaatagtggttctaccctaacatttaatccctcatcaatggcagtctctttcacaagtgggagttgtcagaagcagccccaggacgcaagccctcctccaaaggaatgcgatcaggggacgctgtcagcaagcctgaacccaagcaatagcgagagttctcctagccgttgcccctcagatcccgactcaacctcacagccgaggtcaggcgattcagctgacgtagcaagggacgtcaagcagcctaccgccaccccccgcagttacagaaatttccgtcatcccgagattgtggggtattctgtacccgggcgcaatgggcagtcacaggatttagtgaaagggtgtgccaggacggcccaagcacccgaggataggtcgactgagcctgatgggagcgaggcagagggtaaccaggtgtacttcgccgtttacacattcaaggctagaaatccaaatgagctgtctgtaagcgctaaccagaagctgaaaatcctagagtttaaagatgtgactgggaatacggaatggtggctggctgaagtcaatggaaaaaagggatacgtgccatctaattatattcgaaaaacagaatatacttag

SEQ ID NO: 26988 - DNA, 492 bp, synthetic construct
  source 1..492: mol_type = other DNA; note = Synthetic coding sequence
tgagacaagttccgggccagccccgactgcatcaccatcctgtgcaagcccaacgggcaagcaatcgcttggtatacaccaatccactggaaacaggcctgggagaaactggacgcagacgtggaatttaacagatgctctgttgtctctcctaccttcagaaaaagggtctttcaatggacagccagcacggccactataacgaaggaaaaacaggatcagcccaaaaaggatattagcaattaccaagtggagcaggcgcaagtgttgctaaagagagaaaaagagatccctccgaccgtgttccctaatcgctcaccctggtgtcagaatccgtacgtgagcgctcacccatactgtcccttaatcgagcctcacaacaccagcaccgccggcggccgcctggatcggcagccccgcacgcgcagcaccaggccaaatagggccagtggatctaagaaaaagaagacatctgagtcacaaaagcaatag

SEQ ID NO: 26989 - DNA, 771 bp, synthetic construct
  source 1..771: mol_type = other DNA; note = Synthetic coding sequence
atggccacccagcggaagcacctggtgaaggacttcaacccctacatcacctgttacatatgtaagggttatcttataaaaccaactactgtgaccgagtgtctccacaccttttgtaagacctgtattgtccaacactttgaggacagcaacgactgtcctaggtgtgggaatcaagtccatgagacaaaccctctcgaaatgctccgcttggataacaccttagaggaaatcatttttaaactcgtgcccggattgcgggaacaggaactcgaacgagaaagcgagttctggaaaaagaataagccccaagaaaacggtcaggacgacacatctaaggccgacaaacctaaggtggacgaagaaggtgatgagaatgaggacgataaggattaccaccgatccgatccccagatcgctatatgcttggattgcctccggaacaacggacagagcggcgataacgtggtcaaagggctgatgaaaaaatttattcggtgttcaacacgcgtgactgtcggcacaattaagaaattcctgtccttaaaactaaagcttccaagcagctatgagttggatgtgttgtgcaacggggagattatggggaaagaccacacaatggagttcatctacatgacccgctggcgcctgcggggggagaattttagatgtctgaattgctccgcctcccaggtctgcagccaggacggccccttgtaccaatcctatccaatggttctccagtatcgaccgcgaattgattttggatag

SEQ ID NO: 26990 - DNA, 2793 bp, synthetic construct
  source 1..2793: mol_type = other DNA; note = Synthetic coding sequence
atgagcgagttccggatccaccacgacgtgaacgagctgctgagcctcctgagagtgcacgggggcgacggggcggaggtgtatatcgatctactgcagaaaaatcggactccttatgtgacgaccactgtctcagctcatagtgctaaagtgaaaatcgcagaattcagtagaactccagaagacttcctgaagaagtatgacgaactcaaatccaaaaatactagaaatctggaccctttagtatatttgctgtccaaattgaccgaagataaggaaaccctccaatacctgcagcaaaatgccaaggagcgggccgaattagccgctgccgcagttgggagctccacaacctcaatcaatgtgcctgccgccgcttctaagatctctatgcaggagcttgaagagctgcggaagcagctcggttccgttgccaccggtagcacgctccagcagagtctagagttgaaaaggaagatgctccgggataaacaaaacaaaaagaattccgggcagcatctaccgatctttcccgcctgggtgtatgagagaccagcccttatcggcgacttcctgattggagctggtatctctacggataccgccctacccatagttttgctgcgttggaacttggccctatcacccaggctaaaatgcagcggggtaatcagtgcacactgtaaccttcacttgcccgggactctgccccttgccagccaggaatctgccgtggttgaggacctgttgtacgtactggtgggtgtggatggccgatatgtgagcgctcaacctctggccggacgacagtccaggacatttctggtcgaccccaaccttgatttgtctattcgggagttagttcatcggatccttcccgtggcggcgtcatacagcgctgttactagatttatcgaggagaaatcgtcatttgaatatggccaagtgaaccatgcattggctgcagccatgaggacccttgttaaggaacacctgattctggtgagccagctggaacaactacataggcagggcctgctgtccctacagaagttgtggttctacatccagcccgcaatgcggactatggatatcttggcctccctggccacatctgttgataagggtgaatgcctcggcggatcaacgctaagcctgcttcacgatagatctttctcctatacaggtgattcacaggcacaagaactgtgcttgtacctcaccaaagctgcatccgcgccttacttcgaggtgttagagaagtggatttatcgcggtattatccacgacccttatagcgagtttatggtggaagaacacgaactgcgtaaagagagaatccaggaagactacaacgacaaatattgggaccagaggtacacaattgtgcagcaacagattccttctttcctgcagaaaatggcagataaaatcttgagcacaggcaagtatcttaatgtggtccgcgaatgtgggcacgatgtgacctgtccagtcgcaaaagagatcatctacacactaaaagagcgggcttatgtggagcagatcgaaaaagccttcaattatgcctctaaagtgctcctagatttcctaatggaagagaaagagctcgtggcacatcttcgttctatcaagaggtactttttgatggatcagggcgactttttcgtgcatttcatggacctcgccgaggaagagctgcgaaaaccggtagaagatatcactcctccacgcctggaggcacttctggaacttgcgctgcggatgagcactgccaacactgatccattcaaggatgaccttaagatagatttaatgcctcatgacttgattacacagctgctgagggtgctggccatcgagaccaaacaagagaaggctatggcacacgccgatcctacggaactcgccctctctggcctggaagctttttcatttgactatatagtgaagtggccgctatcactcatcattaacaggaaggctctcacccgctaccagatgttattccggcacatgttttattgcaagcatgttgaaaggcaactgtgctcagtctggatttccaacaagacagctaagcagcattcactccatagcgctcagtggtttgccggagccttcacgctgaggcagcggatgcttaattttgtacaaaatatccagtattatatgatgttcgaagtgatggagcctacttggcatatcctcgagaagaatcttaagtcagcttccaacatcgacgatgtcctgggacatcacaccggatttcttgacacgtgtttaaaggattgcatgcttacaaatcccgaattacttaaggttttttccaaattgatgagtgtgtgcgtgatgtttaccaactgcatgcaaaagttcacgcagagtatgaaactagatggtgagctaggtggtcagacattagagcactccaccgtgctgggacttcccgcgggcgctgaggaacgggctagaaaggaactagcccgcaagcaccttgccgagcacgcggacaccgtccaattagtgagcggattcgaggcaactattaacaagttcgacaaaaatttctccgcccacctgttagacttattagctagactgagcatttattctacgtcagactgcgagcacgggatggcctcagtgataagccgcctagacttcaatggtttttacaccgagcgcttagagcggctgtccgccgagagatctcaaaaggccaccccccaggtgcccgtccttcggggaccaccagctcccgctccacgagttgctgttaccgcacagtag

SEQ ID NO: 26991 - DNA, 129 bp, synthetic construct
  source 1..129: mol_type = other DNA; note = Synthetic coding sequence
atgtgcctgctgcccatccgggtgaaggaggccgaggaggtgtgccggcagaagaagggaaagtctctttacaaaattaaacctcgccacgacagcggaatcaaagcgaagatttccatgaaaacgtag

SEQ ID NO: 26992 - DNA, 456 bp, synthetic construct
  source 1..456: mol_type = other DNA; note = Synthetic coding sequence
atggactgccgggagatggacctgtacgaggactaccagagcccctttgacttcgacgccggcgtgaacaagtcctacctatatctatcaccctccggtaattctagtccccctgggtcccccactctgcagaaatttggattgcttagaacagatccggttccagaagagggggaggatgtggctgccaccatctcagcgacagaaaccctgtctgaagaagagcaagaagagctacgtcgagagctggccaaggtcgaagaagaaatacagacactatcacaggtgttagctgcaaaagagaaacatctggcagaaatcaaacgcaagcttggaatcaactccctccaagaactgaagcagaatatagccaagggatggcaggacgtgaccgccacaagcgcacgtagcaagctgttagctgccgaaacagagttactatgtttgctctattag

SEQ ID NO: 26993 - DNA, 627 bp, synthetic construct
  source 1..627: mol_type = other DNA; note = Synthetic coding sequence
atgagcgccggcggcgacttcggcaaccccctgcggaagttcaagctggtgttcttaggcgagcagagcgtcggcaagacctctctgattaccaggttcatgtatgactcatttgacaacacttaccaggctactattggtatagactttctgagtaagaccatgtacctagaggacagaactgtccgcctgcagctatgggatacagcaggccaagagagatttagaagcctgatcccatcatacatccgtgattcaaccgtcgcggtcgtcgtgtatgatataaccaatctgaactccttccagcagactagtaagtggatcgacgacgtgaggaccgagcggggctcagacgtcattataatgcttgtcggaaataagactgacctggcggacaaacgccagatcacaatcgaagagggcgagcagcgggcgaaggaactctctgtgatgtttattgaaactagtgccaaaactggatacaatgtcaaacagctctttcgcagggtggcctctgctctacctgggatggaaaacgtgcaggagaaaagcaaagagggcatgattgatattaaacttgataagcctcaggagcctcctgcttccgagggtgggtgttcgtgctag

SEQ ID NO: 26994 - DNA, 1575 bp, synthetic construct
  source 1..1575: mol_type = other DNA; note = Synthetic coding sequence
atgaagcggagcagcgtgagcagcggcggcgccggccggctgagcatgcaggagctgagaagccaggacgtcaacaagcagggtctgtataccccacagaccaaagaaaaacctacgttcggtaagttgtctatcaacaaaccgaccagcgaaaggaaagtgtccctgtttggtaagcgtacgtccggacatggctctaggaatagccagcttggtattttctcgtccagtgaaaagataaaagatcccaggcccctaaatgacaaagcctttatccagcagtgcattcggcagctctgtgaattcctcaccgaaaatggttatgcccataacgtgtctatgaaatcgctgcaagctccaagtgtcaaggattttttaaagatcttcacattcctgtacggttttttgtgtccttcttacgagctacctgataccaaattcgaggaggaagtgccgcgtatcttcaaggacctcggctatcccttcgccttgagcaagtcatctatgtatacggtgggagcaccacatacctggccacacattgtggccgcgctcgtgtggctgatagactgcatcaagatacatacagccatgaaagagtcaagtccgctgtttgatgacggccagccgtggggagaggaaacagaggacggcattatgcataacaaactctttcttgattacaccattaaatgttatgagtccttcatgtcaggtgcggacagttttgatgagatgaacgctgaacttcagtccaagttgaaggatctgtttaatgtcgacgccttcaaactcgaatctcttgaggccaaaaaccgcgcactgaatgagcagatcgcacgtcttgagcaggagcgagagaaagaaccgaatagattagagagtttgcgcaagctaaaagccagcctgcagggggatgtgcagaagtaccaggcatatatgagcaaccttgaatctcacagcgctattcttgatcaaaagctaaatggcctcaatgaagagatcgctcgcgttgaacttgagtgtgagaccatcaaacaggaaaacactcgccttcagaatatcatcgataatcagaagtattcagtcgcagacattgaaaggataaatcacgagcgcaacgagctgcagcagacgatcaataaactgacgaaagacttagaggccgaacagcagaaactctggaacgaggaattgaagtatgcgcgggggaaagaggcaatcgagacacaactagccgaataccataagctcgcaagaaaactcaagctaatccccaagggagcggagaacagtaagggatatgatttcgagatcaaattcaaccccgaggccggggccaactgtcttgtgaaataccgcgcacaggtgtacgttccacttaaggagttattgaatgaaaccgaggaggaaattaacaaggcactgaataaaaaaatgggtcttgaagatacacttgagcagctcaacgccatgattaccgagtcaaagcgaagcgtaaggacgttgaaagaagaggtgcagaagttagatgatctttatcagcagaagattaagaaggagcgtaagaaatag

SEQ ID NO: 26995 - DNA, 1248 bp, synthetic construct
  source 1..1248: mol_type = other DNA; note = Synthetic coding sequence
atgatgctgggccccgagggcggcgagggcttcgtggtgaagctgagagggctgccctggagttgttccgtggaagatgttcagaacttcctgtctgattgtacaatccacgacggcgctgccggggtccactttatctacacacgcgaaggcaggcagtcaggcgaggcatttgtggaactgggttctgaggacgatgtaaaaatggctctcaagaaggaccgagagtccatggggcaccgctatatcgaggtgttcaagtctcatcgaactgaaatggactgggtgctcaaacacagtggccctaattccgctgatagtgcaaacgacggattcgttcggctcagaggtcttcctttcggatgcactaaggaggagatagtacagtttttttcgggccttgagatcgtgcctaacggaataacactgccggtggaccctgagggcaaaattactggagaggcttttgttcagtttgcatctcaggagctggccgaaaaggccctaggaaaacataaggaaagaattggacaccggtatattgaagttttcaagtctagtcaggaggaagtgaggagttatagcgaccctcctctgaagttcatgtccgtacaacgtccagggccatacgacaggcccggcaccgctagaaggtacatcgggattgtgaagcaggcagggcttgaaagaatgagaccaggggcatatagtacaggatacgggggctatgaggagtactctggcctgtccgatggctacgggttcaccacagacctattcggccgcgacctgtcgtactgtctgagcggaatgtacgaccatcgctacggagactccgagtttaccgttcagagtacaactggccactgcgtccacatgagaggactgccatataaagcaaccgagaatgacatttacaacttcttctcacccctgaaccctgtccgggtgcatatcgagattggacctgatggccgggtgaccggggaagccgacgtggaattcgctacccatgaagaggctgtcgcagccatgtccaaagatcgtgcaaatatgcagcatagatatatagagttattcctaaatagtacaaccggggcgagcaatggtgcctattccagccaggttatgcaaggtatgggtgtttctgccgcgcaggctacctacagcggcctggagagtcaatccgtaagcggatgttatggcgcaggctattcaggtcagaattcaatgggaggttacgactag

SEQ ID NO: 26996 - DNA, 1512 bp, synthetic construct
  source 1..1512: mol_type = other DNA; note = Synthetic coding sequence
atggccagcaaccacaagagcagcgccgcccggcccgtgagccggggcggtgtgggactgacaggtcggccacccagcggtatccgacccctgtccggcaatattagggtcgccactgcgatgccccctggcactgcaagaccaggaagccgcggctgcccaatcggtaccggtggggttctctcttcacagattaaagttgctcataggcctgtgacacagcaggggctgaccgggatgaagaccgggacaaaagggccgcagagacaaattttagacaaatcatactaccttggcctgcttcgctcaaaaatctccgaactgactaccgaggttaacaaactacagaaggggattgagatgtacaaccaggagaacagtgtctatctatcgtacgaaaagcgcgctgaaactctcgccgtagaaatcaaggagctccagggtcagcttgctgattacaacatgttggtggataagttgaataccaacactgaaatggaagaggtgatgaacgattacaatatgttaaaggcccagaatgaccgtgaaacacaatcactcgacgtcatctttacagagcggcaagccaaagagaagcagatcaggtctgtagaggaggagatcgaacaggagaaacaagctaccgacgacatcatcaaaaacatgtcttttgagaatcaggtgaaatacttggaaatgaagacgacgaacgagaagctgcttcaagagctagacaccctgcaacagcagttggatagccagaacatgaagaaagagtcactagaggcagaaattgcccactctcaggtcaaacaggaggcggttctgctccacgagaagttgtatgaactggagtcacacagggaccaaatgatcgcagaggataaatccattggtagtccgatggaggagcgcgagaagctgctgaaacagattaaagatgataaccaggagatagccagtatggagaggcagctgacagacaccaaagaaaagatcaatcagttcattgaagagatccggcagttagacatggatctagaagagcaccaaggagagatgaatcagaagtacaaggagttgaagaagcgcgaggaacacatggacaccttcatcgagacctttgaagagacaaagaaccaagagttaaagaggaaggcgcaaatcgaggctaatatagtggccctgctggagcactgttctaggaatataaaccgcatcgaacaaatctcctcgatcacgaaccaggaactcaagatgatgcaggacgatcttaactttaagagcaccgaggttcagaagagccagagcacagcccagaacctcacaagtgatattcagcggctccagctggatctgcagaaaatggagctcttggagtctaaaatgaccgaagaacagcactcacttaagtctaaaattaaacagatgaccacagacctcgagatctataatgatctacccgcacttaagtctagcggggagaaaaagaagaagaaaaagaagaaatag

SEQ ID NO: 26997 - DNA, 1461 bp, synthetic construct
  source 1..1461: mol_type = other DNA; note = Synthetic coding sequence
atgacctgcggcagctactgcggcggccgggccttcagctgcatcagtgcatgcgggccccggcctgggcggtgctgcatcaccgctgccccttatcgcggaatcagctgctaccgcggcctcacagggggcttcgggagccatagtgtttgtggcgggtttagagctggatcatgcggccgttccttcggatatcgcagcggaggcgtatgtgggccatcacccccgtgcataacgacggtgagcgtgaacgaaagtctccttaccccgcttaacctcgaaattgacccaaacgcccagtgcgttaaacaagaggaaaaggagcaaattaagagtctcaatagtcggtttgctgccttcatcgacaaggtgcgattcctggaacagcagaataaactcttagagaccaagctgcagttttatcagaatagagagtgctgccagagcaacctagagcctctgttcgagggctacattgaaacactcaggagagaagctgagtgcgtggaagccgattcaggacgcctcgccagtgagttgaaccacgtccaggaagtgttagaggggtataaaaagaagtatgaagaggaggtgagtcttcgagcgacagccgaaaatgagtttgttgccctgaagaaggatgttgattgcgcctatcttcgtaaaagcgaccttgaggcaaatgtcgaagccttgatacaagagattgactttctccgtcgactctatgaggaggagattagagttctgcagtcacatatctccgatacctcagtggtcgtgaagctagacaactcgcgggacctcaacatggactgtattatcgctgagattaaagcgcagtatgatgatatcgtcacaaggagtagggccgaggctgagtcatggtatcgctccaaatgcgaagaaatgaaggccacagttatccgtcatggcgagactctgcggaggacaaaagaggaaatcaatgagctcaatcgtatgatccagcgcttgaccgctgaggtggaaaatgcaaaatgccagaacagtaagcttgaggctgcagtggcccagagtgagcagcagggggaggccgccctctcggatgcacggtgtaagctcgccgagctagaaggggcactccaaaaggcaaagcaagatatggcgtgcttgataagagagtaccaggaggtgatgaattctaaattggggctggacatcgagattgcaacttataggaggctcctggagggcgaggagcagaggctgtgtgagggtgtcggatctgtgaatgtatgtgtgagttcaagtagaggtggggtcgtttgtggagatttgtgcgcctcgacgaccgctcctgttgtttctacacgagtgagctccgtgccttcgaacagcaacgtggtagtggggacgaccaacgcctgcgccccctccgctcgagtaggtgtttgtgggggaagctgtaagcgttgttag

SEQ ID NO: 26998 - DNA, 1011 bp, synthetic construct
  source 1..1011: mol_type = other DNA; note = Synthetic coding sequence
atgtgcaccatgcacaaggacgagaaggccaagcgggaggtgagctcatggaccgtggaaggcgatattaacacagatccctgggcagggtaccgctatactggcaagctccgccctcactacccccttatgcccactcgcccggtcccgtcatacatacagcggcctgactacgccgatcatccactcgggatgtctgaatctgagcaggcccttaaggggaccagccagattaagctcctgtccagcgaggatatcgaggggatgaggctggtgtgcaggctggctcgggaggttctggatgtagccgccgggatgattaaaccaggcgttaccactgaggaaatcgatcacgcggtccatctggcttgcatcgccagaaattgttacccttctcctctaaactattataacttccccaaatcgtgttgcacatcagtaaatgaggttatctgccacggaatccccgatcggcgccctctccaggaaggggacatcgtgaacgtggacataacattatacagaaatggctatcatggggacctaaatgagacattctttgtgggagaggtggacgacggcgctcgaaagcttgttcagaccacgtatgaatgtttaatgcaggcaattgacgccgtgaaacctggtgtgcggtacagggaactgggaaatatcatccagaaacatgctcaggctaatggcttttccgttgtgcgctcttactgcggacacgggattcataaactgttccataccgcgcctaatgtcccccactacgccaagaacaaagctgttggtgtaatgaaaagtgggcatgtgtttaccatcgagcctatgatatgcgaaggaggctggcaggatgagacctggcctgacggatggacagccgtaaccagggacgggaagaggtctgctcaattcgagcatacccttctggtgacagacactggctgcgagatcttaacccggcggctggattcagcgcgcccgcatttcatgtcacaattctag

SEQ ID NO: 26999 - DNA, 3102 bp, synthetic construct
  source 1..3102: mol_type = other DNA; note = Synthetic coding sequence
atggccggcatgatcgaccggttcagccccgccaacaccggcatccgcagctgggatgtggacccgggcgtctgtaacctggatgagcaactcaaagtgttcgtgagtagacattcagctacgttcagcagcattgtgaagggtcagaggagcttacaccatagaggggacaatttagaaaccctggtgttactcaacccttccgataaaagcttatacgatgagcttcgaaacttactcttagatccagccagccacaaactgctggttcttgcaggaccttgtctggaggaaactggggagctgctgcttcagacaggaggtttcagcccacatcactttttgcaagtgctgaaagaccgagaaattcgcgatattttggctactacacctcccccggttcagcctcccattctaaccatcacttgcccaacttttggcgattgggcacagctggcccctgccgtgcctggcctgcagggcgccctgagattgcagcttcgacttaacccaccagctcagttgcccaactcagagggtctttgtgaattcctggagtacgtggcagagtccctggagcctccctccccgtttgagctcctggagcctccaacatccggtggctttctcaggctaggtcgcccgtgttgctacatattccctggcggcttgggtgacgctgcattttttgctgtgaatggctttaccgtcctggtgaatggcggctcaaatcctaaatcctccttttggaaactggtgaggcatctggacagggtggatgccgtgcttgtgacgcacccaggtgcagattcactgccaggtctaaatagcttgcttcggcgaaagcttgccgagagaagtgaagttgccgctggtggtggctcatgggatgacaggttaagacggctcatcagcccaaaccttggagtcgttttttttaacgcctgtgaagctgcctctcggctcgctcggggcgaagacgaagcggaacttgctctcagccttctagcgcagctggggattactccactgccattgagcagaggaccagtgcctgctaagccaacagtgctgtttgagaagatgggtgtaggacggcttgacatgtatgtcttgcaccctccctctgcaggagcggagcggacactcgccagcgtctgcgcccttctcgtgtggcatccagctggtccaggcgaaaaggttgttcgagttctgtttccaggatgtaccccccccgcctgtcttttggatggtctggtccgcctgcagcacctcaggttcttgcgagaaccggttgttaccccgcaggacctggaaggccctggtcgggccgagtctaaagaatccgtgggaagtcgggacagttctaagagagagggactgctggccacacaccctcggcccggacaggagcgccccggcgtagcccggaaagagccagcacgggccgaggccccgcgaaaaactgagaaagaggcgaaaacccctagggagttaaagaaggacccgaagccaagcgtctcccgaacgcaacctcgcgaagtgaggagggccgcctcttcagttccgaatctgaaaaagaccaatgcacaagccgcccctaaaccacgtaaagctcccagtacgagtcacagcggcttcccccccgtggcgaatggtcctcggtctcctccttcactgcgatgcggtgaggcctctccaccctctgccgcgtgcggctccccagctagtcagttggtggcgacgccgtcactggaacttgggccaatacccgcgggtgaagaaaaagccctcgagctgccactggcagcttcctctatcccacgccctcgaaccccttcccccgagtctcataggtcgccagcagaggggagtgagcggctgtcactcagtccgctgcgagggggcgaagcaggaccagacgcctccccaaccgtgacgacccccaccgtgaccactccatccctgcctgcagaggttggaagtccacattctaccgaggttgacgagagccttagcgtgtcatttgagcaggttctgcccccctctgcgcctacatccgaggcaggcctgtccttacctttaagaggtcctagggccagaagaagcgccagtcctcacgacgtggatttgtgcctggtgtctccgtgcgagtttgaacaccggaaggcagtgcctatggccccagcaccagcttctcccggatcttctaacgactcttctgccagatcacaggagcgtgccggggggctgggtgccgaagaaacacctcctacatccgtcagcgagagtttgcccactttgtcagactccgatcctgtgcccttggcgccaggggcagctgactcggacgaggatactgaggggtttggcgtgccacgacacgacccgttgcctgatccattgaaggttccccctcccctgcctgacccttcgtctatctgtatggttgaccctgagatgctgcctcccaagaccgcccggcagaccgaaaatgtttcccgcacgaggaagcccctggcccgccctaattcgcgagctgccgcccctaaggcaactccggtagccgctgcaaaaacgaaggggctagccggcggggacagggcctccagacccctttccgcacggtcagaaccgtcagagaaaggtgggagggcccccttgagtcgcaaaagttcaacacctaagacagccacccgaggaccttcaggaagtgcatcgtcgcggcccggcgtgtcagctaccccacccaaaagcccggtgtacctggatttggcatatttaccctctggcagctctgctcacttagttgacgaagagttcttccaacgggtgcgagctctttgttacgtaatatcaggccaggaccaacgcaaagaagaaggaatgcgcgccgtgctggatgctcttctcgcatcaaagcagcactgggatcgggacctgcaggtgacgctgatccctacttttgatagtgttgccatgcacacttggtacgcagagacccatgcccggcaccaggcacttggcattaccgtcctggggtctaactctatggtcagtatgcaggacgatgcatttcccgcatgtaaagtagaattttag

SEQ ID NO: 27000 - DNA, 2223 bp, synthetic construct
  source 1..2223: mol_type = other DNA; note = Synthetic coding sequence
atgcgggacctggagggctaccgggagacccggtaccagctgctgcaactgcgccccgcccaaagggccagctggatcggttacgccatcgcttaccacctgctggaggactatgaaatggccgcaaagattctggaggagttccggaagacgcagcaaacttcccccgataaggtggattatgagtactctgagttgttgttgtatcagaatcaggtgctccgtgaagccggtctgtacagagaagcgctagaacacctgtgcacttatgagaagcagatttgcgataagctggcggtcgaagaaaccaagggggagttactcttgcagctttgtcggcttgaagatgctgccgatgtgtacaggggactgcaggagaggaatccagagaattgggcctattacaaggggctggaaaaagcattaaaacccgccaatatgcttgagagattaaaaatttacgaggaggcatggactaagtacccaagaggattagtgcctcggcgcctcccgctgaacttcttgtcaggggagaagttcaaagagtgtttggacaaatttctacgcatgaatttttccaaaggatgcccccctgtgtttaacacccttcggagcctctacaaggataaagaaaaggttgctattattgaggagttggtagtgggctatgaaacatcactcaagtcctgtcggctgttcaaccctaatgacgatggaaaagaagaacccccaacaactctgctgtgggttcagtattatctggcccagcattatgataagataggtcaacccagcatagccctggagtatataaacacggcaattgaatccactccgaccctgatcgagctatttctcgtgaaagccaagatctacaaacatgccgggaacatcaaggaggcggcaagatggatggacgaggcccaggcactggataccgcagacagatttatcaacagcaaatgcgcaaaatacatgttgaaggccaatctgattaaagaggccgaagagatgtgcagtaagtttacaagagagggcacctctgcagtggaaaaccttaacgaaatgcagtgcatgtggttccagaccgagtgtgctcaggcatataaggctatgaacaaattcggcgaggcactgaagaaatgtcacgagatcgaacggcattttatcgagataaccgatgaccaatttgactttcacacttactgtatgcgaaagatcacgctgaggtcctatgtggatctccttaaactggaggacgtcctcaggcagcacccgttctacttcaaagcggccaggatcgcgatagagatatatctcaagctgcatgacaacccactcactgatgaaaacaaagaacacgaagcggacactgctaatatgtcggataaagagctgaaaaaacttaggaacaaacagcggcgtgctcaaaagaaagctcaaattgaggaggagaagaaaaacgcagaaaaggaaaagcaacaaaggaaccaaaagaaaaaaaaagacgatgacgacgaggagatcgggggccctaaagaagagctgattcccgagaagctggcaaaggttgagaccccactggaggaggccatcaaattcctcaccccgttgaagaacctggtgaaaaataagatcgaaactcacctgtttgcctttgaaatttactttcggaaagaaaaattcctacttatgttacaatcagtaaagagggccttcgccatagactcttcacacccttggctgcacgaatgtatgatacgcttgtttaacacagccgtatgcgagtccaaggatttaagcgacactgtacggacggtcctcaagcaagaaatgaatcggttatttggagcgacaaacccgaaaaacttcaacgaaacattccttaaacggaattccgactccctgccgcaccgactgtccgctgcaaaaatggtgtattaccttgacccttcttcccaaaagcgggccatcgaattagctactacgcttgatgagtctttaaccaacaggaacctgcagacatgtatggaggtactggaagctctgtacgacggatctttaggcgactgcaaagaggcagcggaaatttacagggcaaactgccataaactctttccttacgccctggccttcatgccgcctggttatgaagaagatatgaaaattaccgttaacggggacagtagtgccgaagcggaagaattggctaacgaaatttag

SEQ ID NO: 27001 - DNA, 183 bp, synthetic construct
  source 1..183: mol_type = other DNA; note = Synthetic coding sequence
atgagctgcaccatcgagaaggccctggccgacgccaaggccctggtggagcgcttgcgggatcatgacgacgccgcggagtctttgatagagcagactaccgcacttaacaagagggtcgaagcgatgaaacagtaccaagaggaaatccaggagcttaacgaggttgcccggcacaggtag

SEQ ID NO: 27002 - DNA, 1419 bp, synthetic construct
  source 1..1419: mol_type = other DNA; note = Synthetic coding sequence
atgggcaaggagcaggagctgctggaggccgcccggaccggccacttgcccgcagttgaaaaactgctatctggaaaacgccttagctccggtttcggcgggggtggcggaggtggaagtggcggtggcggaggaggctctggaggtggcggaggcggtctcgggagttcatcacacccattgagcagcttgctgagcatgtggagaggccccaacgtaaactgcgtggattccacaggatatactccactccatcatgccgctctgaacggtcataaggacgttgtcgaagttctccttcgcaatgatgcactcactaatgtggccgactcgaaggggtgttatcccctgcatctcgcagcatggaagggggacgcccagatcgtaagactcttaatccatcagggcccttctcacaccagagttaatgagcagaataatgacaatgaaaccgctctgcactgcgctgcccagtatggacacacagaggttgtcaaggtcctgctcgaggagctcaccgacccaactatgcgcaacaataaattcgagacacctttagatctggcagccctctatggacgtctggaggtcgttaagatgcttctgaacgcgcacccaaacctgctctcctgcaatacaaagaagcacaccccccttcacctggccgctaggaacgggcataaagctgtggtgcaagtgttgctggatgctgggatggactcaaattaccagaccgagatgggtagtgctctgcacgaagctgcactgtttgggaagaccgatgtggttcagatcttgctggcagctggcaccgacgtgaacatcaaggacaaccacggcttaactgctcttgacaccgtaagagagttgccatctcagaaaagtcagcagatcgcggcccttattgaggaccatatgacggggaagagatccaccaaagaagtggataagactccaccccctcaaccgccactgatctcaagcatggactctatcagccagaagtctcagggcgatgtggaaaaggcggtgaccgagctgattatcgacttcgacgccaacgccgaagaagagggaccttatgaggcactgtacaacgctatttcctgccattctttagactcgatggccagtgggagatccagcgaccaggactcaaccaataaggaggcagaagcagccggagtgaaaccagccggagtgaggcctcgggagcgcccccccccaccagctaaacctcccccggatgaggaggaggaggaccatattgataaaaagtacttccccctaacagccagtgaagtgctctccatgcggcccaggattcacggctctgcagcccgggaagaggacgagcacccatacgaactgctcctaacagcagaaaccaaaaagaaaaagaagaagaagaaaaaatag

SEQ ID NO: 27003 - DNA, 1392 bp, synthetic construct
  source 1..1392: mol_type = other DNA; note = Synthetic coding sequence
atgagcggcggcaccccctacatcggcagcaagatcagcctgatctcaaaggccgaaatccggtatgagggtatcctctataccatcgacacagagaatagcacagtggcgctcgccaaagtcaggtcgttcgggactgaggacagaccgaccgacagacctataccgcctcgggatgaagttttcgaatacataatctttcgtgggtctgacataaaggaccttactgtttgcgagccccccaaaccccagtgcagccttccccaggaccctgctatcgtgcagagctccctcgggtcttctacatcctccttccaaagcatgggctcctatggcccttttgggagaatgcccacgtactcgcagttctcccctagctccttggtgggccagcagttcggagccgtcggggtggccgggtcctccctgacaagctttggcacagagaccagcaattccggcacccttccccagagcagcgccgtgggcagcgcttttacacaagacaccagaagcctgaagacacaactgagtcagggccgatcaagcccccagctggacccacttagaaagagtcctactatggagcaagccgtgcagaccgccagtgcacatttgccagctccggcggctgtaggacgaagaagtcccgtatcaacaagacctcttccctctgcgagtcaaaaagctggtgagaatcaggagcatcggagggccgaagtccataaagtttccaggcccgagaacgaacaacttaggaacgacaacaagagacaggtggccccgggcgcccccagcgccccccgccgcggcagaggaggccatagagggggccgggggaggttcggtattcgtcgcgatggccctatgaagttcgagaaggactttgacttcgagagcgctaatgcacagttcaataaggaggagattgaccgagaatttcacaacaagctcaaactcaaagaggataaactcgagaagcaggagaagccggtgaacggagaagacaaaggtgattccggcgttgatacccagaacagcgaaggtaacgccgatgaggaggacccgctcggaccaaattgctattatgataagactaagtctttctttgataatatttcatgcgatgataaccgagagaggcgccccacctgggctgaggaacggcggctcaatgccgaaacctttggaattccgctccgccctaacaggggaaggggagggtaccgaggacgcggagggctcgggttccggggcggacggggccgcggcggcggccgcggagggaccttcacggcaccccgtgggtttaggggcggctttagaggcggccgtggaggtcgcgaattcgccgactttgagtaccgcaaggataacaaagtggccgcctag

SEQ ID NO: 27004 - DNA, 1287 bp, synthetic construct
  source 1..1287: mol_type = other DNA; note = Synthetic coding sequence
atgggcggcggcgtgggcgccagcagcagcggcggcggccccggcggcagcggtggtgggggtagcggagggccgggagctggaacctcttttccaccaccgggcgtgaaactgggccgggatagcgggaaggtcaccacagtagttgccacactgggccagggccccgagcggtcacaagaggtggcgtacacggacattaaggtcatcggcaacggatcattcggtgtggtttatcaggctaggctggcagagactagggagcttgtggccatcaagaaggtgctgcaagataagagattcaaaaatagggagttacagataatgagaaagctggatcactgcaacatcgttcggcttcggtacttcttctattccagtggcgagaagaaagatgagttgtacctcaacctggtgctggagtacgtgccagaaaccgtatatagggtggcaaggcattttacgaaggctaagctcacaatccccatactgtacgttaaagtgtacatgtaccagctctttaggtccctcgcttacatccactcccagggcgtttgccatcgagacatcaaaccccagaatttactagtagatcctgataccgcagtactcaagctctgcgattttggtagtgccaaacagctggttagaggagaacctaatgtttcctacatttgcagccgctactaccgagcccccgagctgattttcggagccacagactatacctcttccatcgacgtgtggagcgcgggatgtgttttggctgagttgcttttgggccagcccatttttcccggggactctggggtggaccagctcgtggagatcattaaggttctgggtacgcccaccagggaacagattcgagaaatgaatcctaattacactgaattcaaatttccccaaatcaaggcacacccgtggactaaagtgttcaagtcacggacaccaccggaggctatcgccttgtgctcctctttgctggagtacacacccagcagcaggttatctcctctggaagcttgtgcccactccttttttgatgaattacgttgtttaggaacacagctccctaataaccgaccactgccacctttgtttaatttttctgccggcgagctctcaattcagccaagtctgaatgcgatcctgatacctccccatttacgtagcccggcagggaccacaactcttaccccgtcctctcaagcgctgaccgaaactccaacctcatctgattggcagagtactgacgccacaccaacactaaccaactcctcctag

SEQ ID NO: 27005 - DNA, 657 bp, synthetic construct
  source 1..657: mol_type = other DNA; note = Synthetic coding sequence
atggacgccgagcaccccgagctgcggagctacgcccagagccaggggtggtggacaggagagggagagttcaatttctctgaggtgttttcccccgttgaggatcacttagactgcggagcaggaaaagacagcttggagaagcaagaagagtcaattactgtgcagacaatgatgaacaccctgagggacaaagcttccggagtttgcatagatagcgagtttttcctcactactgcaagtggcgtgagcgtgctgccccagaataggtccagtccatgcatacactattttaccggcacacctgaccctagcaggtccatttttaagccttttatcttcgtcgacgatgtgaagctcgtacctaagactcaatccccgtgtttcggtgacgatgaccctgccaagaaagaaccacgctttcaggaaaagcctgatcgtcggcacgagctgtacaaggcccacgagtgggctagagcaattatagagtcggaccaggagcaaggtcggaaactcagaagcacgatgttagaactcgagaagcaaggtcttgaggccatggaagagatactcacaagtagcgagccacttgaccctgctgaggtaggggatttattttacgactgcgtggacaccgagattaagttctttaagtag

SEQ ID NO: 27006 - DNA, 573 bp, synthetic construct
  source 1..573: mol_type = other DNA; note = Synthetic coding sequence
atggccctgctggccgagcacctgctgaagcccctgcccgccgacaagcagatcgagaccggtcccttcctggaagcggtgtctcatctcccgccattctttgactgcctgggaagcccggtgttcactccaattaaagctgacatctctgggaatatcactaaaattaaggctgtgtacgataccaatcccgcaaaatttagaaccctccagaacatcctcgaggtcgagaaagaaattgggctcagatttattcaggtgttcctgcagtctatctgtgatggcgaaagggacgagaatcatccaaacctgatccgggttaatgccacaaaggcttatgagatggccctgaagaaataccacggatggatcgtacagaaaatattccaggcggccttgtacgcggcaccatacaaaagcgacttcctcaaggctctgagcaaaggacagaacgtcacggaggaggagtgtttagaaaagatacggctgttcctggtgaactatacagctacaatagatgtgatttacgaaatgtacacacaaatgaacgctgagttaaactataaagtgtag

SEQ ID NO: 27007 - DNA, 762 bp, synthetic construct
  source 1..762: mol_type = other DNA; note = Synthetic coding sequence
atgagcatctgcagcagcctggcccggaagttccccaagctgaccataattggcgaagaggacctccccagtgaggaggtcgatcaggaactgatcgaagatagtcagtgggaggaaattttgaagcagccgtgcccctctcagtacagcgcgatcaaggaggaggatctagtagtgtgggttgacccattggatggcacaaaagagtatactgaaggtttactggataacgtcaccgtcctcattggaatcgcctatgagggtaaggccatcgcaggtgtgattaatcagccatactacaattatgaggcaggcccagatgccgtgctcggaagaactatatggggggtactgggtttgggtgcattcgggttccagctcaaagaggtgcctgctggtaaacatatcattacaaccacgcgctctcattctaataagctggtgaccgactgcgtcgctgcaatgaacccggacgcagtgcttagggtgggaggtgcaggaaataagatcattcaactgattgagggaaaggctagcgcctacgtttttgcctctcctggctgtaagaagtgggacacttgtgcgccggaggttatcctccatgcagtcggaggcaaactgaccgatatacatggcaacgtactacagtatcacaaagacgtgaagcacatgaactctgcaggtgtcctggccaccttacgcaactatgactattatgcgtcaagagtgcccgagagcatcaagaacgcccttgtgccctag

SEQ ID NO: 27008 - DNA, 1590 bp, synthetic construct
  source 1..1590: mol_type = other DNA; note = Synthetic coding sequence
atgggcgcctacctgagccagcccaacaccgtgaagtgcagcggcgatggagtcggcgtgtccatggaagacgcccacaattgtattcctgagctggactctgagaccgcaatgttctcagtgtatgacggtcacggtggagaagaggtggctttgtactgcgctaagtacttgcccgatatcatcaaggatcaaaaggcatacaaagaaggtaaacttcagaaagccttggaggacgcgttcctggccatcgacgcaaagttaactaccgaagaggtgattaaggagctcgcacagatcgcaggccggccaactgaggacgaagacgagaaagagaaagttgcggatgaggatgatgtggataatgaggaggccgcactgttgcatgaggaggctacaatgaccatcgaagagctgctcacacgctatggccaaaactgtcataaaggcccccctcactctaaatctggcggtggcacaggagaagagccggggagtcaggggctaaacggggaagccgggccggaggactcaacgcgggaaactccctcccaagagaatggccccactgctaaggcgtatactggctttagctcaaattccgagcgcggcacagaagctggacaagtcggtgagcctgggatacctacaggtgaggcgggcccttcatgcagctcagcctccgacaaactgccccgagtggccaaatcaaaattctttgaggatagcgaggacgagagcgacgaggcagaagaggaagaagaggactctgaggagtgcagcgaggaggaggatggctattcgtctgaggaggccgagaatgaagaggatgaagacgatactgaggaggcggaagaggatgacgaggaggaggaagaggaaatgatggtgccaggcatggagggtaaggaggagcctggctcagatagcggcactacagctgtggtcgcgttgattagggggaaacagctgattgtcgctaacgcaggggattcgaggtgtgttgtgagtgaggcaggaaaagccctagatatgagctacgaccataaaccagaagatgaggtcgaactcgcgaggatcaaaaatgcaggcgggaaagttacaatggacgggcgagtgaatggagggctgaacttgtcccgtgcgatcggagaccatttctacaagaggaataagaacctgcctcccgaagaacaaatgatcagtgccctgcctgatatcaaagtgctgactttaaccgacgaccacgagttcatggtcattgcctgcgatggcatctggaatgtcatgagcagccaggaggtcgtggattttatacagtcaaaaatatcccaacgggacgagaatggagaactgcgtctgttgagcagcatcgttgaagaacttctcgaccaatgtctggccccagacactagtggcgatggaacaggatgcgacaacatgacttgcatcattatttgtttcaaaccacggaacaccgctgaattgcagccggaatcgggaaaaagaaagctggaagaagtgctgtccacggagggtgccgaagaaaatgggaattcagacaaaaaaaagaaggccaagagggattag

SEQ ID NO: 27009 - DNA, 1293 bp, synthetic construct
  source 1..1293: mol_type = other DNA; note = Synthetic coding sequence
atgaccttcgagctgtacgacgagtggatccaggccagcaacgtgcaagagcaagacaagaaactgcaggccctgtggaatgcctgcgaaaaacttcccaaggccaatcacaataatatccggtatctgattaagttcctgtccaaactttcagaatatcaggatgtgaacaaaatgaccccctcaaatatggcaattgtgttaggtcctaaccttctatggccacaggcagaaggtaacatcacagaaatgatgaccactgttagcttacagatcgttggcataatagagccaattattcagcatgcggactggtttttccccggagagatcgagttcaacataacgggtaattacggatcacccgtgcacgtcaaccataatgcgaattattcttctatgccgtctcccgatatggaccccgcagatcgcagacagccggagcaggccaggcgccctcttagcgtagccacagataacatgatgctggagttttataagaaggatggcatgggagtgcgagtgatggacactaattgggtcgcccgcagaggttcaagcgctggtaggaaagtctcctgtgccccgcccagtatgcagccgcccgctcccccggccgagctggcggccccacttccctcacccctccctgagcagcccttggactcaccggctgctcctgccctgtctcctagcggactgggtttgcagccaggccctgagcgtacaagcaccaccaagagtaaggagctgtcgccggggtccgctcagaaaggatcccctgggagctcccaggggactgcctgtgccggtacccagccgggggcacagcccggagcacagcctggcgcttcccccagcccaagccagcctcccgcggatcagagtccacatactttacgtaaggtgtcaaagaagctggctcccattccccccaaggtgcctttcggacaacctggggccatggccgatcagagtgctggacagccttctccagtgtcattgagcccaactcccccatctacaccgtctccttacggcctttcctaccctcaaggctacagcctcgctagcgggcagcttagtcccgcagcagccccacccctagcctctcccagcgtgtttacatctacgctgtctaagtctcgtccaacacctaaacccagacagagacccaccctcccacctccccagcccccaacagtcaacctaagcgcaagctctccgcagagcacggaggctccaatgttagatggaatgtcccctggtgagtccatgtcaacagcagtgtag

SEQ ID NO: 27010 - DNA, 846 bp, synthetic construct
  source 1..846: mol_type = other DNA; note = Synthetic coding sequence
atgcccggcccccggcggctgcggagccccggcggcagcggctgcagtagccggggctccgggcctcggctttctacaaggcgttggcggccatgctgctattgcggaggctcaggggtttggttgctccgcacccctccctctccttcagcatggcccgcccgcagatgccctcgccatcggttcgaattctgtgaaccagccttcgtggttggcaattgcctgcagatcgcatctgacagccatcagtatgatagaatttactgtggggccggcgtgcagaaggaccacgaaaattatatgaagatcctcttgaaggtcggaggcatcctcgtgatgccaattgaggatcaattaacacaaatcatgcggaccggccagaatacgtgggaaagcaaaaatatcctggctgtttctttcgcccctcttgtacaaccgagcaaaaacgacaacggcaagcctgactcagttggactcccgccctgtgccgtccggaaccttcaggacctggcgcgcatctacatccggcgcaccctcaggaatttcattaacgacgagatgcaagctaaaggaatcccacaacgagcacccccaaagcggaagcggaaaagggtcaagcagcgcatcaacacctacgtgttcgtgggcaatcagcttattccccagcctttggactcagaggaagacgaaaagatggaggaggataacaaggaagaggaggagaaagaccacaatgaagccatgaagcccgaagaaccacctcagaatctattgcgcgagaagattatgaagctgcctctcccggagagtttgaaagcctacctaacatatttcagagacaaatag

SEQ ID NO: 27011 - DNA, 1251 bp, synthetic construct
  source 1..1251: mol_type = other DNA; note = Synthetic coding sequence
atgagccccgccatgctgagcgtgctggtgaagatgatgctggcccaagctcaagaatctgtcttcgagaaaatcagtctacccggaatcaggaacgagttctttatgttggtgaaggtggcacaggaggctgccaaggtcggcgaagtctatcaacaactccatgccgctatgtcccaggcccctgtgaaagagaacattccttacagctgggcctccttggcatgtgtgaaagctcaccattatgccgccctggctcactattttactgcgattctactgattgaccatcaggtaaaaccgggcacggacctggatcaccaggagaaatgcctttcgcagttgtatgatcacatgcctgaagggctgaccccacttgctaccctgaaaaacgatcaacagcgacgacagcttgggaagtctcacctaaggagagctatggcacaccatgaggaaagcgtgcgtgaggcaagcctgtgcaagaaactcagatccattgaagtcttgcagaaggtcttgtgtgcagctcaggagaggtctcgcctgacttacgcccagcatcaggaggaggacgacttgctgaatctcatcgacgcgccatccgttgtcgccaagactgagcaggaggtcgacataatcttacctcagttcagtaagctcacggtgactgatttctttcagaagttgggcccgttgtctgtgttctccgctaataagagatggacacccccacggagtattcgcttcactgctgaagagggtgaccttggatttacgctgcgcgggaacgcacctgtccaagtgcatttccttgacccctactgttctgctagcgtcgcaggagccagggaaggggattatattgtctccattcaactcgtggattgcaaatggttaacactgagtgaagttatgaagcttttgaagagcttcggggaagatgaaattgagatgaaagttgtatccctccttgactccacgagctccatgcataataagagcgccacgtacagcgtcgggatgcagaagacttattctatgatctgcctggcaatagatgatgatgataaaaccgacaagaccaagaaaataagtaagaaattatcattcttatcgtggggtaccaataagaataggcagaaatctgcgtctaccctgtgcttgccaagtgttggtgccgctcgccctcaggtcaagaaaaagctgccatcaccattctcacttttgaactccgattcttcttggtactag

SEQ ID NO: 27012 - DNA, 6201 bp, synthetic construct
  source 1..6201: mol_type = other DNA; note = Synthetic coding sequence
atgtgcagcacccccggcatgcccgcccccggcgccagcctggccctacgagtctcttttgtagatgtacacccagacgtgatcccagttcagctgtggggactcgttggcgaaaggaggggggaatatctgcgactcagccgagagattcaggaagctgccgcaactcgcggccagtgggccctcgggtcagccagcgcaagccccggagaactctgcctcgtgcaagtcggactgctttggcatcggtgccgcgtagtatcccggcaagcccaggagagcagggttttcttactggacgagggtagaaccattactgccggagctggttccctcgcacctggtcggcgcgaatttttcaacctcccctccgaggtgttgggctgcgtgctcgccgggttggtacccgctggctgcggcgccggatcaggcgagccaccccaacactggccggcagatgccgttgactttctctcaaatctgcagggaaaggaagttcatgggtgcgtgcttgatgtgctcctgctgcaccggctggtgcttcttgaggtgccagacgtgtttcagcagatgagggagctgggattggctcgcagagtgcccgacagcctgttccggtcactgctggagcgctacctcacagccgccaccgcatctgtgggatctggagtcccggtgctctctcgcgttccactgaaacaaaagcagcctggccttgactatttttacccacagctgcagctgggagtgaccgaagctgtggtaataacacaggtgtgccacccgcaccgaatccactgccagctcaggtctgtgtcccaggagatccatcgactgtctgaaagcatggcacaggtgtaccgcggtagcacgggcaccggcgatgagaattcaacctcagccacttgggaggaacgcgaggagtccccggacaaaccaggcagtccatgcgccagctgtggactggatggtcattggtatagagctctgctgctggagacttttcgtccgcagaggtgtgcgcaagttctccatgtggactacggcagaaaggagctggtgagctgcagtagtctgcggtatctcttgccagaatactttcggatgcccgtggtgacctatccctgcgccctgtacggtctttgggatggcggacgaggctggagtcggagccaagttggggacttaaaaaccctaattctgggcaaggctgtaaatgccaaaatcgaattttattgcagctttgagcatgtgtactacgtctccctgtatggagaagacggaataaatctcaaccgagtgttcggtgttcagagttgttgcttggccgaccgggtcctccaatcgcaagctaccgaagaggaggagccagaaacatcccagtcccagtctcctgcagaggaggtggacgaagagatttccctccctgcactccggtctattagactaaaaatgaacgccttctatgatgcccaagtggagtttgttaagaatccctccgagttttggataaggctgcgcaagcacaacgtgactttctctaagctgatgcgacggatgtgcggattttacagctctgcatccaagctagatggcgtggttctgaaacccgaacctgatgatctgtgttgtgtaaagtggaaggagaatgggtactaccgtgccatcgtaacaaaacttgatgataagtcagtcgacgtgtttttggtggaccggggaaacagtgagaacgtggactggtatgacgtgagaatgctgctcccccagtttcgccagctgcctattctggcggttaagtgcaccctagccgatatttggccactggggaaaacttggtcccaagaagcagttagcttcttcaagaagacggtgcttcacaaggagttagtcattcatattctggataaacaggaccatcagtacgtaatagaaatccttgacgagagtaggacaggggaagagaacatctctaaagttatcgcccaggctgggtatgccaaataccaggagtttgaaaccaaggagaacattctggtgaatgcccattcaccaggccacgtgtcaaaccactttaccaccgaatctaataaaattccatttgcgaagaccggcgagggggagcagaaggccaaacgggagaataaaacgacatcagtgtctaaggcactatcagataccacggtggtgacaaatggcagcacagaactggtcgtccaggagaaggtgaaacgggcctcagtatacttccctcttatgcaaaattgcctggagattaaacctggatcttcatcaaaaggagaactcgaagtagggtccacggtggaggtgcgggtctcctatgtcgagaaccccggctacttctggtgccaactgaccagaaatatacagggtctgaagactctgatgtctgacatccagtattattgtaaaaacactgctgcccctcatcagcgtaacaccttagcatgcctcgccaaacggaccgtcaacagacagtggtcgcgcgccctgatatcaggcatacagtctgtggaacatgtcaacgtcaccttcgtggactacggggatagagagatggtaagcgtaaaaaacatctactcgattagtgaggagttcctgaaagtcaaggcccaagctttcagatgttcactgtataatctcatccagcccgtagggcaaaatccttttgtatgggacgtgaaggctatccaagccttcaatgagttcatcgacaatgcttggcagaaaaatctcgaactgaagtgcacaattttcgccctggcctccattaatgaagagctgtttaatattgtggacttgttgactccgtttcagtcagcctgtcacttcctcgtggaaaagcgccttgcaaggcccgtaaagctgcagaagcccctggagagctcagtccagcttcactcctatttctattcaacccacgatatgaaaatcggttcagaagaattggtttacataacccatatcgacgacccttggacattctattgccagctggcccgaaacgcgaacattctggaacagttatcttgtagtattacgcagctgtctaaggtgctgttgaacttgaagacctccccactcaaccctgggacactgtgcctggccaagtatacggacggaaactggtaccgtggtatcgttattgagaaggaacctaagaaggtattcttcgtcgattttggtaatatctatgttgtgacttccgacgaccttcttccgatcccctcagatgcatacgatgtgttgttgctacctatgcaggccgtacgttgctcccttagtgatatccccgaccacattccggaggaggtcgtcgtttggttccaagagacaatcctcgacaaaagcctgaaagccctcgttgtggccaaagaccccgacggaacacttattatcgaactgtacggagataacatacaaatttctgcatctatcaacaagaagctggggctgctatcatacaaagacagaattcggaagaaggaatccgaggtgctttgttccaccacagagactctggaggagaagaatgagaacatgaagctaccttgtacggaatatctctcaaaaagtgtcggttacaaactgcccaacaaggagatcctggaggagtcgtacaaacctcagatcaactcttcctacaaggagctgaagctgctccagtctctcaccaaaactaacctggttacccagtatcaggactctgtgggcaacaaaaacagccaggtatttcccctgactacagagaagaaggaagagatctcagccgagacacccttgaaaactgctcgggtcgaggccaccctctccgagcgaaagataggagattcctgcgataaagacctgcctctgaagttttgcgaattcccccagaagacgatcatgcctgggttcaagactaccgtgtacgtgtcccacatcaacgacttaagtgacttctacgtccagctgatcgaggatgaggccgagattagccacctgtccgaacggttgaacagcgttaagacacgtccggaatactacgtgggaccgccacttcagaggggggacatgatctgcgcggtgtttccggaggataatctctggtatcgagcggtgattaaggagcagcagcccaatgacctattaagtgtccagttcatcgattacggaaacgtgagcgtggtacacaccaataaaatcggccgtcttgacctggtgaacgcaatcttacccggcctgtgtattcactgctcgctgcagggttttgaggtacccgataacaagaatagtaaaaaaatgatgcactattttagtcagcggacgagcgaggccgcaattagatgcgagttcgtcaaatttcaggacagatgggaggtgatcttggctgacgagcacggaataatagcggacgacatgattagccgctacgcgctgagtgaaaagtctcaggttgaactgtcaactcaagtgatcaagagcgctagctccaagtccgttaataagtccgatatagacacctcagtgttcctcaactggtacaacccagagaaaaaaatgatcagggcctatgcgacagtaatcgatgggccggagtatttctggtgccagttcgctgatacggagaagctccaatgtctggaagtggaggttcaaaccgccggtgagcaggtcgctgaccgacggaactgcatcccgtgtccgtacatcggcgacccctgcatagtgagataccgggaagatggacattattatagagccctaattaccaacatttgcgaagactaccttgtaagcgttcgccttgtggattttggaaacatcgaagactgtgtggaccctaaggccctatgggcaatcccgagtgagctcctctctgtccccatgcaggcgttcccctgttgtctctctggcttcaacatctctgagggcttatgctcccaagaaggaaatgattacttctacgagatcatcactgaggatgtacttgaaattacaatcctggaaattaggcgcgacgtgtgcgacattccactggccatcgtggacctcaaatctaaaggcaaatcaattaacgagaaaatggaaaaatactctaaaacaggaattaagtcagctttgccttatgaaaatatcgattctgaaatcaagcagaccttgggaagttataatctggatgtggggctgaagaaactatcgaacaaagccgttcagaataagatttacatggagcagcagacagacgagctcgccgaaataaccgaaaaggacgtcaacatcatcgggaccaaaccctcaaatttccgcgacccaaagactgacaatatatgcgagggcttcgagaacccttgtaaggacaagatcgataccgaagagctggaaggggagctagaatgtcacctcgtggacaaggctgaatttgatgacaaatacctgatcaccgggttcaataccctccttccacacgccaatgagacaaaagagatactggaattgaacagtctagaggtccctctgagcccggatgacgagagtaaagaattcctcgaactggaaagcattgagctgcagaacagccttgttgtcgatgaggagaaaggcgaattatctcctgttcccccgaatgtgcccctgagtcaggagtgcgttaccaagggcgcgatggaattgttcactcttcagttgccactgtcttgcgaagccgagaaacaacctgagctcgagctaccaactgcccaactgccgctggatgataagatggatcccttatcactcggcgtaagccagaaggcacaggagtctatgtgtacagaggacatgcgcaagagttcttgtgtagagtcatttgatgaccagagacgcatgtccctgcacttacacggagccgactgtgatcccaagactcaaaacgagatgaacatttgcgaggaggaattcgtagagtacaagaatcgcgatgccatttccgcactcatgccactcttctcagaggaagagtcctcggatgggagcaaacacaacaatggactgccagatcacatttcagcacagctccagaatacctatactctaaaggccttcaccgtagggtcaaagtgcgtagtttggtcctcactccgaaacacttggtccaaatgcgagatcctggaaactgcggaagagggaactaggaagcgtgggctcgaagtgatggaaatttag

SEQ ID NO: 27013 - DNA, 264 bp, synthetic construct
  source 1..264: mol_type = other DNA; note = Synthetic coding sequence
atgagcagctgcgtgagcagccagcccagcagcaaccgggccgcccctcaggacgaactgggcggacgcggatcaagttcgtctgaatctcaaaagccatgtgaagctctccggggattgtctagcctatccatccacttgggtatggagagtttcatcgtcgtgaccgagtgcgaacccgggtgtgcagtagacttgggcctcgctcgcgatcgtccactcgaagctgacgggcaggaggtacctttggacaccagtgggtag

SEQ ID NO: 27014 - DNA, 2469 bp, synthetic construct
  source 1..2469: mol_type = other DNA; note = Synthetic coding sequence
atggccgccgagggcgaccccgagtggggccccaccccccccagcacatcggccacaactgcagcaaggcgggcagtaaataaagttgtctacgatgatcacgagagcgaggaagaggaggaggaggaggacatggtcagcgaggaagaggaagaagaagatggtgacgcggaggagacccaggattcggaggacgacgaagaggatgagatggaagaggatgatgatgactccgactatccagaagagatggaggacgatgacgatgacgcctcctattgtacagagtcttcatttcgcagccatagcacgtatagttccacaccgggaaggcggaagcccagagtgcacaggccccgaagtccaatcctggaagagaaggacattccacccttggagtttccaaagtccagtgaggaccttatggttccgaatgagcacataatgaacgtgatcgccatttacgaggtcctgagaaatttcggaacggtgctgagactctcgccatttaggttcgaggacttctgcgcggcactcgttagtcaggagcaatgcaccttaatggccgagatgcacgtcgtcctgttaaaagccgtgctccgtgaagaagatacatccaacaccacttttgggcccgccgatctgaaggacagcgtgaacagcactttgtattttatcgacgggatgacatggcccgaagtgttgcgggtctattgtgagagtgacaaggagtatcatcacgttttgccttaccaagaggccgaagactacccctacggtccggttgagaacaagataaaggttctccagttcctcgtcgaccagttcctcacaaccaatattgccagggaggaactcatgtccgagggagtaattcagtacgatgatcactgcagggtgtgccataaattgggcgacctactttgttgcgagacctgctccgcggtgtaccacctggaatgcgtgaagccacccctggaagaggtacctgaagacgaatggcaatgtgaggtatgcgtcgcccacaaagttccaggggtaaccgactgcgtggccgaaatacagaaaaataagccatacatccgtcatgagcctatcggctatgaccgaagcagacgtaaatactggtttctaaacaggcggctgataattgaagaggacaccgagaacgagaacgaaaaaaagatctggtactactcaacaaaggtgcagttggctgagctcatagattgtctcgacaaagactattgggaagcagagttgtgcaagattttggaggagatgagagaggagatccacagacacatggatatcacagaagaccttaccaataaggcacgagggagcaataagtcatttctggccgccgccaacgaggagatcttggagtccatacgcgcaaaaaagggcgatatcgataatgtaaagagccctgaggagactgaaaaggataaaaacgaaactgagaacgatagcaaggatgctgaaaagaacagagaggagtttgaggatcagagtctggaaaaggactccgatgataagacccccgatgatgatcctgaacagggcaagtctgaagaaccgacagaggtgggcgataagggtaattcagtttcggctaatcttggagacaacactacgaacgcaacctcagaggaaacctcaccctcagagggacggagccccgtaggatgtctcagtgagacaccagacagctctaacatggctgaaaaaaaagtggcttctgagctgccccaggatgtgcctgaggagcctaacaaaacgtgcgaatcgagtaatacctcagcaacaaccacttccatccagcctaatttggaaaattccaattcttccagcgagttaaatagcagtcagtccgagagcgccaaagctgccgacgacccagaaaatggggaaagggagtcccacaccccagtgtctattcaagaagagattgtcggcgactttaagagcgagaagtcaaacggcgaattgtctgaatcccctggcgccggtaagggcgcctcaggatccacgagaatcataacacgccttaggaatccggactccaagctctcgcagctgaagtctcagcaggttgctgccgccgcccatgaagcaaacaaactttttaaggaaggaaaagaagttctggtcgtgaacagccagggtgagataagtcggctgtctacgaagaaggaagttattatgaaaggcaacatcaataattactttaaattgggccaggaagggaaatacagggtttaccacaaccagtattcgactaacagctttgccttaaataagcaccaacaccgtgaggaccacgacaaaaggaggcatttagctcacaagttctgcttaacaccggctggggagttcaagtggaatgggtcggtacacggcagcaaggtgctcaccatctctacccttcgtcttactattacacagtacggggagaatttatag

SEQ ID NO: 27015 - DNA, 552 bp, synthetic construct
  source 1..552: mol_type = other DNA; note = Synthetic coding sequence
atgctgcagcagacctggaccagccggtgcctgatgaagttctacgccgtggtggcgacatcccctgccagttgggagtcccataaaatcgcggagcgcattgaacagcgcatcctgaactctaaccctgtgatggaggcttttggaaacgcgtgcaccctgcgcaataacaatagtagcaggttcgggaaattcatccagctgcagctgaatagagcccagcagatgactggggcagctgtccagacatatttgttagagaaaacccgggtcgcctgtcaagcctcgtcagagcgcaattttcatatcttttaccaaatctgtaaaggagcttcggaagatgagaggcttcagtggcatctccccgagggcgcagctttcagctggttgccgaatcccgagcgctctctcgaggaggactgctttgaggttacccgggaagccatgttgcatctggggatcgatacccccacgcagaacaatatattcaaagtcaggcggaaggctacgcccctaaaattcggaagagatgacggtcagccattcgcgtag

SEQ ID NO: 27016 - DNA, 744 bp, synthetic construct
  source 1..744: mol_type = other DNA; note = Synthetic coding sequence
atgctgaagttcctggtgtggttcctgcagtggtgcgtgtgcgtgcttgtgcaacctgccaaagaactgttacattgtctcaagatgcaaatgcgtatctcaaaatacactaagtgtctgcaggctcagatcgcaattacagtaccgaaaacatggaagaagcccaaagaccgcactcgtacaacagaagagatgttggaggccgaactcgagctgaaagctgaggaggagctcagtatagataaggtgttagaatcagaacaggataagatgtctcaaggcttccacccagaaagagatccatccgatctcaagaaagtcaaagcagtcgaggagaacggagaggaagccgaacctgtccggaacggagcagagagtgtgagtgaaggggaaggcattgatgccaattctggatccacagacagctcaggggatggtgtgacctttccattcaaacctgagagctggaaacccacagatacggaaggcaagaagcaatatgatagggagtttctgctcgatttccagttcatgccagcctgcattcaaaagcccgaggggctcccgccgattagcgatgtcgtgctggacaagatcaatcagccaaagctccctatgcgcacacttgacccaaggatcctgccgagaggacccgattttacccccgcattcgccgattttggccgacagacccccggaggtcgaggagtgcctgtttctgcaagcagccttcagttgacatag

SEQ ID NO: 27017 - DNA, 981 bp, synthetic construct
  source 1..981: mol_type = other DNA; note = Synthetic coding sequence
atgctgggcggcgtgggcgaggagaacgagaagctgtggagcttcaccaagaaggcgtcgcatatccaactggacagcctgcctgaagtccccctgctcgtggatgtgccatgtctaagcgcgcagttggacgatagcattctcaacattgtgaaggaccatatcttcaagcatggcacggtcgcttcccgccctcctgtgcaaattgaagaattaatagagaaaccaggcgggataatagtaagatggtgcaaggtggacgatgacttcactgcccaggactatcgcttgcagttccgcaagtgtacttctaatcatttcgaagatgtatacgttggcagcgagaccgaattcattgtgttgcacattgacccaaatgtcgactaccagtttagggtgtgcgccaggggagacggaaggcaggagtggtctccctggagcgtccctcagattggtcactcaaccctggtcccccatgagtggacagctggattcgaaggatattcactgagctctcgcaggaacatagcactacgcaacgacagcgaaagtagcggggttctgtattctcgtgctcccacttacttctgcggacagacactaacgttcagagtcgaaaccgtgggacagcccgatcggagggatagtattggagtgtgcgcagagaagcaggacggctacgacagtctgcagagagatcaggcagtgtgcatttctaccaacggagcagtcttcgtgaatggcaaggagatgacaaatcagctgccagccgtgacttccggcagcacggtgacatttgacatcgaggccgtcacactaggaacgacctcgaacaacgaagggggccactttaagttgagagtgacgatcagctccaataacagggaagtggtgtttgactggcttctagaccagagctgtggctccctgtatttcggttgttcgtttttctatccagggtggaaggtgttggtgttctag

SEQ ID NO: 27018 - DNA, 2436 bp, synthetic construct
  source 1..2436: mol_type = other DNA; note = Synthetic coding sequence
atggtgagcgaggaggaggaggaggaggacggcgacgccgaggagactcaagactctgaggacgacgaggaggacgagatggaggaagacgatgatgatagcgactatcctgaagagatggaggacgacgatgatgacgcttcctattgtacagagagcagtttcagatctcactcaacctactcatccacccccggccggcgcaagccaagggtacatcggcctcgctctccgatactggaggagaaggacatccccccgttggaattccctaaatcatcagaggacctgatggtaccgaacgagcatatcatgaatgtgatcgccatctacgaggttttaagaaacttcggtaccgtgctgcggctgtccccattcagatttgaggatttctgtgcggccctcgtgtcgcaagaacagtgcaccctcatggctgagatgcatgtggtgctactcaaggccgttctgcgagaggaagacacctcaaatactacctttggtcccgcggacttaaaggactctgttaattcaactctgtactttatcgacggcatgacctggccagaggtgctgagggtgtactgcgaatccgataaggagtatcaccacgtcctaccataccaggaggcggaggattatccttacggtcctgtggagaacaaaatcaaggtgctccagttcctcgttgaccagtttttgaccacaaatatcgcccgggaggaactgatgagcgagggcgtcatacaatacgacgatcactgtcgcgtttgtcataaactcggggacctcctttgttgcgaaacctgttccgctgtgtaccatctggagtgcgtgaaacctcccctggaggaggtgccagaggacgagtggcaatgtgaagtgtgcgtggcccacaaggtccctggggtgaccgactgtgtcgcggaaatccagaaaaataagccatacatcagacatgaacctattggatacgacagatccagacgcaaatactggttcttgaataggcgcctgatcatcgaagaggatacagaaaatgagaacgaaaagaagatatggtactactctaccaaggtacaactcgcagagctgatcgactgccttgacaaagactactgggaggcagaactgtgtaagattctggaagaaatgcgcgaggagatacaccgccacatggatataacagaggatttgactaataaggcgcggggctccaataagagcttcctagcggctgctaacgaggagatcctggaaagcattcgtgctaaaaagggggatattgacaacgtcaaaagtccagaagaaacggaaaaggataaaaatgagacagagaacgatagtaaggatgcggaaaagaatcgggaagagttcgaggaccaatccctcgaaaaggactctgacgacaagacccctgacgatgacccagaacaaggcaaaagcgaagagccaactgaagttggggacaaaggcaatagtgtgtcagctaacctgggagacaataccacaaacgccactagcgaagagactagcccaagtgagggccggagtcccgtgggctgcctgtctgagacaccggactcaagcaatatggccgaaaaaaaggtggcttccgaactcccccaagacgtacctgtaggcgacttcaaatcagagaagagtaatggcgaactcagcgagagtccgggggccggcaaaggggcctccggatctactaggattattaccagactgcgcaatcccgacagcaaactgagtcaactgaagtcccaacaggtggccgctgcggcccatgaggccaataagctgtttaaggaagggaaagaagtgcttgtggtaaactcacaaggagagatcagtcggcttagtacaaagaaggaggttattatgaaaggcaacattaacaattacttcaaactggggcaggagggtaaatatagggtttatcataatcagtactccaccaacagcttcgccctgaacaaacaccaacacagagaagaccatgataaacgccggcatctagcccataagttctgtctgaccccggctggggaattcaaatggaacggatcggtgcacggcagcaaggtgttaaccatttccacactgaggttaaccattactcaattagaaaacaacatcccgtcaagttttttgcacccaaattgggcaagccaccgggcaaactggattaaagccgtgcagatgtgctccaaaccacgggagtttgcactggccttggccattttggagtgtgctgtgaagcccgtcgtcatgctccctatctggcgcgagtccctgggccacaccaggctgcatcggatgaccagcatcgagcgtgaggaaaaagaaaaggtgaagaagagagaagagacaggtaggcgcagaaatgatgctgccagtgatatggggaagatccacatcagctcatag

SEQ ID NO: 27019 - DNA, 1752 bp, synthetic construct
  source 1..1752: mol_type = other DNA; note = Synthetic coding sequence
atggcccccgagctgacccccgaggaggagcaggccaccaagcagttcctagaggagataaacaagtggacagtgcagtataacgtctcacctttgtcgtggaatgtcgccgtgaagttcctcatggcacgtaagtttgacgtactgagggctattgaactctttcacagttacagagaaacccgacggaaggagggcattgtgaagctgaaaccccacgaagagcccctccgcagtgagatattgtcaggcaagtttacaatcctgaatgtccgtgacccaacaggggccagcatagccctctttacagccagactgcatcatcctcataagtctgtgcaacatgttgttctccaagccctattttatctactagacagagccgttgacagcttcgagactcaaaggaacgggctggtattcatttacgacatgtgtggatccaactacgcaaactttgagctcgacctcggtaagaaggtactcaacctgctgaaaggggctttccccgcccgcctgaaaaaggtactgatcgttggcgcaccaatttggtttcgagtgccttactccattatatcattgctgttgaaggacaaagttagagaacggatccagattctgaagacttcagaggtcacacagcatctgccacgggagtgccttcccgagaacctcggaggatacgtcaagatcgaccttgccacctggaatttccagttcctaccccaggtgaacgggcatccagatccctttgatgaaatcatattgtttagcctgcctccagcactcgactgggactcagtgcacgtgccggggccccacgcgatgactattcaggagcttgtggattatgtgaatgcccgccagaagcagggaatatatgaagagtatgaagacatcagacgggagaaccctgtaggcaccttccactgttcaatgtccccaggcaacctggaaaaaaatagatatggggacgtgccttgtctggatcagacgagggtcaagttaaccaagaggagcgggcacacacagaccgattacattaatgcatcttttatggacggctacaaacagaaaaatgcttacatcggcacacagggccctcttgagaatacgtatagggatttttggctgatggtatgggaacaaaaggtgcttgtgatagtgatgaccaccagattcgaggaaggcgggcgccggaaatgcggacagtattggcctctcgagaaggactcacgaattcggttcggatttctgactgttacaaatctcggtgtggaaaatatgaaccattacaagaaaacaaccctcgagatccacaatacagaagagcggcagaagcgccaggtgacgcattttcagtttctaagttggcctgattacggggtccctagcagcgcagcctctcttatcgactttctccgtgtggttcggaatcagcagagcctcgcagtgtcaaacatgggtgcgcggtccaagggccaatgccctgagccaccaatcgtagtgcattgcagcgcaggaattggtcggaccggaacgttctgctctctagacatctgcctggcccaactggaagagctaggcacactgaatgtatttcagaccgtttcaaggatgcgcacgcagagggcttttagtattcagaccccagaacagtattatttctgttataaagccatattggagtttgccgagaaagaggggatggtgtcatctggacagaacctcctggctgttgaatctcagtag

SEQ ID NO: 27020 - DNA, 396 bp, synthetic construct
  source 1..396: mol_type = other DNA; note = Synthetic coding sequence
atggccatgaccgccggcaccaccaccaccttccccatgagcaaccatactcgtgagagagtgacggtggctaagctgacattggaaaacttctattcaaatcttatactgcaacacgaagagagggaaaccagacaaaagaaactggaagtggcaatggaagaggagggcctcgctgacgaagagaaaaagcttcgccggtcgcaacacgctagaaaggaaaccgaatttctgaggttaaagcgtactcgactgggtttggacgatttcgagagcctcaaagtgattggtagaggtgcgtttggtgaagtccgcctggtacaaaaaaaggatacaggccacatttacgcaatgaagattctgagaaaatccgacatgctggaaaaggagcagtag

SEQ ID NO: 27021 - DNA, 435 bp, synthetic construct
  source 1..435: mol_type = other DNA; note = Synthetic coding sequence
atggccagcgtggccgccgcccgggccgtgcccgtgggcagcggcctacgaggtttgcagcgaacactcccgttagttgtaatccttggagccacgggcacgggaaaatcgacattggcgctgcagctaggccagcggcttggcggggagattgttagcgcggacagtatgcaggtgtacgagggccttgacataatcactaataaggtaagcgctcaggagcagcgtatttgtaggcatcacatgatctcttttgtggaccccttggtgaccaactatacagttgtggactttcggaacagggccacagccttaatagaggacatttttgcccgggacaaaattcccatcgtggtcggggggacaaattactatatcgaaagcttactgtggaaggtactggtgaatacaaaagtaagtctcgtgcacagctag

SEQ ID NO: 27022 - DNA, 1386 bp, synthetic construct
  source 1..1386: mol_type = other DNA; note = Synthetic coding sequence
atggccgccagcagcctggagcagaagctgagccggctggaggccaagctgaaacaggaaaaccgcgaggctagacggagaatcgatctgaatctggatattagccctcagcgcccacgccctacactccaactcccactggccaacgacggagggtcgcgctctcctagctccgaaagttccccccagcatccaactcctccggcgagacccagacacatgttgggcctcccttccacactgtttacaccaaggtcaatggaatccattgaaatcgaccagaagctgcaggaaattatgaagcagacaggctacctcactatcggcggacaggtcccaccgtcactttggaggggcgaaggaggagggcccgcgagactggacccttcctgggagagacagtggggggctggcggtgggggccggcccgggacactgcagccttccctttcttcccaaagatatcaggccgaaattaatgatctggaaaatctgggcgagatggggtcgggcacatgcggccaagtgtggaagatgcggttccgcaagaccggccatgtcattgcagtgaaacagatgagaagaagcggaaataaagaagagaataagcgtatcctaatggacctcgacgtggtcctcaagagccacgattgcccctatatagttcagtgctttgggactttcatcacaaataccgatgtgtttatagctatggagctcatgggcacatgtgccgagaaactgaagaagaggatgcagggccctattccggagcggatcctgggaaaaatgaccgttgccattgtgaaggcgctttactacctcaaagagaagcacggcgttatacacagggacgttaagccttctaatatcctcttggatgagagggggcagattaaattatgtgacttcggcatctcaggaagacttgtggattctaaagcgaagactcggtccgctggctgtgccgcgtatatggccccagagcgaatcgacccacctgacccaaccaagccagactatgatatcagagccgacgtgtggtcactcgggatttcgttagttgaactggctacgggacaattcccctataaaaattgcaagaccgactttgaagtgttgacaaaggtcctgcaggaagagcctcctctgttacccgggcacatgggattctcgggcgactttcagagctttgtgaaagactgcctcacaaaggatcatcgtaagcgaccgaagtataacaagctgctggaacattcatttattaaaagatatgaaactcttgaagtcgatgttgctagttggttcaaagacgtgatggccaaaactgagtctcctcggacgtccggcgttctgtcacagccccacttgccattctttagatag

SEQ ID NO: 27023 - DNA, 1611 bp, synthetic construct
  source 1..1611: mol_type = other DNA; note = Synthetic coding sequence
atggagaccagcgacatccagatcttctaccaggaggaccccgagtgccagaacctgtccgagaattcatgcccaccttccgaggtcagcgacaccaatttgtactcccctttcaaaccgcgaaactatcagctggaacttgccctgccagctatgaaagggaaaaatactatcatatgtgctcctacggggtgtggtaagacctttgtatcactcctcatctgtgagcaccatctcaaaaaatttccgcaagggcaaaaggggaaggtcgttttttttgccaaccagattccagtgtacgagcaacaaaagtccgtgttcagcaagtacttcgaacgccatgggtaccgcgtcacagggattagtggggcaaccgcagaaaatgttcccgtggagcagatcgtggagaataatgacatcataattttgacaccccaaatcttggtaaataatctgaagaaaggcaccatcccctccctgtccatattcacccttatgatattcgacgaatgtcacaatacctccaagcagcacccttataacatgattatgttcaactatttggatcaaaagcttggaggtagttccggacctctgccacaggtgatcggactcaccgccagcgttggagttggggatgccaaaaataccgatgaagctctggactatatttgcaagttgtgtgcttccctggacgcatcagtgattgccaccgtgaagcataatctggaggagttggagcaggtggtgtacaagccccaaaagtttttccggaaggtggaaagtcgaatcagcgataaatttaagtatataatcgcccagctgatgagagatactgaatctctggccaaacggatttgcaaagatctggagaacctctcccagattcagaaccgcgaattcgggacacagaaatacgaacagtggattgtgacggtgcagaaggcgtgtatggtattccaaatgccagacaaggatgaagagtctcggatatgtaaggcgctgttcctttatacatcccatcttcgcaagtataacgatgccttgatcataagcgagcacgcacgcatgaaggacgccctcgattatcttaaggatttcttttcaaacgtgcgagctgcaggattcgacgagattgagcaagacctcactcagcgtttcgaagagaagctccaggagttggaatccgtgtctagagatcccagcaacgagaatcctaagctggaggacttatgctttatactccaggaggaataccatttaaaccccgaaacaattaccatcctttttgttaaaactagggcactcgtggatgcactgaagaactggattgagggaaacccaaaactgtcgtttctgaaaccaggtatcctgactggcagggggaagactaatcagaacactgggatgactctgccagcccagaagtgcattctcgacgctttcaaagctagcggtgaccacaatatattaatagcaacctctgtggcagacgaagggatagacattgcccagtgcaatctcgtgattctgtatgaatacgtgggcaatgtaattaagatgatacaaacgagagaggaggaacaggaggtcgcttctgcatctttctag

SEQ ID NO: 27024 - DNA, 2883 bp, synthetic construct
  source 1..2883: mol_type = other DNA; note = Synthetic coding sequence
atgagccggctgatcgtgaagaacctgcccaacggcatgaaggaggagaggttccggcagctgtttgcagcctttggtacactgaccgactgtagtttaaaatttactaaagacggtaaattccggaagtttggattcatcggctttaaaagcgaagaggaggcccagaaagctcaaaagcattttaacaagagtttcattgacaccagtagaatcactgttgaattttgcaagagctttggcgacccggccaagccacgtgcatggtctaagcatgcccaaaaaccatcccaacctaaacaacctcccaaggattctacaacacctgaaatcaagaaggatgaaaagaagaagaaggttgccgggcaactggagaaactcaaggaggacacagaattccaagaatttctctctgtgcatcaaagacgtgcccaagctgccacttgggcgaacgatgggctcgatgccgaacccagcaagggcaagagtaagcccgcatcagactacctcaactttgactccgactcgggccaagaatctgaggaggagggagccggagaagacctcgaggaggaggcgtcactggagccaaaagcggccgtgcaaaaagaactgtctgatatggattaccttaagagcaaaatggtaaaggccggttccagttcatcctccgaggaggaggagtcggaggacgaagcagtgcattgcgatgaagggagcgaggcagaagaggaggattcaagcgcgactcccgtgcttcaggagcgagattcgaaaggggcagggcaggaacaggggatgcccgccggaaaaaagcggccccccgaagccagagctgaaaccgaaaagcctgctaaccagaaagaaccaacaacttgccacaccgtaaaactgagaggtgccccatttaatgtaacggagaaaaacgtgatggaattcctcgcccccctgaagccggtggccattcggatcgtgcgcaacgctcacggaaataaaacaggttatatatttgttgatttttcaaatgaagaggaagttaagcaggccttaaaatgtaaccgagaatatatggggggcagatacatcgaagtgttccgcgagaaaaacgttcctaccaccaagggcgctccgaagaacacaaccaaatcctggcaagggcggatcctcggagaaaacgaggaggaagaggacctggccgagtctgggaggctttttgtcaggaacctgccatacacgtcaacagaagaggacctggaaaagcttttcagcaagtacgggcccttatcagagctgcactatccaatcgactctctgaccaaaaagccaaagggatttgcctttattactttcatgttcccagagcacgctgttaaagcgtattctgaggttgatggacaggtcttccagggccgcatgcttcacgtactgccgtccacaattaaaaaggaagccagtgaggatgcaagtgctttggggagcagcagctacaaaaagaaaaaggaagcccaagacaaggcgaactctgccagttcacataattggaatacattattcatgggaccgaacgctgtggccgacgcaatagcacagaagtataatgctacaaaaagtcaggtattcgaccacgaaaccaaagggtccgtagccgtgcgggttgctcttggcgaaacccagctcgttcaggaggtcagacgtttcctcatagataatggggtctccctggattccttttcccaggccgccgctgaaagatccaagacagttatcctggtcaagaacctcccagccggtaccctcgccgcacaactgcaggaaacttttggtcacttcggctcactgggtagggtcctcctccccgagggcggtataaccgccattgtcgaattcctcgagccgttagaagctcgcaaggccttcagacacttggcctatagcaagtttcatcatgtgcccctttatctcgaatgggccccagtcggtgtttttagcagtaccgcaccccagaaaaagaaactgcaggacactccttctgagcctatggagaaagacccagcagaacccgagaccgtcccagatggagaaacccccgaggacgagaatcccaccgaagaaggggctgacaattcttccgcaaaaatggaggaagaggaggaagaggaagaggaggaagaagaatcgctgcctgggtgcactctctttattaaaaacttgaattttgacacgaccgaggaaaaacttaaagaggttttttcaaaggtgggcactgtgaagtcttgtagcatctccaaaaagaaaaacaaggcaggggtcttactgagtatgggctttggatttgtggaatatcgcaaaccagaacaggcccaaaaggctcttaaacagctgcaaggtcatgtggtggatggacacaaactggaagttcgaataagcgaaagagctaccaagcctgctgttactttggcccggaagaagcaggtgcccaggaaacagactactagcaaaatattagttcggaacattccttttcaggcacatagccgggagattagagagctcttctccacctttggcgagctgaagacagtgcgtctcccaaaaaagatgaccggcacaggaactcaccgcgggtttgggtttgttgatttccttacaaagcaggacgccaagcgcgcattcaacgccttatgccatagtactcatttatatgggcggaggttggtgttggagtgggctgacagcgaggtaaccctgcaggctcttagacggaaaactgccgcccattttcacgagcctccaaagaaaaagagaagcgtcgtgctggacgaaattctcgagcagctggagggtagcgattcagatagtgaggaacaaactctccagctttag

SEQ ID NO: 27025 - DNA, 666 bp, synthetic construct
  source 1..666: mol_type = other DNA; note = Synthetic coding sequence
atgctggccgccggcctgctggaggagctgcgggacttccaccggaggtataatcagaaaaacgtaagcgaaaattcgcaagactatcagcacgggatattccagagcatcggattcaaggagttccatgaatacctgattacggaggggaaatgtaccctggaaactagtaaccaactgctgaaaaagggaatcgaggcgctgaagcaggtcactaaacgctatgcccggaagcagaatcgatgggtgaagaacaggttcctgtcaagacccggccccatcgtgcctcccgtgtacggcctggaagtgtccgatgtatcaaagtgggaggagagcgtgttggagccagccctggaaatcgtccaaagcttcattcaggggcataagcccaccgcaacccccattaagatgccctacaacgaggccgaaaacaaaaggtcctaccacctgtgcgacctgtgcgataggattattattggagatcgtgaatgggcagcgcatatcaagagcaagtcacatcttaaccaactgaagaaacgacgtcgacttgatagcgatgccgtcaataccattgagagccagagtgttagccccgatcacaacaaggagcctaaggaaaagggttccccaggacaaaacgatcaagagctgaaatgctcagtatag

SEQ ID NO: 27026 - DNA, 2649 bp, synthetic construct
  source 1..2649: mol_type = other DNA; note = Synthetic coding sequence
atgccccgggtgaagcccaagctggagaagcagctgcagaaggacaaggaaaaagtggaggaattcaagagcattcctgccaagagcaacaatatcataaatgaaaccacaacccgtaataacgcactcgagaaggagaaggaaaaagaggaaaagaagcttaaggaggtgatggattccctcaaacaggagacccagggcctgcagaaggagaaagagagtcgggaaaaagaacttatgggcttctctaagtctgtcaatgaagcgcggtccaagatggacgttgcgcaatctgagttggacatttatctcagtcggcacaatacggctgtaagccaattgactaaagccaaggaagcactcatcgccgcatcagagacattaaaagaaaggaaagctgcaatcagggatatagaaggtaagcttccacagactgaacaggagctgaaagaaaaggaaaaggaactgcagaagctgacacaggaggagactaacttcaagtccctcgtgcatgacttgtttcagaaagtggaggaagccaaaagctcactggccatgaaccggtcacgtggcaaggtgctggacgcaatcatccaggagaaaaagagcggccgcatccccggaatctacggacgactcggcgacctgggtgcgatcgatgagaagtatgatgtggcgattagttcttgctgtcacgcgctggactatattgtggtcgatagcatcgatatagctcaggagtgtgtaaacttcttaaaacggcagaatattggcgtcgcgacattcatcgggctagataagatggcagtgtgggctaaaaaaatgaccgaaatccagaccccagagaataccccacggctgttcgacttggtgaaggtcaaggatgaaaaaattaggcaagccttctatttcgctttgcgggatacccttgtggccgacaacctcgatcaggcgactagggtggcataccagaaggatagaagatggcgggtcgtgactctgcaggggcagatcatcgaacagtctggtaccatgacgggcggcggttccaaggtaatgaaggggaggatgggatcgagtctagtgatcgaaatctctgaagaagaggtgaataaaatggaaagtcagctccagaacgactctaaaaaggctatgcagatccaagaacagaaagttcaacttgaagaaagggtagtgaaactgcgccatagtgagcgcgagatgcggaataccctggagaagttcacggctagcattcaacgattgattgaacaggaagagtaccttaacgtgcaagttaaagaactggaggcgaacgtgctcgccacggcccccgataagaaaaagcagaaactgctggaggaaaacgttagcgcattcaaaaccgagtatgacgctgtcgcagagaaggctggaaaagtggaagctgaggtcaaacgcttgcacaatactatcgtggagatcaacaatcataaacttaaagcccaacaagataaactcgataagatcaacaaacagctcgatgaatgtgcaagcgccattactaaggcccaggtcgcaatcaaaacggcggatcggaatctccaaaaagcccaggactccgtgttgaggactgagaaggagattaaggataccgaaaaggaggtcgacgacctcacagccgagctgaaatcgctggaggacaaggccgccgaagtcgtgaaaaacactaacgctgcggaagagagccttcctgagatccagaaggagcaccggaacctgctgcaagagcttaaggtgatccaggagaacgagcacgcactccagaaagacgctctctccataaagctgaaattggagcagatcgacgggcacatcgcggaacataactctaagatcaagtattggcataaggagatcagcaagatatcactgcatcccatcgaagataatcccattgaggagatctccgtcctgtcacccgaggatctagaagctatcaaaaatccggactcaataacaaaccagatcgcgcttctagaggcacgatgccatgaaatgaaacctaaccttggagccatcgcggagtataagaaaaaagaggagttgtacctacaacgggtggctgagcttgacaaaatcacatacgagcgcgattccttccgccaggcctatgaggacctgaggaagcagagattaaatgagtttatggcaggcttttacataattacgaataaactgaaggagaattatcagatgctcacacttggcggcgacgccgaattggagctggttgactccctggaccctttttcggagggtataatgtttagtgtgcgtccccctaagaaatcctggaagaagatcttcaacttgagcggcggggaaaaaacactctcctccttagcactggtgtttgctctgcaccattataagccgaccccgctgtacttcatggatgagattgacgcagccctcgattttaagaacgtgtctattgtggccttttacatctatgaacagaccaaaaacgcccagttcatcataatatctctccggaacaacatgttcgagataagcgatcgcctgatcgggatctacaagacctataatatcaccaaaagcgttgctgtcaatcctaaagagatcgcctctaaaggcctgtgctag

SEQ ID NO: 27027 - DNA, 1038 bp, synthetic construct
  source 1..1038: mol_type = other DNA; note = Synthetic coding sequence
atgttcctgacccggcccaaggtgtgcgtggacctgaaccggcgggtgactctatacggagtgtttacgattcacttttcaccaaatgtgccatcccgatgcctgctcctggagttgcttgacgtcagcgtgagtgagctgttactgtactcttcccaccagggctgcagtatgtggatgattcaacactgcgccagagacgtgctggaggcattagccttcctccaccatgagggatacgttcacgccgacctgaaaccccgcaacatcctctggagtgccgaaaatgagtgctttaagcttattgactttggactgtcgttcaaagaaggcaatcaggacgtgaagtacatccagactgatggatatagagcccctgaagcggagctccagaactgcctggcccaggccggcctgcagtcagatacagaatgcacatccgccgtggatttgtggtcacttgggatcattctgcttgaaatgttctcagggatgaaactgaaacacaccgttcgctcccaggagtggaaggccaatagcagcgcaatcatagaccacatttttgcttcaaaggcagtcgtcaatgccgccattcctgcataccacttgcgcgacctgatcaaatcaatgctccacgatgacccctcccgacgcatccccgctgagatggctctctgctcccctttctttagcattccatttgctcctcatattgaagacctggtgatgctcccgacccctgtactaagactacttaacgttctggacgacgactacctcgaaaatgaggaggaatacgaagatgtcgtggaggatgttaaagaagagtgccagaaatacgggcccgttgtcagcctgctggtccccaaggagaatcccggacgagggcaggtgtttgtggagtatgctaatgcgggcgacagcaaggccgcacagaagctgcttacgggcagaatgttcgacgggaagtttgttgtggcaactttctaccctctgtccgcctataaacgtggttacctttaccagacgttactttag

SEQ ID NO: 27028 - DNA, 954 bp, synthetic construct
  source 1..954: mol_type = other DNA; note = Synthetic coding sequence
atgtggctggcccgggagggcatcgtggcccccctgcccggcgagtggaagccctgccaagatataacgggagatatctactactttaactttgcaaatgggcagtcaatgtgggaccacccatgtgacgagcactaccgctcgctggttatccaggagcgggcaaaattgtccacatctggcgccatcaagaaaaagaaaaagaaaaaagagaaaaaggataaaaaggatcgcgatccaccaaaaagttctctggagacccagccagaagaaggcctcttaccacctagttcattcctttgtagtctgtcacctcctagtgcgcccgggctcgcggatctcgatctggaccaggagatgcaggccatcagtgagggtagctataacaagggcaaatccccaggaatgctcggcgacacaccatggagattcatgggggctctgccgcgtaagctacagccactaagtaagggtcaaccgtcacagatacaccaggtgtttgcggatatggaaaaaattctgggacgcgcgcctgcccagtgtcggcgagaactgggtgatcagcagggtctcgagaaattgcagaaagcaactgagaaaatctatcttggattttcagatccggagaccgaggaacttgagatgcgctctcgtcagcaaaaactgggcaccccagccccgcaaaatacagggttactgcagaatatgcaggacgttgttgaatcgcgtaatcaggcctcggtccactccaagttgtctgaagcaatcaaaggtttacctctgaagggcgaacagcacagccattctctcgccaaactcagcccgaccgggccagggggggacaagggacaaagccctattccaatgtggatctgctgcaggctaagggccagtaattgcaggaatacgtctgccgcatggcgcctcaaactgaagcgcagttctacgtgctag

SEQ ID NO: 27029 - DNA, 162 bp, synthetic construct
  source 1..162: mol_type = other DNA; note = Synthetic coding sequence
atgggcaacagcgacagccagtacaccctgcagggcagcaagaaccactcgaataccattactggggccaagcagatcccttgttccctcaagattagagggatacatgccaaggaagagaagagtctgcatggatgggggcatggtagtaacggagcctag

SEQ ID NO: 27030 - DNA, 1203 bp, synthetic construct
  source 1..1203: mol_type = other DNA; note = Synthetic coding sequence
gcctggctgcagagcgccggcgagctgcccagcgacggcggctgcagtagattgcgttggcaggctcacctggagtttacacacaatcatgacgtgggggatctgacctgggataagattgccgtatccctcccccgttccgaaaaattgcgctccttggtcctggcaggcatcccacacggcatgcggccgcaactctggatgcggctgtctggcgcccttcagaagaaaagaaattcagagctgagctacagagaaattgtcaagaactcctcaaatgacgaaacgatcgcagctaagcagattgagaaagacctcctgcggaccatgccttctaacgcgtgcttcgcatccatggggagcatcggagtcccccggttgcggcgggtcttgcgggccctggcttggctctatccagagattgggtattgtcagggaacggggatggtcgctgcatgcctgctcctcttcctcgaagaagaggatgctttctggatgatgtccgccattattgaagatcttctccccgcctcatacttttccacaactttactgggggtgcagactgaccagcgtgtcctgcggcacttaatcgtccagtatctgccacgtctggacaagttgttgcaagagcatgatatcgagctaagccttataacactgcactggttcctgactgctttcgcttcagtggtggacattaagctactgctgaggatctgggacctgtttttctacgagggctccagggtcctatttcagctgactttagggatgctgcacctgaaagaagaagagcttattcagtccgaaaacagtgcatccatatttaacaccctgtccgacataccgtcccagatggaagatgcagaactgctgctcggcgtggccatgaggcttgcaggcagccttaccgacgtggctgtcgagactcagcgaagaaagcatctcgcctacctgattgcagaccaaggtcagcttctcggtgcaggtaccttaactaacctaagccaggtggcccaggatggcggcccccatctggaccctcagcatactggcagacgaggtcatcttgaggtccagtcagcaggggccgccgaaaacaaacctgccctcccggctctccccccgagcttggctcagagcgaccattcctgcggggtgattcaggcctcgtctggcttcgtgcatttacgcttttag

SEQ ID NO: 27031 - DNA, 294 bp, synthetic construct
  source 1..294: mol_type = other DNA; note = Synthetic coding sequence
atgctgcggggcaccaaggagatggacaacatgagcccccggctgcgagcctttcttagtgagccgattggggagaaggatgtgtgctgggtcgacggaatctcccacgaattagcaataaacctagtgactaaggggatcaacaaagcgtacatcctgctcggacaatttctgctcatgcacaagaatgaagccgagttccagcgctggctcatctgctgttttggagccacagagtgcgaagcgcaacaaaccagtcactgtctgaaggagtggtgtgcctgtttcctgtag

SEQ ID NO: 27032 - DNA, 1011 bp, synthetic construct
  source 1..1011: mol_type = other DNA; note = Synthetic coding sequence
atggagtacctgggcggcggcagcgccctggacctgctgaagcccggccccttggaagagacctatatagcgacgatcttgcgggaaatcttaaagggcctggactatctgcacagtgagcgtaagatccatcgggacatcaaagccgcaaacgtactgctgagcgagcagggtgacgtgaagctggcagactttggagtagctgggcagttaactgacactcagattaaaagaaatacattcgtcggtactcctttttggatggctcctgaggtgatcaaacaaagcgcttacgactttaaggcggacatttggagtcttggaataactgccattgaactagctaagggggagcctccaaatagcgacctgcatcctatgagagtcttattcctgatccccaagaatagccccccgacattggagggacaacatagcaagccgtttaaggagtttgtcgaggcctgtttgaataaagatccacgttttcggcctaccgccaaagaactactcaaacataagttcatcacacggtatactaaaaagacttccttccttacggagctgatcgaccgctacaagcggtggaaatctgaaggacatggcgaggagagttcttcagaggatagtgatatcgacggagaagccgaggacggagagcagggccctatttggacttttcccccaacaatccggcccagcccacacagcaaactccacaagggaacggcactccattcttcgcagaagccagccgagcccgttaagcggcagcctcgtagtcaatgcctgtccacattggtccggcctgtatttggcgaggtcttttcacaactgaaggaaaaacacaagcagtccggcgggagcgtgggggcgctggaagagctagaaaacgcgttctcattggccgaggagtcctgtcctggaattagcgataagctcatggtccacctggttgaacgagtgcaacggttctcccacaacaggaaccacttgacaagcacccggtag

SEQ ID NO: 27033 - DNA, 1455 bp, synthetic construct
  source 1..1455: mol_type = other DNA; note = Synthetic coding sequence
atggtgcacgagaccagctacagcgcccagttcaagggcgaggcctctaagcctacaaccgcagacaataaagtcatcgatcgaagaaggattcgctcactgtattccgagccctttaaagagccgcctaaagtcgaaaaaccaagcgtccaatcctccaagcctaagaagacttccgcaagtcacaagcccacgcggaaagccaaggataagcaggcagtgagtggccaggcagctaaaaaaaagtctgcggagggccccagcacaaccaagcctgatgataaagagcagagtaaggagatgaataacaagctcgccgaggcgaaggagagcctcgcccaaccagtctcagactcaagcaagacccaggggcccgtggccacagagcccgataaagatcagggctctgtcgtgcccggactgctgaagggacagggccctatggtacaggagccactgaaaaagcagggttcagtggtgccaggcccccctaaagatctagggccgatgattcccctccctgtcaaggaccaggaccacaccgtgcctgagcccctcaagaatgagtcccctgtcatctccgcccccgttaaggatcagggccctagtgtccccgtccctccaaagaatcagtcacccatggtcccagctaaggttaaggaccaaggaagcgtggtccctgagagcctcaaagatcaaggccccagaatcccggagccagtgaaaaaccaggcacctatggtgccagctcccgttaaggacgagggacccatggtgtcagcaagcgttaaggaccagggacctatggtgtctgccccagttaaggatcagggacctatcgtgcccgcccctgtgaagggcgagggccctattgtgcctgcaccggtaaaggatgagggaccaatggtttctgctcccattaaagaccaggatcctatggtaccagagcaccccaaggacgagtccgcaatggctaccgcccctatcaagaaccagggatccatggtgtccgagccagtaaaaaatcagggccttgtagtctccggcccagtaaaagatcaagacgtggttgttcccgagcacgccaaagtacatgactccgccgtggtggctccagtaaaaaatcagggccccgttgttcctgaatccgtcaaaaatcaagaccctattctaccggtcctggtgaaggatcagggtcctaccgtcctgcagccacccaagaaccagggacggatagttcctgaaccactgaagaaccaagtccccattgtccccgtaccacttaaggaccaggaccctctggtgccagtgccagccaaggaccagggtcccgccgtgcccgagcctctgaagacacaaggtcctcgggatccccaactgccaacagtctcccccctgccccgggtcatgattccaaccgcccctcacacagaatatatagagagttctccctag

SEQ ID NO: 27034 - DNA, 2103 bp, synthetic construct
  source 1..2103: mol_type = other DNA; note = Synthetic coding sequence
atggccctgggcgaggagaaggccgaggccgaggccagcgaggacacaaaagcccagtcttacggacgcgggtcatgccgggagcagccacctcggctcgaggctgaaggcggccttatctctcctgtttggggtgctgagggcattcccgcacccacctgttggataggtacagaccccggcggaccttcaagggcacaccagcctcaggccagtgatgcaaaccgcgaaccagtcgccgaaagatctgaaccagccctctcaggtctgccaccagcaaccatgggctcaggggatcttctgctgagcggagaatcccaagtggaaaaaacaaaattgtcttcgagcgaagagtttccccagactttatcactgcctagaaccaccacaatctgctccggacatgatgctgacacagaagacgaccccagtctcgcagacttgcctcaggcgctggacttaagccaacagccccacagctcgggtctctcttgtctgtcccaatggaagagcgtcttgtcacccggtagcgctgctcagcctagctcttgtagtatctcagcgtccagcaccgggagcagcctgcaaggccaccaagagcgagctgagccaagaggcggatccctcgccaaagtctcttcgtcactggagcctgttgtgccccaggaaccgagctctgtagtggggctaggcccgcgcccacagtggtctccgcagcccgtgttttccggaggagacgcctccgggctcggaaggcggcgcctatccttccaggccgagtattgggcctgtgtgcttcccgactccctccccccatcacccgatagacactctccattgtggaatccgaataaggagtacgaagacctccttgattatacatacccattgcggcccgggcctcagctccccaaacacctggactctcgcgtgccggcagatcctgtacttcaagattcaggggtggatctggactccttcagtgtctccccagccagtacccttaagtcccccactaacgtcagtccgaactgccctcccgcagaagccacagcgctccctttctccggaccccgggagcctagcctcaagcaatggcccagcagagtcccccagaagcagggtggcatgggtctagcgagttggtcgcagctggcctccacgcccagagcccctggcagccgcgacgcccgctgggagagaagagaaccagctctccggggtgccaaagacaggctgacaatcgggaagcatctggacatggggtccccacaactaagaacacgcgaccggggctggccatcacctcggcccgaacgcgagaaacgcacttcgcagtccgcccggcgaccaacctgcactgagagccgctggaaaagtgaagaagaagttgaatctgacgacgaatatctggctctgccagccaggttgacccaggtgtcttccctggtgagctacctcggtagcatatccactcttgtaacactcccaactggcgatataaaaggccagtctccattggaagtgagcgattcagatggcccggcctcatttcctagctcaagcagccagtctcaactgcctccaggggcggctctgcagggctcgggggaccctgagggccagaatccatgttttctcaggtcatttgttcgcgcccacgattccgcaggagaaggtagtctgggaagtagccaagcgctgggcgtgtccagtgggctcctgaagacacgcccatcactgccagcaagattggaccggtggccatttagcgaccccgacgtggagggacagctgcctaggaagggaggtgagcaagggaaggagtctctggttcagtgtgtgaagacattctgctgtcagctggaagagctcatttgttggctgtacaatgtggctgacgtgacggatcacgggaccgccgccagatccaatcttacctccttgaaatcttcattgcaactgtatcgcgtgatctgcggtccaggtagcggtctctttccacataagtcagtcgctaaattactggattataaggtgaaaagtcaaattacgaacgtctggtatgtgatcgcacagctgactatcattccggaaatttag

SEQ ID NO: 27035 - DNA, 1626 bp, synthetic construct
  source 1..1626: mol_type = other DNA; note = Synthetic coding sequence
atgaagagctacgtgagcgagaccatggccagccccggcaaggacaactaccgtatgaagagttacaagaacaacgcacttaaccccgaggagatgcggcgccgccgcgaagaggaagggattcagttacgaaaacagaagagagaacagcagctctttaagcgaagaaatgtggagctgatcaacgaggaggccgctatgtttgactccctgcttatggattcctatgtaagctccacaacaggagagagcgttattacccgagagatggtggaaatgctcttttccgacgactctgatctgcaattagcaaccacacagaaattccggaaactactttctaaagagccctctccaccaatcgatgaggtaatcaatacaccgcgggtagtcgatcggttcgtcgagtttttgaaacggaacgaaaattgcacactgcagttcgaagccgcttgggccctcaccaacattgccagtggaacatctcagcagactaagatagtgatcgaggctggcgcagttccgatattcattgagctccttaattctgactttgaggatgtgcaggaacaggctgtgtgggctctggggaatattgccggagactcgtctgtttgtcgagattacgtgctcaactgttctattctcaaccccctgctcacactgttgactaagagtactcggctcactatgacccggaatgctgtgtgggcactgtcaaatctgtgtcggggaaagaacccaccccccgaattcgctaaagtgagtccctgcctgcctgttctgagccgactgctgttctcatcggacagtgatttgcttgccgacgcctgttgggcactgtcctatctcagcgatggaccaaacgagaagatacaggctgtgatagattctggagtgtgccggcgtctggtagagctgctgatgcataacgactacaaggtggccagtcccgctttgagagccgttggaaacatagtgacaggcgacgatattcagacacaagtaatcttgaactgttccgccctgccatgtttactgcatctgctgagttctcctaaggaaagtattagaaaagaagcatgctggactatcagcaatattactgccggcaatcgggcgcaaatacaggccgtgatcgacgcgaatatctttccagtgctgatagagattctgcagaaggcagagttccgaactcgaaaagaggcagcatgggctatcacaaatgctacgagcggcggcactcccgagcagattcgatatctggtttccctgggctgcatcaaacctctatgtgatctgctgacggtgatggacagtaagatagtccaggttgccctcaacggcctcgaaaacattctaaggctaggggagcaggagggcaaacgatccggtagtggggtgaatccctactgtggtctcatcgaggaggcttatggtctcgacaagatagaattcttgcagtcccacgagaaccaggaaatttaccagaaggcctttgacctcatcgagcactactttggagtggaagatgacgactcctccctagcaccacaggttgatgaaactcagcagcagtttatttttcagcagcccgaggccccaatggaggggttccagttatag

SEQ ID NO: 27036 - DNA, 1716 bp, synthetic construct
  source 1..1716: mol_type = other DNA; note = Synthetic coding sequence
atgctggactgcggcatgcacatgggcttcaacgacgaccggcggtttcccgacttttcgtacatcacccaaaacggtaggttgacggatttcctggattgcgtgattattagccacttccaccttgatcattgtggcgcactgccatacttttctgaaatggtaggttatgacggcccaatatacatgacccacccaactcaggcaatctgcccaatacttctggaggattatcgcaagatagccgttgacaaaaagggagaagccaactttttcacctcccaaatgatcaaagactgcatgaaaaaggttgtggcagtgcacctccaccaaacagttcaggtggacgatgagttagagatcaaagcatattacgctggtcatgtgctcggcgcggcaatgttccagataaaggtcggttccgaatccgtggtgtacacaggtgactataacatgacccccgaccggcatctgggtgctgcttggattgataagtgtaggcccaaccttcttattacggagagtacttatgccactacaatccgggacagtaaacgttgtagagaacgagatttcctcaagaaggtgcatgagaccgtggaacgggggggaaaggtcttgatcccagtttttgctctgggaagggcacaagagctgtgcattctgttggagactttctgggagcgaatgaacctcaaagtgccaatctatttctcaacaggattgactgagaaggctaaccattactataaactgtttatcccatggactaaccagaaaatcagaaaaaccttcgttcagcggaatatgtttgagttcaagcatataaaggctttcgacagggcctttgccgataatcctggacccatggtcgtttttgcgacccccgggatgctccacgctgggcagagcctgcagatttttagaaagtgggcaggaaacgaaaagaatatggtgatcatgccaggttactgtgtgcaggggacagtgggtcacaagattctgagcgggcagcgtaaacttgagatggaaggtcgccaggtcctcgaggtaaaaatgcaggtggaatatatgtcttttagtgcacacgccgatgctaaggggattatgcaactcgtgggccaggccgaaccagagtccgtgctgcttgtccacggcgaggccaaaaagatggaattcttgaaacagaagattgagcaagagctccgggtgaactgctacatgcctgccaatggcgagactgtgacactcccgacgtctccctccatccctgtcggcatctcgttagggctcctgaagcgggaaatggcacaaggactcttaccagaggccaaaaaacctaggctgcttcatggcactctcatcatgaaggactctaacttccggctcgtcagctccgaacaggcactgaaggaactgggactggccgaacatcagctgcggtttacttgccgggtccacctgcacgatacccgcaaagaacaggagacggcactacgcgtgtattcccacctcaaaagtgtgctaaaggaccactgtgtccagcacctgccagacggctccgtgaccgtcgaatctgtccttctccaagctgccgcgccctctgaagatcctggtaccaaagtactgctcgtgtcatggacatatcaggatgaggaactaggaagcttcctgaccagcctgttaaaaaaagggctgccgcaggcgccatcctag

SEQ ID NO: 27037 - DNA, 2232 bp, synthetic construct
  source 1..2232: mol_type = other DNA; note = Synthetic coding sequence
atggaggccgccgccgtgaccgtgacccggagcgccacccggcggcgacgcagacagctgcaaggacttgccgcccctgaggcaggaacccaggaagagcaggaggaccaagagcccagaccccggcggcgtcgtccagggaggtctataaaggacgaagaagaggaaaccgtgtttagggaagtcgtgtccttttcacctgacccactgcccgtgcggtattacgacaaagacacaactaaaccaatctcgttctatctctccagcctcgaagagctcctggcctggaagcctcgactcgaagacggttttaacgttgcactcgaacctttagcgtgtcgccagccaccgctgtctagccagcgcccccggactctgctctgtcatgatatgatgggcggctaccttgatgatagatttatacagggcagcgttgtgcagaccccatacgcattttatcactggcagtgtatcgacgtttttgtctacttcagtcaccacacagtgactattccccccgttggctggaccaatacggcgcataggcacggagtctgtgtactgggtacattcatcacagagtggaatgagggggggcgcttgtgtgaggctttcctggctggcgacgagaggtcgtatcaggccgtggcggaccgcctggtacaaattacacaatttttcagattcgacgggtggttgattaacatcgagaacagtctgagcctggcggccgtcggcaatatgccaccatttctgcgctaccttaccacccagcttcatcggcaggtacccggtggactggtgctttggtacgattccgttgtgcagagcggacagctgaaatggcaggatgagctcaatcagcacaaccgcgtcttctttgacagttgcgatggcttctttactaactataattggagagaggaacatctcgagagaatgctcgggcaggctggagagcggagggctgatgtttacgtaggggttgacgtctttgcccgtgggaatgttgtgggtgggaggttcgatactgacaagagccttgagttaatcagaaaacatgggtttagtgttgcactatttgctcctgggtgggtgtatgaatgcctggagaagaaggatttttttcaaaaccaagacaaattctgggggagactggaaagatatttacctacccactctatttgctccctgcccttcgtgacttccttttgtctcggtatgggggcccgtcgtgtatgctatggccaagaggaggccgtgggaccctggtatcacctgtcagcccaggagattcaaccgctattcggcgagcatcgcctgggaggcgatggccgcggatgggtacgtacacattgttgtctggaagacgcttggcatggagggtcaagccttctggtcaggggggtcatcccccccgaggttggcaatgtcgccgtcagactgttttccttacaggcccctgtgccccctaagatatatctatcaatggtatacaaactggagggcccaacagatgttactgtggccttggaactcaccacaggagacgcaggatcatgccacatcggcggcatctcagtgctgaacgcagaaacaagcagtaggcattccctccgccccttgcgggtgcctcccacaaaactcgcacgctgggtgggtcggtgtgggcggcagctgtcaggcgggtgggtgcaacactgttacgaagtgagtctgcggggctgtctgctgctcgatttgctcgtttgtttctccagaccacccggatctcgggaggaggaatcttttacttgtcgactcggtgagattcaggtggtagatgcagccagtctgttggcccccctgccccaagtgcaggccgtgacgataagccacattaggtggcagccatccgcctctgagcgtgaaggcccccccgcgttgctgcagctatcctgcacacttcattggtcttttctgttaagccaagtacgctgttttaggattcactgctgggggggcatgagcgatgactctcccggacgggaacttccccgcccagagatgcctatgtttctgggcctggcttttgccacccagtacaggattgtggatcttctggtcgaagctgctggccccggtcaggacaggaggatggaatttctcgtggaaccagtccccaaggagggattccgcgtgccccaggccgagtgggggagagccgtgttgctctactcagctccagcctag

SEQ ID NO: 27038 - DNA, 396 bp, synthetic construct
  source 1..396: mol_type = other DNA; note = Synthetic coding sequence
atggagctgcgggtgcacatggtgagccacaccggcgagatgccctacaaggtacggctgggcttgagccctggcccagggctgggaggacccaggatcttacctgcagaaccgtttacttggggagctgtgcgacacctccctcacagctcttgtcagggggcctgcctgccctgtctgccttgcttaagttctgccccgctgtccagacaggggctgagcgctgcttccccgccaaggtctttgctcgggccatgcttctttccttggcggactggcctcgcttccagtgggcagctgagccccgaagccttgttatgtaccatcttgcataccagaagtggggtactgccggagtcctcacaccgtggacttcccttggtgcccgccctctag

SEQ ID NO: 27039 - DNA, 909 bp, synthetic construct
  source 1..909: mol_type = other DNA; note = Synthetic coding sequence
atggagcacggcatcgtgaaggactggaacgacatggagcggatctggcagtacgtgtattctaaagaccaactgcagaccttctctgaggaacatccggttctgcttacggaggcccccctgaacccgcggaagaacagggagcgagcggcggaagtattttttgaaaccttcaacgtccccgccttgtttattagcatgcaggctgttctgtccctgtacgctaccggaaggactacaggcgtggtcctcgactctggcgatggcgttacccatgctgtacccatttatgagggattcgccatgcctcattccatcatgaggatcgacatcgctgggagggatgtgtctcgcttcctgcgcctgtatctcagaaaagagggctatgacttccactcctccagtgagtttgaaattgtgaaggcgatcaaagagcgcgcttgctatttatcaattaaccctcagaaagacgaaactctggaaacagagaaagctcagtattatctccctgacgggagtacaatcgagatcggccctagtcgtttcagagctcctgagctgttgttcagacctgatcttataggggaagagagtgagggaattcatgaggtgctggtcttcgcaatacagaaaagcgacatggacctgcgtaggaccttattttccaacatcgtgctttctggtggctcaacattattcaaaggcttcggcgacaggctgctttcagaggtgaagaaactggcaccgaaagacgttaagatcagaatcagcgccccccaggaacgcctttatagcacatggattgggggttctatcctagcctccctcgatacctttaagaagatgtgggtgtccaaaaaagaatatgaagaggacggggccaggtccattcataggaagaccttctag

SEQ ID NO: 27040 - DNA, 780 bp, synthetic construct
  source 1..780: mol_type = other DNA; note = Synthetic coding sequence
atgctgcggtgcggccagatgatgctggcccaggccctgatctgccgccatttaggccgcgattggtcatgggagaaacagaaggaacaacccaaagaatatcaaaggatcttgcagtgctttctggatagaaaggactgctgttattccatccaccaaatggcccagatgggcgtaggagaagggaaatctattggcgaatggttcggacccaatacggtggcccaggtactgaaaaaacttgcactgtttgacgagtggaattctctggccgtgtatgtttctatggataatacagtggttattgaggatattaaaaaaatgtgcagagtgctgccactaagcgcagatacagccggcgaccgtccgcccgactcactgacggcatccaaccagagtgacgaattgatattcctggatccacacaccactcagacatttgttgacacagaggagaacggaacggtgaacgaccagactttccactgcttacagtcccctcaaagaatgaacatattgaacttggacccttcggtcgcgctgggatttttctgcaaagaggagaaggattttgacaattggtgctcccttgtgcagaaagagatcctgaaggaaaatctccgaatgtttgaattggtgcagaagcatcccagccactggcctccatttgtccctccagccaaaccagaagtcacaacaaccggggctgaatttatagacagcaccgagcagctggaagagtttgatttggaagaagacttcgagatactgtctgtgtag

SEQ ID NO: 27041 - DNA, 957 bp, synthetic construct
  source 1..957: mol_type = other DNA; note = Synthetic coding sequence
atgcgggcccagagcgacgagctggagaagatcgagaagcacggccggtcatctaaggacaaagaaaacgctaaaagcctggataaacctgagcaattcctgtatgaactctccctgatcccaaacttcagtgagcgggtgttctgtatcttgtttcaaagcacatttagcgagagcatttgctcgatccgccgtaaattggagctcctgcagaagctctgtgaaacattaaaaaatggacccggcgtgatgcaggttctgggcctcgtactggcctttggcaattatatgaacggcggcaacaaaaccagagggcaagccgacgggttcggcctcgacatcctgcctaaactgaaagatgtgaaatcatccgacaactctcggtcgttactgtcatacatcgtatcttattacctccggaatttcgatgaggacgcaggcaaagaacagtgcctgttcccgctgccagagccacaagacctgtttcaagcaagccagatgaagttcgaagactttcagaaagatttgcgcaagctgaaaaaggatctaaaggcgtgcgaagtggaggccggaaaggtgtaccaggtgagctccaaggagcatatgcagccattcaaggaaaacatggagcaatttataatccaagcaaagatcgatcaggaagcagaagaaaatagtttgactgagactcataaatgttttttggagactaccgcgtatttctttatgaaaccaaagctaggtgaaaaggaggtctcaccgaacgcttttttttcaatatggcatgaattttcgagcgatttcaaagatttctggaaaaaagaaaacaagctccttttgcaggaaagggtgaaggaagctgaggaggtgtgccggcagaaaaagggaaagagcctgtacaagataaaaccccgtcatgatagcggcatcaaagctaagatttctatgaagacctag

SEQ ID NO: 27042 - DNA, 345 bp, synthetic construct
  source 1..345: mol_type = other DNA; note = Synthetic coding sequence
atgagcagcagcatgtggtacatcatgcagagcatccagagcaagtatagtctgtcagagcgcctgatccgcaccatcgccgccattcgatcatttccacatgacaacgtcgaagacctcatccggggcggggccgatgttaactgcacccatggaacattaaagccgcttcattgcgcatgcatggtgtcggatgccgactgtgtagagctgctgctggaaaagggtgccgaggttaatgctcttgatggttacaaccgcacagcactgcattacgccgctgagaaggacgaggcctgcgtcgaagtcctgctcgagtacggtgctaaccctaacgctctttag

SEQ ID NO: 27043 - DNA, 1365 bp, synthetic construct
  source 1..1365: mol_type = other DNA; note = Synthetic coding sequence
atgagcaccttccggcaggaggacgtggaggaccactacgagatgggagaagagttgggatctggacagtttgcaattgtacggaaatgtcgacagaagggcacaggaaaggagtacgcggcaaaattcatcaagaaacgtaggctgtccagctcacgacgaggagtgtcccgggaagagattgagcgagaggtgaatatcttgcgggagatcaggcatcctaacattattacactccacgacatatttgaaaataagactgacgtcgtactgattctggagttggtgtccggtggggagttattcgatttcctggccgaaaaggaatctctgactgaggacgaagcaacccaatttctgaagcagattctcgatggcgtccattatctccacagtaagcgtatcgcccacttcgacctgaagcctgagaacatcatgctgcttgacaagaatgtgcctaaccctcggattaaactcatcgatttcgggatcgcccacaagattgaagctggcaacgagttcaagaacatcttcgggacaccggagttcgttgcacccgaaatagtaaattatgagcctttggggctagaggccgatatgtggagcataggcgtgatcacttatatccttttgagtggcgcttccccatttctgggggaaacgaagcaagaaaccctgaccaatatttccgctgtgaattatgactttgacgaagaatacttttctaatacctctgaactggccaaagacttcattaggcgactcctagtaaaggaccctaaaaggaggatgacgatagcccaaagcctcgagcactcctggatcaaagccatccggcgtcgcaatgtcagaggggaggatagcggtcgaaaaccagagcgccgccgcctgaaaactaccaggcttaaggagtacaccataaagtctcactccagtctcccacccaacaattcctatgctgatttcgagcggttctcaaaagtactggaggaggccgcagcagctgaggagggcttgcgggaattgcagcggtcaagacgcctctgccatgaagatgtagaagccttagccgcaatctacgaagagaaagaagcctggtatagggaggaatccgactctctgggtcaggacctgaggaggctgagacaggagttactgaagactgaagcccttaagcggcaggcccaagaggaagcgaagggcgccctcctagggacctctgggctgaaaagaagatttagtcgtcttgaaaaccgctacgaagccctcgccaagcaggtggcttcagaaatgcgttttgttcaggatcttgtgagagcgttagaacaggagaaactgcagggggtcgaatgtggactacgctag

SEQ ID NO: 27044 - DNA, 1047 bp, synthetic construct
  source 1..1047: mol_type = other DNA; note = Synthetic coding sequence
atgggcaaggactactacaagatcctgggcatccccagcggcgccaacgaggacgagattaagaaggcctaccgcaaaatggcactgaaataccaccccgataaaaataaggagccaaatgctgaagaaaaatttaaagaaatagcagaagcctatgatgtgttgagtgacccgaagaagaggggtctgtatgaccagtacggcgaggagggtctaaagactggtggaggaactagcggaggaagctctggctcgttccactacacatttcacggcgatcctcacgcaacgtttgcatcatttttcggaggcagtaacccctttgacatcttttttgccagcagccggagtacccggcctttttcagggttcgaccctgatgatatggatgtggatgaggacgaggatcctttcggcgcgttcgggcgatttggctttaacggtctaagccgcgggcccagaagagctcctgagccgctgtaccctagacgtaaggtgcaggacccccctgttgtacacgaactgagagtgtcattggaagaaatatatcatggctctacaaagcgcatgaaaattactaggaggaggctgaatccagacggccgtaccgtgcgaactgaggataagattctgcacattgtaattaagcggggttggaaggaaggtaccaagatcactttcccgaaggagggcgatgccacaccggacaacatccctgccgacatcgtgtttgtgcttaaagataaaccacatgcacattttcggagagatggcactaatgtgctgtacagtgctttgatctccctaaaagaggcattgtgcgggtgtacagtgaacattcccacgatcgatggaagagtgattccgttgccctgcaacgatgtgataaagcccgggactgtaaaacgcctgcggggagaaggtctgcctttccccaaggtgcccacccagcggggcgatctcatcgtggagtttaaagtccgctttccggatagactgactcctcagactcgacagattttgaagcagcacctgccatgcagttag

SEQ ID NO: 27045 - DNA, 2163 bp, synthetic construct
  source 1..2163: mol_type = other DNA; note = Synthetic coding sequence
atgtacggcagcgcccggagcgtgggcaaggtggagcccagcagccaaagtcctggacgctctccaaggctgcccagaagccctagactgggtcacagacgaacgaattctacaggtggaagctccggctccagcgtgggcggaggtagcggtaaaactttaagtatggagaacattcagtctctcaacgctgcctatgccacgtcaggacccatgtacctttcagatcatgaaaacgtgggcagcgagacccccaagtctaccatgacccttggccggagcggaggcaggctcccctacggtgtccggatgaccgctatgggttccagccccaatatcgcgtcttcaggcgtggcctctgatacaatagcattcggcgaacatcacctgccaccagtctccatggcttctacagtgcctcattcactgagacaggcccgggacaacactataatggatttgcaaacacagctgaaggaagtgctgcgggagaatgacctacttcgaaaggacgtggaggtgaaggagtccaagctcagttccagcatgaactctataaagacattctggtcccctgaactcaaaaaagagcgggccctgagaaaggacgaggcaagtaagatcaccatctggaaggagcaatacagagtggtccaggaggaaaatcaggtcgatgcactccggttgaggctagaggagaaggaaacgatgctgaacaagaaaactaagcagattcaagacatggcagaggaaaaaggtacacaagctggtgagatccacgatctcaaagatatgcttgatgtgaaagaacgcaaagttaatgttttgcagaagaaaatagaaaacttgcaggaacagctaagggacaaggaaaagcagatgagctctctaaaggagagagtcaaatcacttcaggccgacaccactaataccgacacagcactgaccacactggaggaagccctggctgagaaggagagaaccattgagaggctgaaggagcagagggaccgcgacgaacgcgaaaagcaagaagaaatcgacaattataagaaggatctgaaggacctgaaagaaaaagtttccctgctccagggcgatttgtcagagaaggaggcttctctcctcgacctaaaggagcacgcctcgtctctcgccagctccggccttaagaaagattctcgtctcaagactctcgagattgctctcgagcagaagaaggaagaatgtctgaaaatggagagccagctgaagaaggctcacgaagccgccctagaagcacgggcctctccggagatgagtgatcgcattcagcatctagagcgagaaattacccgctacaaagatgaaagctccaaggcccaagcggaggttgatagactccttgagatcctaaaggaggttgagaatgaaaagaacgacaaggacaaaaagattgcagaactagagtccttgacgtcccggcaggtgaaagaccagaataagaaagtcgccaacctcaaacacaaagaacaggtggaaaaaaaaaaaagtgctcagatgctggaagaggccagaaggagagaggataacctcaacgattccagccaacagttacaggattccctcaggaagaaggatgatcgcattgaagaattggaggaggcgcttcgcgagagtgttcaaataacagccgaaagagagatggtcctcgcccaggaggagtccgcccgcacaaatgccgagaaacaggtcgaggagctgttgatggcaatggagaaagtgaagcaagagcttgagtctatgaaggccaagctgtcctctacacaacagtccctggccgaaaaagagacacacctgaccaacctgcgggccgaacgcaggaagcacttagaggaagtgcttgagatgaaacaggaggcattgctggctgccatctcggagaaggacgctaacatcgccctcctcgaactgtcaagttctaagaaaaagactcaggaagaggtagcagccctgaagagagaaaaagaccgactggtacaacaactgaagcaacaaactcagaatagaatgaagctaatggcagacaactacgaggatgaccactttaaaagctcacattcaaatcagactaatcataagccctcacccgatcaggacgaggaggagggcatctgggcttag

SEQ ID NO: 27046 - DNA, 768 bp, synthetic construct
  source 1..768: mol_type = other DNA; note = Synthetic coding sequence
atggccgccagcaccatgagcgtgtgcagcagcgcctgcagcgacagttggcaggttgacgcatgtcccgaatcttgttgtgagccccattgctgtgcactgtcatgctgcgcgccagccccatgcctcactttggtctgtacgcccgtgtcacgcgtgagctccccttgttgtcaggccgcctgcgaaccctccccatgtcagtctggatgcacttcttcgtgcacgccttcctgctgtcagcagtcttcctgccagcccgcctgctgtacttcttcaccatgtcaacaagcttgctgcgtgcctgtttgctgtaagccagtctgctgccttccgacttgtagtaaggattcctcatcctgctgtcagcagtcttcctgccagccaacgtgttgcgcttcttcatctagccagcagtcatgctgtgttcccgtgtgctgtaaaccagtgtgttatgttcccacttgttccgaggactcatcctcctgttgccaacagagtagctgccaccctgcctgttgcacgagtagcccttgccaacaagcatgctgcgtccccgtgagatgcaagccagtgtgttgcaagcctatctgttgcgtgcctgtatgtagtggagcctccacttcatgctgccagcagagctcttgtcagcctgcatgctgcactacttcatgttgccgaccctcctcaagcgtgtccctgctttgccgtcccgtttgcagacccgcatgctgcagcttgtgttctgggcaggaaagttcatgctag

SEQ ID NO: 27047 - DNA, 2562 bp, synthetic construct
  source 1..2562: mol_type = other DNA; note = Synthetic coding sequence
atgagcgagaaggtggactggctgcagagccagaacggcgtgtgcaaagtggatgtgtattctccgggcgacaatcaggcccaggattggaagatggataccagtacggatcctgtgcgggtcttatcgtggttacgcagagatctggagaagtctactgccgaattccaagatgtgcggttcaagccaggagaaagctttggaggagaaactagcaactcgggagatcctcataagggattctcagttgactattataacacgaccactaagggcacaccagagaggctgcactttgagatgacacataaagagatcccttgtcagggccccagagcacagctcggaaacgggagctccgtcgacgaggtatcattttatgccaaccgactaaccaacctggtaatcgcaatggccagaaaggaaattaacgaaaaaattgacggctctgagaataagtgtgtgtaccagtcactgtacatgggcaacgagcctacaccgacgaagtcattatcgaaaattgcctcagagttagtaaacgagaccgtgagtgcgtgtagccggaatgcggcccccgacaaggcccccgggagtggggatcgggtttccgggtcttcacagagcccgcccaacttgaaatataagtctacactgaagattaaggagtccactaaagagaggcaaggcccggatgacaagcctccctccaagaagagcttcttttataaggaggtctttgagtcaagaaatggagactatgcaagagagggaggacggttcttcccacgcgagcgaaagcgctttaggggacaggaaagacccgatgactttactgcctcggtgtcggagggtatcatgacttatgccaactctgttgtgagcgatatgatggtgtctatcatgaagaccctcaagatccaggttaaagatacgacaatagcaacgatcctgctgaagaaagtgctgctgaaacacgccaaggaagtggtgtcagacctcatagatagcttcctgcggaacttgcacagcgtcactggtacattaatgactgatacacaatttgtctctgcagttaaaaggactgttttctcacatggttcccaaaaagccaccgacattatggatgccatgctccgaaaactgtataacgttatgtttgccaagaaggtcccagagcacgtgagaaaggcccaggataaagccgaaagctactccctgataagcatgaagggtatgggcgacccgaagaatcggaatgtgaattttgccatgaaatctgaaacaaagctgagagaaaagatgtatagcgagcctaagtctgaagaggaaacctgtgcaaagactcttggagagcatattatcaaggaaggacttacattgtggcacaagactcaacagaaggaatgcaagtccttggggttccagcatgcggcattcgaggctccaaatacccaaaggaaacctgcaagcgatatctcctttgagtaccccgaagatattggcaacttgtctctgccgccgtacccaccggaaaaacccgaaaacttcatgtacgactccgatagctgggcggaggatctcattgtcagtgccctcttgctgattcagtatcatctggctcaggggggacgaagagacgcacggagctttgttgaggccgccggaaccaccaattttcctgctaatgagccacccgtcgctcccgacgagagttgcttgaagagtgcccccatagtaggcgaccaggaacaggccgagaagaaagatctgcgctccgtgtttttcaatttcatccgcaatctcctgtctgaaactattttcaagcgggaccagtctcctgaacctaaggtacctgagcaacctgttaaagaggacaggaagctgtgcgagcgccccctggcttcttcgccaccacgcctatacgaagatgacgaaaccccaggggccctgagcggtctgacaaagatggcggtctctcagatagacggccacatgagtggccagatggtggagcatcttatgaattccgtgatgaaactctgcgtgattatagccaagtcctgtgatgcatcactcgctgaattaggcgatgataagtctggagatgccagtcggctcacatctgcttttcccgacagcctctacgagtgtcttcccgccaaaggcactgggtctgctgaagccgtcctgcagaacgcctatcaggccatccataatgagatgcgcggcacttccggtcagccaccagaaggctgcgcagccccaacagttattgtttcaaatcataacttgaccgatactgttcagaacaaacagctccaagctgttctgcaatgggtggccgcctcagagctcaatgtgcccattctgtattttgccggcgatgatgagggcatccaagagaaactgctgcaattatcagcggcagccgtggacaaggggtgttctgtaggtgaggtgctacagagcgtgctccgctatgagaaagagcgtcaattaaacgaggcagtggggaacgtcactcccttgcagctacttgactggctgatggtcaatctttag

SEQ ID NO: 27048 - DNA, 1263 bp, synthetic construct
  source 1..1263: mol_type = other DNA; note = Synthetic coding sequence
atggtgcacggccggaaggccaacgcccaggtgatggagagcgaggaattcatgttattgcccgctaaccagctaattgatatcataagctctgacgagctcaatgtgcgctccgaggaacaggtgttcaacgccgttatggcgtgggtcaaatacagcattcaggagcgtaggccccaattgccccaggtgctgcaacacgtccgcctccccctcctgtctcccaaatttttagtcggcacggtgggatccgatcccctgattaagtcagacgaagaatgtcgcgacttggtggacgaggccaagaactacctcttactgcctcaggaaaggcccctgatgcaggggcctcggactcgacccagaaagccgatccggtgcggggaagtcctcttcgcagtgggcggctggtgcagcggggatgctatcagcagcgttgaacgatatgatccacagactaatgaatggcgtatggtcgcttcaatgagcaaacgcaggtgtggagtcggggtgtccgtcctggacgatctgctgtatgcagttggcggccacgatggatcctcctatctgaattccgtcgaacgctacgatcccaaaactaaccagtggtcctctgatgtggctcccacttcaacatgcagaacatccgtaggggtcgcagtcctcggggggttcctgtacgcagtgggggggcaggacggcgtgtcttgccttaatattgtggaacgttacgacccaaaagagaacaagtggaccagagttgccagtatgagcacacggcgcctcggggttgctgtcgccgtgttaggggggttcctgtatgctgtgggggggagtgacggaacaagccccctgaacacggtggaacgctataacccgcaggagaaccggtggcacaccatagcgccgatggggacaaggcggaagcatctaggctgtgccgtatatcaggatatgatatacgccgtgggaggtcgagacgacactacagagcttagtagcgctgaacgatataatccccgcacgaaccagtggtcccccgtggtggccatgacaagccggcgcagcggtgtcgggctcgcagtggtaaatggccaactgatggctgtggggggttttgatggaacaacgtatcttaagacaatagaagttttcgacccagacgccaacacgtggcgcctatacggcggaatgaactatagacggctcggggggggcgtcggggtgattaagatgactcactgcgaaagccacatttggtag

SEQ ID NO: 27049 - DNA, 519 bp, synthetic construct
  source 1..519: mol_type = other DNA; note = Synthetic coding sequence
atgagctgcaccatcgagaaggccctggccgacgccaaggccctggtggaacgacttcgagaccatgacgatgcagctgaatccctcatcgagcagacaacggcactgaataagagagtggaggctatgaaacaataccaagaggagatccaggagttgaatgaggtcgcccgacaccggcccaggagcactctggtcatgggaatccagcaagagaatagacagatccgcgaactgcaacaggagaacaaggaactccgcaccagtctcgaggagcatcaatcagcactagagctcataatgagcaaatatcgggagcagatgtttcggctgttaatggcatctaagaaagatgatcctggaatcattatgaaactgaaagagcagcactccaaaatcgatatggttcaccgtaataagagtgaggggttctttctagacgcgtctcgtcatattcttgaagcacctcagcatggcttagaacggcggcacctcgaggctaatcaaaatgtacattag

SEQ ID NO: 27050 - DNA, 813 bp, synthetic construct
  source 1..813: mol_type = other DNA; note = Synthetic coding sequence
atgctgttcatcttccccctgagcctgccctggcggcccagctgctggaaggaaagctgttcaacggggcaacgccaggccggccgatcaagggaggattcagtgaccccacctcctagcagtccttggccaacgccccccgccggcgccatgtccacgaagcaggaggcccgcagagatgaaggcgaagcacggaccagggggcaggaggctcagttgagagacagagcccatctctccctgcacaaggacagtgccgacttgctcccactcgactctttgaaaaggctaggtacttctaaggatctccagccccggtcagtgatccagaggagacttgtagagggtaatcccaattggctgcagggggagcctccgcggatgcaggacctcattcatgggcaagaatcccgccggaagacaagtcgaacagagatcccagctctgttagttaattgcaagtgccaagatcagttgttacgggtggccgtcgataccggaactcagtacaataggatatctgcgggatgtctgtcccgacttgggctcgagaagcgggtgctgaaggcaagcgccggggacctggccccagggcctccaactcaggtggaacagctggagctacagctgggtcaggagacagttgtgtgtagcgctcaggttgttgacgctgaaagtcctgagttttgtttaggactgcagaccctcctctccctgaagtgttgcattgatctagagcacggagtcttaaggctcaaggctccgttttctgaacttcccttcctccctctataccaggagccaggccagtag

SEQ ID NO: 27051 - DNA, 243 bp, synthetic construct
  source 1..243: mol_type = other DNA; note = Synthetic coding sequence
accagctgctgccggcccagcagcagcgtgagcctgctgtgccaccccgtttgctcttgcagccctgcttgccagccaacatgttgtatccactccccctgccaagccagctgttacgtgcccgtgtcgtgccagccaatcatttatgtgacacctagctgtcagagttctggctgctgccagcccccctgtaccaccgccctgtgccgccctatatcctgttctacaccttcctgctgctag

SEQ ID NO: 27052 - DNA, 2013 bp, synthetic construct
  source 1..2013: mol_type = other DNA; note = Synthetic coding sequence
atggccctgggcgaggagaaggccgaggccgaggccagcgaggacaccaaggcccaatcttacggacgcggtagttgtagagagcgggagctcgacattcctggcccgatgtccggggaacaaccgcctaggttggaggccgaaggcggcttgatttctcccgtttggggagccgagggaatacccgcccccacctgctggattgggactgaccctgggggcccaagccgggctcatcaacctcaggcgagtgatgcaaaccgcgagccagttgctgaacgtagcgagcccgctttaagtggactaccccctgccaccatggggtctggggacctcctgctgagcggggagagtcaggtcgagaagactaaattatcgagcagtgaggagtttccacagaccctaagcctcccacgaactaccacaatctgttcgggacacgacgcggatacagaagacgaccctagccttgctgatcttccccaggccctcgatctcagccagcagccccactcctcggggctatcgtgcctctctcagtggaaatctgtcttatcacctggtagcgcagcccagccatccagctgttctatctctgcgagcagtaccggttcttctctccaagggcatcaggagagagccgaaccccgtggaggttcactcgcaaaagtgagctcctctttggagcccgtggtgccccaagagccatcctctgtagtagggctgggccctcgtccccagtggagtccgcaacctgtgttctccggaggggacgcaagcgggctgggacgtcggcgccttagttttcaggccgagtactgggcctgtgtgctgccagactcgctccctccttcaccagaccggcacagtcctctgtggaatcccaacaaggagtatgaggacctcctggactacacctacccattgagacctggacctcaactaccaaaacatctggattcgagagtacccgccgatcccgtgctgcaggactccggggttgaccttgacagcttctctgtctctccagcatccaccctcaaatccccaactaacgtgtcacccaactgcccccctgctgaagccacggcattgcccttcagcgggcccagagagccaagtctaaaacagtggccgtcacgggtaccccaaaagcagggaggaatgggactagcctcctggagtcaattggcctctacccccagggcacccgggagcagagacgcccgctgggagcggagagaaccagcacttcgtggagccaaagaccggctcaccattggtaagcatctagacatgggttcaccccaactccggaccagagacagaggctggccttctccccggcctgagagagagaaacgaaccagccagagcgcgagacgacctacatgcacggaaagcagatggaagagcgaagaagaggtggagtccgacgatgaatatctggctctgcctgctcgactcacacaggtgagctccctggtgagctatctggggtccatttcaacactggtaaccctccccacaggcgacatcaagggccagtctccactggaggtctccgatagcgacggccccgctagtttcccgtctagttcctctcagagccagctccctccgggcgccgccctgcagggctccggagacccggagggccagaacccctgtttcctccgttcctttgttagagctcacgacagcgccggtgaggggagcctgggctcgtcccaggccctcggcgtcagctccgggctgctcaaaacccgcccatctctgccagcgcggctggaccggtggcctttctctgatccagacgtggagggtcaactgccgagaaagggaggggagcagggcaaggagtcgcttgtgcagtgcgtgaagactttttgttgtcaattggaggagctcatctgttggctttataatgtggccgacgttactgaccacgggactgccgctcgctccaacctgacttctctcaagagtagtctgcagctctaccgattttag

SEQ ID NO: 27053 - DNA, 702 bp, synthetic construct
  source 1..702: mol_type = other DNA; note = Synthetic coding sequence
atgaagcagctgatcgaggacaccgagaagaacaaggtgtacgtggctatggtgacagactatggggcctttattaaaatccctgggtgcagaaaacagggcctggtgcataggacccacatgagctcctgtcgggtagataaacccagtgaaatcgtggatgtcggagataaagtttgggtgaagctgatcgggcgggagatgaaaaacgacagaatcaaggtctctttgagcatgaaggtcgtgaaccaggggactggaaaggacctggatccgaataacgttataatcgagcaggaagagaggcgccgccggtcttttcaagattacacaggccaaaaaattacactggaggcagtcctgaatactacatgcaagaaatgcgggtgcaaagggcatttcgctaaggactgcttcatgcagccaggtggtactaaatatagcctgatccccgacgaggaagaggaaaaggaggaagcgaaaagcgccgaatttgaaaagcctgatcctacaagaaatccatcacggaagcgcaaaaaggagaagaaaaaaaagaaacatcgcgatcggaagagtagcgactctgactcctccgacagcgagagcgatacaggcaagagggctagacatactagcaaggattcgaaagccgccaagaagaaaaaaaaaaaaaaaaagcacaagaagaaacataaggaatag

SEQ ID NO: 27054 - DNA, 492 bp, synthetic construct
  source 1..492: mol_type = other DNA; note = Synthetic coding sequence
atgggctggcggctgctgacccaggacgagggccccgccctggtgcccggggggcggctgggcgatctgtgggactaccatcagcataggtacttacagggcgtccccgagggggtcagagaccttccacccggcgtggccctgcccttggagtccaatttggccttcatgaatggcgtgtcctttacgaaaggctgttacatcgggcaagagttgactgcgagaactcatcacatgggggtcatacggaagcgcctattccccgttcgatttcttgaccccctgcccacgagcggcattacacccggtgcaaccgtcctgaccgcaagtggccagaccgtgggaaaattccgcgctggccagggaaatgtcggactcgctctgctgtggtctgagaaaatcaaaggtccactgcacattagagccagcgaaggggcccaggttgcactggcggcctccgttcctgactggtggcccaccgtgtccaagtag

SEQ ID NO: 27055 - DNA, 804 bp, synthetic construct
  source 1..804: mol_type = other DNA; note = Synthetic coding sequence
atggccatggagatgcggctgcccgtggcccggaagcccctgagcgagcggctgggacgcgacacaaagaagcacctggttgtgcccggggacaccataacaactgatacaggttttatgcggggacacggtacctacatgggggaggaaaaacttatcgcttcagttgcgggctctgtggaaagggttaacaagcttatttgtgtgaaggctctcaaaacgaggtatattggcgaggtgggcgacatcgtggtcgggaggatcacagaggttcagcaaaagagatggaaagttgagaccaattccaggctggactctgtgttacttctcagttccatgaatctgcctggaggggaactacgcagaaggtccgcagaagacgaacttgctatgcgggggttcttgcaagagggcgaccttattagcggcgtgctcgtccaggtttcaccttctctcgtcaagcggcagaagactcacttccatgacctgccttgcggcgcttccgtcattctcggaaacaatggctttatctggatatatcctacacctgaacataaggaggaggaggcgggcgggtttattgcaaatctcgagccagtatcccttgctgaccgtgaggtgataagccgcctgaggaattgcataattagcctcgtgacccagcggatgatgctttatgacaccagcatcctttactgctacgaagcaagcttaccacaccagatcaaagatattctgaagccggaaattatggaagagattgtgatggaaactcgtcaacgcctgctggagcaggaggggtag

SEQ ID NO: 27056 - DNA, 3111 bp, synthetic construct
  source 1..3111: mol_type = other DNA; note = Synthetic coding sequence
atgcccgtgttcaaggaggtgaaggtgcacctgctggaggacgccgggattgagaaagacgctgtcacccaggagacacgaatcagccctagcgggatcgattccgccactacagtggcagcagccactgccgcagccattgccactgctgcaccattgattaaggtgcaaagtgacctcgaggctaaggtaaattcggttacagagctgctctccaagcttcaggaaactgacaagcacctgcagagggttactgagcagcagaccagcatccagagaaaacaggagaagctccactgtcatgatcacgaaaaacaaatgaatgtgtttatggaacaacacatcagacatctcgagaaactgcagcagcagcagatagatattcagacgcactttatttcagcagctctgaaaactagttcgttccagccggtatccatgcccagtagcagagcagtggaaaagtattccgtgaagccggagcaccccaacttgggcagttgcaatccatctctctacaatacgtttgcaagtaaacaggcccccctcaaggaggtcgaagacacctcatttgacaaacagaaatctcccctggagacacctgcacctcggcggttcgcacccgtgccagtctcacgcgatgatgagctgtcaaaaagagagaatctgcttgaagaaaaggagaacatggaggtctcatgccatcgcggaaacgtgcgattactagagcagatcctaaataataatgactcattaacacgaaaatccgaatcttctaatactaccagcttgacacgaagcaaaatcggctggacacctgaaaagacaaataggtttccgtcatgcgaagaactagagactaccaaagtaacaatgcagaagagcgatgatgttctgcatgatctggggcagaaggagaaagaaaccaactcaatggtgcagcccaaagaatcactatcgatgcttaaactacctgatctgccgcagaacagtgtaaagctgcagacaacaaacaccacacgcagcgtcttgaaggatgcagagaagattctgcgcggcgtgcagaacaataaaaaggtgttggaggaaaaccttgaagcgattatcagggctaaagacggggccgccatgtacagtttaatcaacgctctgagtaccaatagggagatgtccgagaaaatacgaatacggaagaccgtagacgaatggattaaaactatcagcgcagagattcaggacgagctgtccaggacagactacgagcaaaagagatttgatcagaagaaccagaggaccaaaaagggtcagaatatgaccaaagacatcagaacaaacacgcaggacaagaccgtaaataaaagcgtgatcccacgcaaacactcgcagaaacagatcgaggagcatttccgaaatctgccaatgaggggcatgcctgcaagcagcctgcagaaggagcggaaagagggcctgctgaaagctacaaccgtcattcaagacgaagactacatgttacaagtctatggtaaaccagtctatcagggccatcggtccacacttaaaaaaggcccatacctcagattcaactctccttcccctaagagtagaccccagcgcccgaaagtaattgagagagtcaaaggtacaaaggtgaagagcatcaggacacagacagatttctatgccactaaacccaagaaaatggattctaaaatgaaacacagcgtaccagtcctgccccatggcgatcagcagtacctgttttcaccctccagagagatgcccacctttagcgggacacttgagggtcacttgatcccgatggccatcctgctcggccagacacagtctaatagcgacactatgccccccgcaggcgtgatcgtgtcaaagcctcatcccgttactgttaccacaagcattccaccttcgagtcgcaaagttgaaaccggcgtaaaaaaaccaaatatcgcaatcgtggaaatgaagtccgagaagaaagacccaccgcaactgacagtgcaagtactgccgtctgtggatattgattcaattagcaactcatccgccgacgtgctgagtccactctcatcccccaaagaagcaagcttgcctccagtccagacctggattaagacgcctgaaataatgaaagtggatgaggaagaggttaaatttcctggaacgaactttgatgaaatcattgatgtaatccaggaagaggagaaatgcgacgagatcccagatagtgagcctattctcgagttcaaccgttccgttaaggctgatagcaccaagtacaatggtcctccgttcccaccggtcgcttctaccttccagcccactgctgacatactagataaggtgattgaacgcaaggaaaccctggaaaatagcctaatccagtgggttgaacaagagatcatgagccgaattatcagtggcctgtttcccgttcagcagcagatagctccctcaattagtgtgtctgtgagtgaaacctcagaacctctgacttctgatattgtggaaggcacttcatcgggtgctcttcagctgtttgtggacgcaggggtgcctgtaaactcaaacgtcataaaacatttcgtgaacgaagccctggcggagacaatcgcggtgatgctcggagatcgcgaggctaagaaacaaggcccagtggctacaggggtctctggggatgcctcgacgaacgaaacctatctgccagccagagtatgcactccccttcccacacctcaacccacccctccttgcagcccatccagtcccgccaaagaatgtgttttggtcaagacccccgatagtagtccatgtgattcagaccatgacatggcttttcctgtaaaggagatctgtgcagaaaaaggggacgatatgcctgctattatgcttgttaacacccctacagtgacacccactaccactcctcccccagccgcagccgtgttcacccccaccctttctgatatttcaatcgataagttgaaggtcagctccccggagctgccgaaaccatggggcgacggtgacctgccattagaggaagagaatcctaattctccacaggaagagttacaccctagggcgatgtag

SEQ ID NO: 27057 - DNA, 3351 bp, synthetic construct
  source 1..3351: mol_type = other DNA; note = Synthetic coding sequence
atgtacggcagcgcccggagcgtgggcaaggtggagcccagcagccagtcccctggaaggtccccacgacttcctcgaagtccccgactgggccatcgccgaaccaattcaacgggcgggtcatcaggatcctcagtcgggggaggaagtggcaagacactgagcatggagaatattcaatccttgaacgccgcatatgcaacaagtggcccaatgtatctcagcgatcacgaaaacgtgggatcggaaacccctaagagcactatgaccttgggccgctccggcgggagattaccatacggggttcgcatgaccgccatgggcagcagcccgaatatagccagcagtggggtggcttcagatacaattgcattcggcgaacatcatctgccacccgtgtcaatggcatctacggtgcctcacagcctcagacaggcccgagataacacaatcatggatctgcagacacagctgaaagaagtgctacgcgagaatgatctgcttaggaaggacgtggaagtcaaagagagcaagctctcaagtagtatgaactctatcaagactttctggagtcccgaattaaagaaggaacgcgccctgcggaaagacgaagcctccaagatcaccatctggaaggagcaatatcgtgttgtacaggaagaaaatcagcacatgcagatgactatccaggcactccaggatgagttgcgtatccaaagagatctcaatcagttatttcagcaggactcctcctcccgcaccggagaaccttgtgtagcagagctaacagaggagaatttccagagactgcatgcagagcacgaacgccaggctaaggaactgttcctactgaggaagacattggaagaaatggaactgcgaattgagacacagaaacagactcttaacgcccgcgacgaaagtataaaaaaactgttggagatgctgcagtctaagggcctctcagctaaggctaccgaggaggaccatgagagaacccgccggttagccgaagcggaaatgcacgtgcaccatctggaatcccttttggagcagaaggagaaggaaaattcaatgctgagggaggagatgcaccgcaggttcgaaaatgcccctgacagtgccaaaacaaaggccctgcagaccgttatcgagatgaaggatagcaagatcagcagcatggaacggggtcttcgagacctggaggaggaaattcagatgctgaaatccaatggggctttgtcaacggaagagcgggaagaggaaatgaagcagatggaggtgtatcgttcccacagcaagttcatgaagaataaagtcgaacagctgaaggaagagctatcgtccaaggaggcccagtgggaagaactgaagaaaaaggccgccggcctgcaggccgagatcggccaggtgaagcaggagctcagccgcaaagatacggaactgttggctctccaaaccaaactcgagactctcactaaccagttctccgactcgaagcagcacatcgaggtacttaaggagtcactcacggcaaaggaacaaagggccgccattctccagaccgaagtggatgccctccggctgcgtctggaagaaaaagagaccatgttgaacaaaaaaaccaagcagattcaggacatggccgaagagaaaggtactcaagctggcgaaatccacgatctcaaagatatgctggacgttaaggaaaggaaagtgaatgtgctccagaaaaagattgagaacctgcaggaacagctgagggacaaggaaaaacagatgtcctcactgaaggagcgggtgaaaagcttacaggctgacacaaccaataccgacacagccctgacaacgctcgaggaggcgctggctgagaaagaacggaccatcgaacgtctgaaggaacaaagggatcgagatgagagagaaaaacaggaggagatcgacaactacaagaaagacctgaaagatcttaaagagaaagtctcccttttgcagggagacttgtccgaaaaagaagcttccctgctggatttaaaggagcacgcgtcctcccttgcaagctctggtttgaagaaagacagccgactcaagacactggagatcgctctcgagcaaaaaaaggaggagtgtttgaagatggaaagtcagctcaaaaaagcccatgaggccgctctggaagcaagggcttctccggaaatgtctgatagaattcagcatctggagagagagattactcggtacaaagacgaatcctcaaaggcccaagccgaagtcgaccgactactggaaatcctcaaggaagtcgagaatgagaagaacgataaagataaaaaaattgccgagctggagaggcaagtgaaggatcaaaataagaaagtggccaatctaaaacacaaggaacaagtggaaaaaaagaaatccgcacagatgctcgaggaagcccggcgcagagaagacaacctgaacgactcctcccagcaattgcaggatagccttaggaagaaagatgataggatagaagaactcgaagaggcattgagagaatctgtgcagatcaccgctgaacgggaaatggtgcttgcacaggaggagagcgccaggaccaatgccgaaaagcaggtagaggagctgctgatggccatggaaaaggttaaacaggagctggagtcaatgaaggctaaactgtccagtacccagcagtctctcgcagaaaaggagacacacttaaccaacctgagagccgagcgccggaagcatcttgaagaagtattggaaatgaaacaggaggccctcctggccgccatctcagaaaaagacgcaaatatcgctctgctcgagctcagttctagcaagaaaaaaactcaggaggaggttgccgctctgaagagagagaaagatcgtctcgtgcagcagctgaagcagcaaacccaaaaccgcatgaagttgatggccgataactacgaagacgaccacttcaagtcttcgcacagtaaccaaacgaaccacaaacctagcccggaccaaataatccaaccactactagagttagatcagaataggagcaagctcaagctgtacatcggacatttaacaacattgtgtcacgacagggaccctctaatcctgcgtgggctcacacccccagcatcatacaacttggacgacgatcaggccgcttgggaaaatgaactgcagaaaatgacgcggggccagctgcaggacgaactcgaaaaaggcgagagagacaacgccgagttacaggaatttgccaatgccattctgcagcagatcgcagatcactgcccggacatattagagcaggttgtgaatgccctggaggaaagttcttag

SEQ ID NO: 27058 - DNA, 816 bp, synthetic construct
  source 1..816: mol_type = other DNA; note = Synthetic coding sequence
atgcggcagctgcaccccgaggccatcgccgccatccagagcaaggccctgttctctaaagccgaggaacagctactctccaaggtgggctcaaccagtcagccaacgctggaaacatttcaggatttattgcaccgccatcccgatgctttctatctggcgcgcacagcaaaagcgcttcaggcccattggcaactgatgaagcagtactacttgttggaggatcagacagttcagcccctgcctaaaggcgatcaggtactgaactttagtgatgccgaagaccttattgatgactcgaagttgaaggatatgcgtgacgaggtcctggaacatgaattgatggtagccgaccgccggcagaaacgggaaataaggcagttggaacaagagctgcacaagtggcaggtgctggtagactcaatcaccgggatgtcctctcctgattttgacaaccagacacttgctgtcctgagagggaggatggtgcgctatctgatgcggagccgggaaatcaccctaggaagggctaccaaggacaaccagatcgatgtagacctctctcttgaaggtcctgcctggaagatctcccgaaagcagggcgtgataaagctcaaaaacaatggggacttttttattgcaaatgaagggcgtcggcccatctacatcgacggtagacctgtgctgtgtgggtcgaagtggcggctgtcaaacaatagcgtagtcgagattgcctcattgcgctttgttttcttgatcaatcaagacttgatcgctctgatccgggccgaagcagctaaaatcaccccacaatag

SEQ ID NO: 27059 - DNA, 2751 bp, synthetic construct
  source 1..2751: mol_type = other DNA; note = Synthetic coding sequence
atggagatgcccctgccccccgacgaccaggagctgcggaacgtgatcgataagctggcacagtttgtcgctcgaaatggaccggagtttgagaaaatgaccatggaaaagcagaaggacaacccgaagttttcatttttgttcgggggggagttttactcttattacaagtgtaaactagcactggaacagcagcaactgatctgcaagcagcagacgccggagctggagccagcagccaccatgccaccactcccgcagccaccactcgcccccgccgcccccatccctcccgcacagggtgcaccctctatggatgaattaatccaacagagccaatggaacctccaacagcaagaacagcacctgctggcacttaggcaggaacaggttacggcagccgtagcccatgccgtggaacagcagatgcaaaagcttttagaagaaacacagctagacatgaacgagtttgataacttgttacagcctatcatcgacacgtgcactaaggatgcgatctctgccggcaagaattggatgtttagcaatgccaagagccctccccattgcgagcttatggcaggacaccttcggaaccgcattaccgcagacggggcccattttgaacttcgtctgcacctgatctacctgattaatgacgtcctgcatcattgccaaagaaagcaagcaagagagctgctcgccgcccttcagaaggttgtggtgcctatatattgcacctctttcttggccgtggaagaggacaagcaacagaaaatcgcccgattgctacagctgtgggaaaagaacgggtatttcgacgatagcatcatccagcagctgcagtcacccgccctggggctgggacaataccaggcgaccctgatcaatgaatacagctccgtcgtgcagcccgtccagctggccttccagcagcagattcaaaccctgaaaacgcaacatgaggaatttgtgacctctctggctcagcagcagcagcaacaacaacagcagcagcaacagctacaaatgccccaaatggaggccgaagtcaaggcaacacctccacctcctgctccccctcctgcgccagcaccagcgccggccattcctcccacgacccagccagatgacagcaaaccgcctatacagatgcctggttctagcgagtatgaggcccctggaggcgtgcaggaccctgccgccgcgggacccagaggtcctggcccccacgatcagatcccgcccaacaagcccccctggtttgatcagccacaccccgtggctccctggggccaacagcagcctccagagcagcctccatacccacaccatcagggaggtcccccgcactgccccccatggaacaactctcacgaaggtatgtggggggagcaacgcggcgatccaggctggaatggccaacgagacgccccctggaataaccagccagacgcggcatggaactcccagtttgaaggcccatggaattcccaacatgagcagccaccctgggggggaggccaaagagaaccacccttccggatgcagaggccaccacactttaggggccctttccctccacatcagcagcacccacagttcaatcagcctccccatccacataattttaatcggttccctccacggtttatgcaggatgattttcctccgagacacccctttgaaaggcccccatacccacatagatttgattatcctcaaggtgactttccagccgaaatgggtccaccccaccaccaccctggccatcggatgccacaccctggaatcaacgaacacccaccttgggccgggccccagcatccggacttcggacctccgccacatgggtttaacggacagcctcctcacatgagacgtcaaggtccgccacatatcaaccatgacgatccctctctcgtgccaaacgtgccttattttgatttgcccgccggactgatggcgcctctcgttaagcttgaagaccacgaatacaagcccttggacccgaaggacatacggctgcccccccccatgccaccctctgagcgtctcctggcagcagttgaagccttttactcaccaccttcccacgatcgacctcggaactcagagggctgggagcagaacgggctctacgagttctttcgcgccaagatgagagctcggaggaggaaggggcaggagaagaggaattctggcccgtcacgatctcgctcaagaagcaaatctcgaggacgaagttcatctaggtccaattcgcgttcaagcaagtctagtggcagctacagtcgtagtaggagtcgcagctgctcacgatcttactcacgcagccggagccgcagtcgcagcaggtcgcggtccagtcgatcacgctcaaggtctcagtcccgtagccgctctaaatcctactctcccggacggcgccgcaggtcaaggagtaggtccccaacgcctccctcctcagcagggctgggatccaattctgccccaccaatacccgactccagactgggagaggaaaacaagggacaccagatgctcgtgaaaatgggctggtctggaagtgggggcctcggtgccaaggagcaggggatccaggacccgattaagggaggggatgtgcgcgataagtgggaccagtataaaggagttggagtagccctggacgatccctacgaaaactatcggcgcaacaaaagctattccttcatcgcccgcatgaaagcccgagacgagtgtaagtag

SEQ ID NO: 27060 - DNA, 963 bp, synthetic construct
  source 1..963: mol_type = other DNA; note = Synthetic coding sequence
atgagcaagagcgagagccccaaggagcccgagcagctgcggaagcttttcatcggggggctgtcttttgaaacaacggatgagtccctgcgctctcatttcgaacaatggggtaccctgaccgattgcgtagttatgcgcgaccctaataccaagcgctcaagaggcttcggattcgttacttacgcaactgtcgaggaggtcgacgccgcaatgaacgcccgaccacataaagtggacggccgagtggtcgaaccaaagcgggcagttagtcgagaggactcacaacgccccggcgcccatctgacagtgaagaagatctttgtggggggtattaaagaagataccgaagaacaccatcttagggattatttcgaacagtacggcaaaatagaagtgatagagattatgactgatagagggagtgggaagaagagaggcttcgcctttgttacttttgacgaccatgattccgtggacaaaattgtgattcaaaaataccacactgtcaacgggcacaattgcgaggttagaaaggccttgagcaagcaagaaatggccagcgcatcatctagccagcgcggccggtcagggtccgggaactttggcgggggacgaggaggggggttcggcggcaacgacaacttcgggaggggagggaactttagtgggcggggtggatttggaggctccaggggggggggaggctacggagggtcgggcgatgggtataacgggttcggaaatgacggctctaatttcggcgggggaggcagctataacgactttggaaattacaacaatcaaagttccaactttgggcctatgaagggtggaaatttcggtggacgctcatcaggaccatacgggggcgggggccagtactttgcaaagcccaggaatcaaggcggctatggtggctccagctcctcaagcagctatgggtccggcagacggttttag

SEQ ID NO: 27061 - DNA, 735 bp, synthetic construct
  source 1..735: mol_type = other DNA; note = Synthetic coding sequence
atggagctgaccatcttcatcctgcggctggccatctacatcctgaccttccccttatacctgctgaacttcttaggactctggtcctggatttgtaagaagtggtttccttatttcctcgtgcggttcacggttatttataatgaacagatggcaagtaagaaacgggaactcttcagtaacctccaggaatttgccgggccttccggaaaattgtccttgttggaagtgggttgcggaaccggcgcaaactttaaattctacccccccggctgcagggtgacctgtatcgatcctaatcccaacttcgaaaagttccttatcaagagtattgccgagaaccgccacctgcagttcgaacgtttcgtagtggccgcaggcgaaaacatgcaccaggtcgccgacggttctgtggacgtagtggtttgtacattggtactctgtagtgtgaaaaaccaggaacgtatcctgagggaggtttgccgcgtgcttaggcctggcggcgccttttatttcatggagcacgtcgctgctgaatgcagtacctggaattacttctggcaacaggtcctggatcctgcttggcacctgttatttgacggatgcaatcttacacgtgagagctggaaggccttagagagggcttcattctctaaactcaagctgcagcacattcaggccccactgagctgggagctggtcaggccccatatttatggatacgcggtaaagtag

SEQ ID NO: 27062 - DNA, 4125 bp, synthetic construct
  source 1..4125: mol_type = other DNA; note = Synthetic coding sequence
atgaccagcgccgccgagatcaagaagccccccgtggcccccaagcctaagttcgtcgtggccaacaataaaccagctcctccacccattgcacctaagcccgatatcgttattagctccgtccctcagagcacaaagaagatgaagccagccattgcccccaagccaaaggtcctgaagacttcaccagttcgtgaaatcgggcagtctccatccagaaaaatcatgcttaatcttgaaggacataagcaagaactggccgagtctactgacaattttaactgcaaatatgagggaaatcagagcaatgactatatcagcccgatgtgcagctgttcatctgaatgcatccataaacttggccatcgggagaatttatgcgtgaaacagctggtacttgagccattagaaatgaacgaaaacctggagaactcgaaaatagacgaaacgcttaccattaagactaggtctaaatgtgacctgtatggagagaaggccaaaaaccaggggggggtcgttcttaaagctagtgtgctggaggaagagctgaaagacgccctgattcatcagatgccaccatttataagtgctcaaaagcacagacccaccgacagccccgagatgaatggggggtgcaattccaatgggcagttcaggatagagttcgcagatttgagtcccagcccctctagcttcgagaaggttcctgaccatcatagctgtcacttacagctgcctagcgacgagtgcgagcatttcgagacctgtcaggacgatagcgaaaaatctaacaattgttttcagagctctgagctggaagcacttgagaatggtaaacgctcaacccttatcagttccgatggcgtcagcaaaaagtcggaggtgaaagatctgggacctttggaaatccatctcgtgccctacacccctaaattccccacaccgaagcccaggaagaccaggactgcccgactgctccggcagaaatgcgttgacactcctagtgagagcacggaagagcccggaaatagcgacagctccagctcgtgtctgaccgagaacagcttaaagattaacaaaatttctgttctgcaccagaatgtgttatgtaagcaagagcaggtggacaagatgaaacttggtaataaaagcgagttaaacatggagagcaatagcgacgcccaggaccttgtgaactcacaaaaagcaatgtgtaacgaaaccacttcattcgagaagatggcgccatccttcgataaggactcaaacttgtcatcagactccaccaccgtggacggctcatccatgtctctagccgtggatgaagggactggcttcatacgctgcactgtctcaatgagcctcccaaagcaactgaaactaacttgcaacgagcatctccagagcggcaggaatttgggtgtatctgcccctcagatgcagaaagagtcagtaataaaagaggagaacagcctgagaattgtcccaaaaaaaccccagcggcactccctacctgcaacaggggtgttgaagaaagccgcttccgaggagctcctggagaaaagctcttacccatctagtgaagagaagtcgtccgagaagtctctcgagcgcaaccacctgcagcacctctgcgcccagaacaggggggtctcctcttccttcgacatgccaaagagggcatcagaaaaacctgtgtggaagctaccccaccccatcctaccattctccggcaacccagagttcctgaagagtgtgaccgtaagttccaatagtgagccttcgacagccctgactaaacctcgcgccaagagcctgagtgcaatggatgttgaaaagtgtaccaagccctgcaaggatagcactaaaaagaacagttttaagaagctgttatctatgaaactgtcaatctgttttatgaaatctgacttccagaaattttggtccaaatcgtcccagctgggagacacgacgacaggtcacttgtcatctggcgagcagaagggcatcgaatcagattggcaggggctgctggttggcgaggaaaagcgaagcaagcctatcaaggcctacagtactgaaaactacagcctggaaagccagaaaaaaaggaagaaatctcggggtcagacttctgcggctaacggcctgagggccgagtccctggacgaccagatgctcagcagagaatccagttctcaggccccttacaagagtgttacctcactgtgtgcccccgagtatgaaaacattcggcactatgaggagatcccagagtatgagaacttaccttttattatggcaatcaggaagacccaggagctggaatggcaaaattcgtcctctatggaagatgctgacgcaaacgtgtacgaggtggaggagccctatgaggcacccgatggtcaactacagttaggaccaagacaccagcactcgagttcaggagctagccaggaggagcagaatgatttgggcttgggagacttgccatccgatgaggaagaaatcattaacagctctgacgaggatgatgttagttctgagagcagcaaaggtgaacctgatcccctggaagataagcaggacgaggacaatggcatgaaatctaaggtgcaccacattgctaaggagataatgagtagcgagaaagttttcgtcgacgtacttaaactcctccacattgactttcgcgacgccgtggcgcatgccagcagacagctgggaaagcctgtgattgaggaccggatactcaaccagatactgtactacctgcctcaattgtatgaactaaaccgggatctgctgaaagagctagaggaaaggatgctgcattggaccgagcagcagaggatagcagacattttcgtgaagaaggggccctatctcaagatgtattcaacatacattaaggagtttgataagaatatcgctctgcttgatgaacagtgtaagaagaaccccggttttgcagctgtggtgcgcgaattcgaaatgagcccacggtgcgcaaacctggctcttaaacactatttgctaaagcccgtgcaacggatcccccagtatcgattgctgcttactgactacctgaaaaacctgatcgaggacgcaggggactatagagacactcaggacgcactagccgtcgtgatcgaagtggcgaaccacgctaatgatacaatgaaacaaggggacaacttccagaaactgatgcaaatccaatacagcctgaatggacaccacgaaatcgtccaacccggcagggtcttcctaaaagaggggatattgatgaagctaagccgtaaggtcatgcagcctcgcatgttttttctcttcaacgacgccctgctgtacactacccccgtgcaatccggcatgtacaagttgaacaacatgctatcattggctggcatgaaggtcaggaaacccactcaggaggcataccagaacgaactaaagatagaatctgtggagaggagtttcattttatcagcatctagcgcaaccgagcgtgatgagtggcttgaggccatctcgagagctatcgaggagtacgctaagaagagaatcactttttgtccaagtcgcagcctggacgaggctgacagcgaaaacaaagaagaggtgtcacctctgggaagcaaggctcctatctggatcccggacactcgggctactatgtgtatgatctgtacctctgagtttacactaacctggagaaggcatcactgccgcgcctgcggaaaaatcgtatgccaggcttgttcatctaacaaatatgggctcgactacctgaagaatcagccagcacgagtttgtgagcattgctttcaggagctgcaaaagcttgatcatcagcactcccccagaattgggtcacccggcaaccacaagagccctagctccgccctgagtagcgtcctgcattctatcccttctggaaggaagcaaaaaaagattcccgcagctctgaaagaggtgtcagcaaacacagaggactcttctatgagcggttatctgtatcggagtaaaggcaataaaaagccttggaaacacttctggtttgttattaagaacaaagtgttgtacacctacgcagccagtgaggtaagatcagagatatag

SEQ ID NO: 27063 - DNA, 1446 bp, synthetic construct
  source 1..1446: mol_type = other DNA; note = Synthetic coding sequence
atggccagcgccgccagcgtgaccagcctggccgacgaggtgaactgcccaatctgccagggcactctgcgcgaacctgtgaccatcgattgcgggcataatttctgccgtgcttgtcttacacgctactgcgaaataccagggcccgacctggaagagtcgcccacttgtcccttatgcaaggagccattcagacccggtagctttcggcccaattggcaactagccaacgttgtggagaacattgagcgattgcagctcgtaagcaccctgggactcggggaagaggacgtgtgtcaggagcacggtgaaaagatctactttttctgtgaggacgacgagatgcagctctgtgtggtgtgtagggaggcaggggagcacgccacacacaccatgagatttctagaggacgctgccgccccgtatcgcgaacagatccacaagtgtttaaaatgccttcggaaggaaagagaagaaatccaggaaatacagtccagagagaacaagagaatgcaggtcctgttgacccaggtgagtacaaaacgtcagcaggtcatcagtgaatttgcacacctgaggaaattcctggaggagcagcagagtattctgctagcgcagctggaatctcaggatggggatatcctgcgccaacgagatgaatttgacttgttagtggcaggcgaaatctgccgcttttccgccttgattgaggagcttgaagagaaaaacgaaagacctgctcgcgaattgctgacagacatacgtagcacactcattcgatgcgaaactagaaagtgtcgaaaacccgtggccgtgagtcccgaactggggcaaagaatccgcgactttccccagcaggccttgcctctgcagcgcgagatgaagatgtttctcgagaacctgcccaatcatctcgtgattcccaccgctcacatatctctagacccacagacaagtcacccgaaactgctcctctccgaggaccatcaacgcgcccaattttcctataagtggcaaaactcaccggataatccacagagatttgacagagctacctgcgtcctggcacacactgggataactggcgggaggcacacctgggttgtgagcatcgatctggctcacggcgggtcatgtaccgtaggcgtggtttcagaggatgttcaaaggaagggggaactgcggcttaggccggaggaaggagtttgggccgtgcgattggcatggggcttcgtgtccgcactgggcagcttccctacgaggcttaccctgaaggagcagccaaggcaagtccgcgtgagcctcgattacgaggtgggctgggtgacgttcacaaacgccgtgactcgggagccaatctacacttttaccgcttcgtttacccgtaaagtgattcctttctttggcttgtggggtcgagggtcttcgttttccctgtctagctag

SEQ ID NO: 27064 - DNA, 468 bp, synthetic construct
  source 1..468: mol_type = other DNA; note = Synthetic coding sequence
atggacaccatgatgctgaacgtgcggaacctgttcgagcagctggttcgtagagttgaaattctgagcgaagggaatgaagtgcaattcatccagttggccaaggatttcgaagattttagaaaaaaatggcagcggacagaccacgaactggggaagtataaggacttgctgatgaaagcagagaccgagagaagcgcactggacgtaaagttgaagcatgccagaaaccaggttgacgtcgagatcaagcggcgccaacgagcagaagccgattgtgagaagttagagcgacaaattcagctaatcagggagatgctaatgtgcgatacgtcaggaagcattcagctctccgaggagcaaaagtctgccctggcttttctgaatcgcggccaacctagttcgagcaacgctgggaataagcgcctgtccaccattgacgaatctgggtctatccttagcgattag

SEQ ID NO: 27065 - DNA, 420 bp, synthetic construct
  source 1..420: mol_type = other DNA; note = Synthetic coding sequence
atggacaccatgatgctgaacgtgcggaacctgttcgagcagctggttagacgagttgagatcctgagtgagggcaatgaagttcagtttatccaactcgcaaaggattttgaggacttccgcaaaaagtggcagcgcaccgaccacgaattgggtaaatataaagacctgctgatgaaagctgaaacggaaaggagcgccctggacgttaagctgaaacatgcacgcaaccaggtggatgtcgaaattaaaagaagacagagggcagaagccgactgtgagaagcttgaaaggcagattcagctcatcagggaaatgttgatgtgtgatacttctgggtcaattcagctatcagaggagcagaagagtgccttggctttcctgaatagaggccaaccaagctcgtccaacgccgggtag

SEQ ID NO: 27066 - DNA, 3282 bp, synthetic construct
  source 1..3282: mol_type = other DNA; note = Synthetic coding sequence
atgggcggcaaggcctggccccggcgggccgtgggcaccgccggcggcccctgcgcagagcagattagcgctccgtttcagacactgctcatgcctcatctgcccctggcctcattccgaccaccgttctggggtctgcgccacagtcgcggcctgcccagatttcacagcgtgagtacccagtcagagccccatgggtcccccattagccgaagaaaccgagaggccaagcagaagcggttgagagagaagcaagcaacgctcgaggccgaaatcgctggagaatcaaagagcccggcagagtcaatcaaggcctggcggcccaaagaactggtgctttacgagattccaaccaaacccggggagaaaaaggacgtctcaggccccctacctcccgcatattcacctagatatgttgaagccgcgtggtacccttggtgggtgagagaaggttttttcaagcccgagtatcaggccaggctcccccaggctacaggtgaaactttttcgatgtgcatccccccaccaaatgtgacgggatctctccacataggacacgctctgactgtggctattcaggacgcccttgtccggtggcaccggatgaggggggaccaagtcctgtgggtgccggggtcagaccatgccggcatcgccacccaggccgtggtcgaaaagcagctctggaaggagaggggagttagacggcacgagctgagcagagaagccttcctgagagaggtctggcagtggaaggaggctaagggaggagagatttgtgaacagctcagagccctgggggcatctctggattgggacagggaatgcttcaccatggacgtgggtagctcagtcgccgtaactgaagcctttgtccggctatataaagcaggacttctgtaccgcaaccaccaactcgtaaattggtcctgtgctttacgctcagctatctccgatatcgaagtggagaaccgtccgctccctgggcatacccagcttcgcttgcctggatgcccgacacccgtgagctttggactattgttctcagttgccttcccagttgatggcgagccagacgccgaagtcgtagtgggtaccacacgccctgagaccttacctggagacgtcgcagtcgccgtccacccagacgactcccgctatactcacctccacggacgacagctcaggcatccactcatgggccagcccttgcccctcataacagattacgcggtacagccacatgtgggaaccggggcggtgaaggtgactccggcccactctccagcagatgctgaaatgggggctcgtcatggcctctcaccactgaacgtgatcgcagaagatggaaccatgacaagcctgtgcggagactggctgcagggcctacatagattcgtggcccgggagaagataatgtccgtgttatcggagtggggcttgttccgaggcctccagaaccaccctatggtgctgcctatttgttcaaggtccggcgacgtgatcgagtacttgctcaagaaccagtggtttgtaagatgtcaggagatgggtgccagagctgcaaaagccgtcgagtctggagccctcgagttaagcccgtcattccatcaaaagaactggcagcattggttcagtcatattggggattggtgtgtcagccggcagctgtggtggggccatcagattcccgcgtatctagtggtggaagatcacgcacagggggaggaagactgctgggtagttggaagaagcgaagccgaggcccgggaagtggcagctgagctgaccggaaggccgggggcagagttgactctagaaagggatccggacgtcctcgacacctggtttagttcagctctctttccattctctgcactcgggtggccccaggagactccagacctggcgcgcttttaccctctaagccttctcgagacgggctccgatctgctgctgttctgggtcggacgcatggtaatgctgggcacacaacttaccggccagctgccatttagcaaggtcctgttgcaccctatggtgagagatagacagggacggaaaatgtcaaaatcattgggcaacgtgctggaccctcgcgatatcatcagcggggtggaaatgcaagtactgcaggaaaagttgcggagcggcaatcttgacccagccgaactggctatcgtggccgccgcacagaagaaggatttcccccatgggattccggaatgtgggaccgatgccctgagattcactctatgttcacatggggtgcaggccggcgacttacatctttcagtatcagaggttcagagctgccgacatttctgtaacaagatttggaacgctctcaggttcattctgaatgcacttggagaaaaattcgtccctcagccagccgaagaattaagtccttcatctcccatggacgcctggatcctgagtaggctggctctggccgcacaggaatgtgagcgggggttcctgaccagagagctatctttggtgactcacgccctccaccatttctggctgcacaacctttgcgacgtgtacctcgaggccgtcaaaccagtgctttggcactcgccacgccctcttggtccaccccaggtccttttctcctgtgccgacctcgggctgcgattgctcgcaccgctgatgccattcttggccgaagagctatggcagcgcctgccaccgcgtcccggctgcccccctgctccttccatcagcgtggccccctatccctccgcgtgcagcctggagcactggcggcagcccgaactggaaagaaggttctctcgcgttcaggaagtagttcaagtacttagggccctccgagcaacttatcagttgacaaaagcccggccacgcgtcctccttcaaagctctgaacctggtgatcagggcctgttcgaagccttcttggaaccattgggcacactgggttattgtggtgccgtggggctgctgccccccggggccgctgctccctcggggtgggctcaggccccattgtccgataccgcccaggtctatatggagctgcaaggtcttgtggatccacaaatacagctgccacttcttgccgctcgaagatacaaactccagaagcagctggactctctgaccgcccggacccccagtgaaggtgaggctggaacgcagcgccagcagaaactgtctagtctgcagttggagctgtccaaactggataaggccgcttctcacctccggcagcttatggacgagccgccagctcctggatctcccgagctgtag

SEQ ID NO: 27067 - DNA, 231 bp, synthetic construct
  source 1..231: mol_type = other DNA; note = Synthetic coding sequence
atgaacagcgtgggcgaggcctgcaccgacatgaagcgggagtacgatcagtgtttcaatcgctggttcgcagagaaattcttaaagggggattcttccggagacccctgcacagacctcttcaaacgctaccaacagtgtgtccagaaggctatcaaggagaaggagattcccatcgaggggctggaattcatgggacatggcaaggagaagccagagaacagtagctag

SEQ ID NO: 27068 - DNA, 735 bp, synthetic construct
  source 1..735: mol_type = other DNA; note = Synthetic coding sequence
atggagctgaccatcttcatcctgcggctggccatctacatcctgacgttccctctgtacttgttaaacttcctgggtctctggtcatggatttgcaagaagtggttcccatattttcttgtccgttttactgtcatttataacgagcaaatggctagtaagaagcgggaactgttcagcaatcttcaggaatttgccggacctagcgggaaactgtccctactcgaggtcggttgtgggactggcgcgaattttaaattctacccacccggctgtagggtgacttgcatcgacccgaaccctaatttcgaaaagtttctaatcaagtctattgctgagaatagacaccttcagtttgagagatttgtggtggctgccggcgagaacatgcaccaggtggccgacgggtccgtggatgtggttgtgtgcacgctcgtgttgtgcagcgtgaaaaaccaagaaagaatccttcgggaagtctgccgcgttttaagaccgggtggcgcattttatttcatggagcatgtggccgcagagtgtagcacctggaattatttctggcagcaggtactagatcctgcctggcacctcctgttcgacggatgtaatctgacccgcgagtcctggaaagcgttagagcgggcttctttctccaagctgaaattgcagcatatacaggcccctctttcctgggagctcgtgcgtccgcatatctacgggtacgcagtgaagtag

SEQ ID NO: 27069 - DNA, 774 bp, synthetic construct
  source 1..774: mol_type = other DNA; note = Synthetic coding sequence
atgccccacctgcccctggccagcttccggccccccttctggggcctgcggcactcacggggcttaccaaggtttcatagcgtgagtacacagtctgaaccacacggctctcctataagcagacgcaaccgcgaggccaagcaaaagcgtctgagagagaagcaggccacactggaggccgagatcgctggcgagagcaaatcccccgctgaatctataaaggcctggcggccaaaggaactcgtcctgtatgagatcccaacaaagccgggggagaaaaaggacgtgtccggtcctctgcctcccgcttactcccctagatacgtggaggcagcctggtatccttggtgggtacgcgaaggattcttcaagcccgagtaccaggcccggttgccccaggcaaccggagagacattctcgatgtgcattcctccgccaaatgtcactggtagcctccacattgggcacgccctgacagtcgccatccaggatgcattggtgcgctggcatagaatgcgtggcgatcaagtgctttgggtgcctggctctgatcacgccggaatcgcaacccaggccgtagtggaaaaacagctctggaaggaacggggagtccgccgccacgagctgtctcgggaggcattcctgagggaagtttggcaatggaaggaggccaagggcggcgagatttgtgagcagctcagggctttaggagccagtctggattgggaccgagttttctatcacgggtgctggctgctctccggttgcgactag

SEQ ID NO: 27070 - DNA, 804 bp, synthetic construct
  source 1..804: mol_type = other DNA; note = Synthetic coding sequence
atgagcaagagcgagagccccaaggagcccgagcagctgcggaagttatttatcggtgggttatcgtttgaaactacagacgaatctttgcgctcccacttcgagcagtgggggacactcacagattgcgtagtcatgagggaccccaacaccaaacgcagcaggggatttggctttgtcacgtatgccactgtcgaagaggtggacgccgctatgaacgcacgcccccataaagtggacgggcgggtggtggagcccaaacgagctgtgtccagagaagattcccagaggccgggggcccatttaactgtgaagaagatctttgtgggtggtatcaaggaagatacggaagaacaccacctgagggattattttgagcagtacggtaaaatagaggtcatcgagattatgaccgatcgaggttctggcaagaaaaggggcttcgccttcgtgacctttgacgatcacgattccgttgacaaaatcgttatccagaagtaccatacagtgaatggccacaactgtgaggtaaggaaagccctctctaagcaagaaatggcatccgcttcaagttcccaacgtggccggagtgggagcggtaacttcggtggtgggtcttataatgactttgggaactacaacaaccagagctctaactttggaccaatgaaaggcgggaatttcggggggcggtccagcgggccgtacggtggtggtggccagtacttcgccaaaccccgcaaccagggcggatacggggggtcatctagctccagctcgtatgggtctggacgcaggttctag

SEQ ID NO: 27071 - DNA, 531 bp, synthetic construct
  source 1..531: mol_type = other DNA; note = Synthetic coding sequence
atgaacgagagcaagcccggcgacagccagaacctggcctgcgtgttttgccgaaagcacgatgactgccccaacaagtacggtgagaagaaaactaaggagaagtggaacctcactgtgcattactattgcctgcttatgagtagcggcatctggcagagaggcaaggaggaggagggggtctatggattcctaatagaggacattcggaaggaggtgaatagggcctctaaactgaaatgttgtgtatgtaagaagaatggcgcttcaatcgggtgcgtagcgcctaggtgcaaaaggagttatcacttcccgtgcggcctgcagagggaatgtatcttccagttcactggaaactttgcctccttttgttgggatcacagacccgtgcagattatcacctccaataactacagagaatctcttccatgtacgatctgcctggaatttatagagccgatcccttcctacaacatactgaggtccccctgttgcaaaaatgcctggttccatcgtgactgcctgcaatag

SEQ ID NO: 27072 - DNA, 3171 bp, synthetic construct
  source 1..3171: mol_type = other DNA; note = Synthetic coding sequence
atgctgagcgtggtggagaacggcctggacccccaggccgccatccccgtcataaaaaagaagttagtgggcagcgttaaggctctccagaagcagtacgttagcctggataccgttgtgacgagcgaggatggcgatgctaataccatgtgttctgccctggaggctgtgtttatccacggcctgcacgccaagcacattagggctgaggcgggaggcaagcgtaaaaagtcagcgcaccagaaaccactaccgcagccggtgttttggccactgctgaaggctgttacgcataagcatattatctccgagctggaacatctgaccttcgtgaacacagacgtgggacggtgccgcgcgtggctgagactggccctgaatgacggcctcatggagtgttacctcaagctcctgttacaagagcaggcgaggctccacgaatactaccagccgaccgctctgctccgtgatgccgaggaaggggaattcctgctgtcatttctgcaaggtcttacctcactctcatttgagctgtcgtacaagtcggcaatactgaacgagtggactctgactccccttgcactctccggcttgtgccctctcagcgaactggacccgttaagcacctccggtgccgaattgcaaagaaaggagagcttggattccatctcccattccagcggctctgaagacatcgaggtccatcactcagggcataaaatacggcgcaaccaaaaactgacagccagttccctgtccttggacactgcatctagttctcagttgtcctgctctctgaactccgatagctgcctgttgcaggaaaatggaagtaagtcccccgaccactgtgaggagccgatgagctgcgatagtgatttaggtacagccaacgccgaggattcagacagatccctgcaggaggtactcttggagttctccaaagcacaggtaaattcagtgccaacaaacggtctgtctcaggaaacagagattcccacaccacaagcctccctgtcattacacggtctgaatactagtacctacttgcattgtgaggcccccgccgagcccctccccgcccaagctgcgtccggaacccaggacggggtgcatgtgcaggaacctagaccccaggctcccagcccactggatctgcagcaaccagtggaaagcacatcgggccaacagcctagctcaaccgtgtctgagaccgcaagagaagtcgggcagggaaatggtctgcagaaagctcaggcccatgacggcgccggtctgaaactggtcgtgagcagtcccaccagcccgaagaataaaagctggataagtgaggacgacttctaccgaccttcccgtgagcagcctttagaaagtgcctccgaccatcccatagcgagttatcggggcacgcccggctccagacctgggctgcacaggcacttttcgcaggaaccccgtaagaactgctctctaggggccctggaccaggcctgcgtgccttccccggggcgtaggcaagcacaagccgcacctagtcagggacacaaatcattccgggttgttcataggcgccagatgggcctgtctaatccgttcagaggtctgatgaaattgggaacggtggaaagacgcggagctatgggtatctggaaggagctattttgcgaactctcccccctggaatttagactctacctctctaatgaggagcatacgtgtgtggaaaattgtagcctgctgagatgtgaaagtgttggccctgcccactctgatggccgtttcgaacttgtgttctcgggcaagaaactagcactcagagctagctcacaggacgaggcagaggactggcttgacagagtcagggaagccctgcaaaaggtacgcccacagcaagaggacgagtgggtgaacgtccagtatcctgatcagcccgaggagccacccgaagctccacagggttgcctttcaccatcggatctgttatctgagccagccgcccttcagggcacacagttcgattggtccagcgcccaggtgcctgaacccgatgccattaaggagagcttactctacctgtatatggataggacttggatgccgtacatctttagcttgagcctcgaagccctcaagtgctttagaatccgtaataacgagaagatgctgagcgacagccacggggtcgaaaccattagagatatactcccagatacctccctgggcggaccgagtttttttaagatcataactgccaaagcagtccttaagctccaagccgggaacgccgaggaagctgcgctgtggcgtgacttggttcggaaggttttggcaagttatctcgagaccgctgaggaagcagtcaccctcggtggatcactggatgagaattgccaggaggtccttaaatttgccactagagaaaatggattcctgctacagtacctggtggctattcccatggaaaaggggctcgattcccaagggtgcttttgtgcaggctgcagtcggcagataggcttcagcttcgtgcggcccaagctctgcgcattctccggtctctattattgcgacatctgtcaccaagacgatgccagcgtgatccctgctcgtatcattcacaattgggacctgacaaagaggccaatttgcagacaggcattaaaatttctcacccagattcgcgctcagccgctcattaatctgcaaatggtcaacgccagcctatacgaacacgtggagaggatgcatttgatcgggcggaggagagagcaactcaagctcttgggggactatctgggcctgtgcagatctggtgctctgaaagagctttctaagaggttgaatcaccgtaactatctattggaaagcccgcataggttttctgtggccgatctgcagcagatcgcagatggggtgtacgaggggtttctaaaggccctgatcgagttcgcctctcagcacgtttatcattgtgatctttgcacccaacgcgggtttatctgccagatctgtcagcaccacgatattatctttcccttcgaatttgatactaccgtccggtgcgcagaatgtaaaacagtattccaccaatcttgtcaggctgtcgttaagaagggctgcccccgatgtgctcgtcgaaggaaataccaggagcaaaatattttcgcatag

SEQ ID NO: 27073 - DNA, 390 bp, synthetic construct
  source 1..390: mol_type = other DNA; note = Synthetic coding sequence
atggccgagctgatccagaagaagctgcagggcgaggtggagaagtatcagcaactccagaaggacctgtctaagtcaatgagtggccgtcagaaacttgaagctcagctgactgagaacaacatcgttaaagaagaactggctcttctggatggctccaacgtggtctttaagttgttggggccagtccttgtcaagcaggagttgggcgaagcacgggctacagtcggcaagaggctcgactacatcacagccgagataaaacggtatgaatcacagctgagagatcttgaacggcaatctgagcagcagcgtgaaacacttgctcagttacagcaagagtttcagagagcccaggcagccaaagccggggcacctgggaaggcgtag

SEQ ID NO: 27074 - DNA, 348 bp, synthetic construct
  source 1..348: mol_type = other DNA; note = Synthetic coding sequence
atgaccaagaagcggcggaacaacggccgggccaagaagggccgggggcacgtgcagccaattaggtgcacaaactgtgcaaggtgcgtgcctaaagataaagccatcaagaagttcgtgatccgcaacattgtggaggccgccgccgttagggatatatccgaggttagcgtgttcgatgcgtacgtcctgccgaagctttacgtgaagctccactactgtgtgtcctgtgcaattcactccaaagtcgtgaggaacagaagtcgcgaagccaggaaagaccgcactcctccacctcgcttccgaccggcaggagctgccccgggacctccaccaaaacctatgtag

SEQ ID NO: 27075 - DNA, 1899 bp, synthetic construct
  source 1..1899: mol_type = other DNA; note = Synthetic coding sequence
atggacaccatgatgctgaacgtgcggaacctgttcgagcagctggttagaagagtggagattctttcagaagggaatgaggtccagtttatccagttggccaaagattttgaggactttcgtaaaaaatggcaacgtacagatcacgagctgggcaagtataaggacttgctaatgaaggccgagacagagaggtcagcactcgacgtaaagctcaaacacgctaggaatcaagtcgatgtcgagatcaaaagaagacagcgtgccgaggccgattgcgaaaagctggagcgtcaaatccagctcatccgggagatgttgatgtgcgacacaagcggatccatacaactgagtgaagaacagaagtcggcgctggcattccttaacagagggcagccaagttcctccaatgctggtaataaaaggctctccacaatcgacgagagtggtagcatcctgtcagatatcagctttgacaaaaccgatgaaagcctggattgggactcttctctagtgaagaccttcaaactaaagaaaagagaaaaaaggagatctaccagcaggcagtttgtggacggacctcccggacctgttaagaaaaccaggagcattggaagcgcagtggaccaggggaatgaatctatcgtagctaagacaacggtaacagttccgaatgatggtggccccattgaggctgtgtccaccatagagactgtgccttactggacaagatcccgcagaaagaccgggactttacagccttggaacagcgattccactcttaattctaggcagctggagcctaggactgaaacagatagtgtgggcactccccagtccaatggaggcatgcgcttacatgacttcgtgagtaagaccgttatcaagccagagtcgtgcgtgccatgcggaaagcggatcaagtttggcaaacttagcctgaagtgtcgcgactgcagggtggtgtctcaccctgaatgccgcgacaggtgccccctgccctgtatccctacactaattggtactcctgttaaaattggcgagggcatgctggccgatttcgtgagccagacctccccgatgatcccttccatcgtggttcattgcgtgaacgagattgagcagaggggcctcaccgagaccggcctttacagaatctcgggatgtgaccgtaccgttaaggagcttaaagaaaaatttttgcgcgtcaagaccgtgcccctgctgtcgaaagtcgacgacatacatgcaatttgttccctgctgaaggacttcctgcgaaacctgaaagaacctctgcttacctttcgactgaatcgggcttttatggaggctgccgaaatcactgacgaggacaattcgattgccgcaatgtaccaggcggtcggcgaactccctcaggccaatcgggatactctcgccttcctgatgatccacttacaacgtgttgcccagtccccccacacgaagatggacgtcgccaatcttgctaaggtgtttggtccaactattgtggcccatgcagtgcccaacccagaccctgtgactatgctgcaggacatcaagaggcaaccaaaggttgtcgagcgccttctctctttgcctctggaatattggtcacagttcatgatggtcgagcaggagaacatagaccccttacatgtgattgaaaattcaaatgccttctccacaccacagacgccagatatcaaggtgagcttgctgggtcctgtgacaacgcccgagcaccaactgctgaaaacaccctccagctctagcctctctcagcgagtccggagcaccctgactaaaaataccccacggttcggtagcaagagtaaaagcgccacaaatctggggcgccaaggtaattttttcgccagccccatgctgaaatag

SEQ ID NO: 27076 - DNA, 390 bp, synthetic construct
  source 1..390: mol_type = other DNA; note = Synthetic coding sequence
atggccgagctgatccagaagaagctgcagggcgaggtggagaagtaccagcagctccagaaagatctttccaagtccatgagcggcaggcaaaagctcgaggcccagctgaccgagaataatatcgtgaaggaggagcttgcactgctggacggttctaatgtggtctttaagcttctgggtcctgtgctggtcaaacaggaattaggggaggccagagcaacagtggggaagcgcctagattacattactgccgagattaagagatatgaatcccagctccgggatcttgaacggcagtccgagcagcagagagagaccctggcgcagttacagcaggaattccaacgggcacaggccgctaaagcaggtgctccaggcaaggcatag

SEQ ID NO: 27077 - DNA, 5220 bp, synthetic construct
  source 1..5220: mol_type = other DNA; note = Synthetic coding sequence
atgatggagggcaacggcaccgagaacagctgcagccggacccgggggtggctccagcaggataacgacgccaagccttggttatggaagttctcaaattgttttagccggcctgaacagactcttccccattcaccacagaccaaagaatacatggagaataaaaaggtagctgtggagctgaaagatgtgccttcccccctgcacgcggggtctaaactattccccgcggtgcctttacctgacatccggtcactgcagcagcccaaaatacagctgtcatcggtacccaaggtgtcttgctgtgctcattgcccaaacgaaccatcgacatcgcccatgcgatttggcggagggggaggcggatccggcggtacctcgtctctgatccaccccggggcattactcgacagccagtcaacaagaactatcacctgtcaggtgggctccggttttgccttccagtctgctagtagtctacaaaacgccagtgcacggaataatttggcgggcattgctagtgactttccttctatgtgtctggaatctaatctaagctcttgcaaacacttgccctgttgcggcaagctccacttccaaagttgccacgggaatgtccataaacttcatcaattcccgtcactgcaaggatgcacctccgcaggttacttcccatgcagtgacttcaccagcggcgcccctgggcacttagaggaacacatttcccagtctgagctaaccccacatctgtgcacaaatagtttacatctcaatgtggttcccccagtgtgtctcaaaggctccttatattgcgaggactgcctcaataagcctgctcgaaatagcatcatcgacgccgcaaaggtgtggcccaacatccctccccctaacacacagcctgcaccactggcagttcccctctgcaacgggtgtggtactaaaggtacaggcaaagaaacgacactcctgttggccacttctctagggaaagccgcttctaaatttgaagtggccgtggctggacaggtgctggagaacctgcctccaatcggcgtcttctgggacatagaaaactgctctgtcccatccgggcgttctgctacggctgtcgttcaaagaatccgggaaaaattcttcaagggccaccgcgaggcagagtttatctgcgtatgtgatatttccaaagagaacaaggaggtaatccaggagttaaataattgtcaggttacagtcgcccacataaatgccaccgctaagaatgcagcggatgacaagctgaggcaatcccttaggcgctttgcaaatacacacactgcaccagcaaccgtggtccttgtttccaccgatgtcaattttgccctggaactctccgacctccgccatcggcatggatttcatattatcctggttcataagaaccaagctagcgaggccctcctccatcacgctaacgagcttatccgatttgaggagttcattagcgacctgcccccacggctgccgctgaagatgccacaatgtcataccctgctgtatgtttacaatctgccagcgaataaagacggcaaatccgtgagtaaccgtctcaggcgtttaagtgacaactgcggaggaaaggtcctgagcatcacaggctgctctgcaatcctgcgcttcatcaatcaggactccgctgaaagggcgcagaaaaggatggaaaatgaggacgtttttggtaaccggatcatcgtctcttttacgcccaagaacagggagctatgcgaaaccaagagtagcaacgcaatcgcggataaggtgaagtcacccaagaaacttaagaatcccaagctgtgcctgattaaagacgcctctgaacagtcttcaagcgctaaagctacgccaggcaagggatcccaggccaattccggttccgcaacgaaaaacacaaatgtgaaaagtttacaggaattgtgtagaatggagtcgaagaccggacatagaaacagcgaacaccaacaggggcacctgagactcgttgtgcccactcatggcaattctagtgctgctgtgtccactccaaagaattctggagtagctgaaccagtgtacaagacaagtcaaaaaaaagagaatctgtccgcacgaagtgtgacatcatccccggtagagaagaaggataaggaggaaactgtcttccaggtctcataccctagtgcttttagcaagctcgtcgccagcagacaagtgagtcccctgcttgcatcccagtcttggtctagcagatccatgtccccgaacctactgaaccgcgcctcccccctcgccttcaacatcgctaatagctcttctgaggcagactgccccgaccctttcgcgaacggcgccgacgtgcaggtaagcaacatcgattataggctctcgcggaaagaactgcagcagctcctccaggaagcctttgcccgccacggaaaggtgaagagtgtcgagctatctccgcacaccgactatcaactgaaggccgtcgtgcagatggaaaatcttcaggacgccatcggagctgtaaatagtctgcacaggtataaaattgggtccaaaaaaatcctcgtttccctggcgaccggagcggcgagcaaaagcctgagcttactgtccgccgagacgatgagcgtgctgcaggacgcgccggcctgttgcctcccgctttttaaatttactgatatctacgagaagaaattcggccacaagctcaacgtgagcgacctgtataagctaaccgacacggtagcaattcgtgagcagggcaatggccgactggtatgcttgttaccatcttcccaagctaggcaaagccctctgggttcatcccaatcccatgacgggtctagcactaactgttcacctataatcttcgaagaactcgaataccacgagccagtgtgccgccaacattgctctaacaaagacttcagtgagcacgagttcgatcctgattcttataagattcctttcgtgatactgtccctcaaaactttcgcaccacaggtgcacagcctgcttcagacccacgaaggcactgttcctttgctaagttttcccgattgctatatcgccgagttcggggatctggaggtcgtccaggagaaccagggcggagtgcctctcgaacatttcattacgtgtgtgccaggcgtgaatatcgccactgcccagaacggtatcaaggtcgttaagtggatccacaacaagcccccgccacctaataccgatccttggttgttaaggagcaagtctccagttggtaatccacagctaatccaattctcccgggaggtcattgacctgctgaaatcccagccatcctgcgtcatcccaatttctcacttcattccgtcataccaccatcactttgcaaaacagtgccgggtgtcggactatgggtacagcaaactgatcgagcttctagaggctgttccccatgtcctccagattctaggcatgggctccaagagacttctgactctaacacatcgggctcaagtaaaacgattcacccaggaccttctgaagttgttaaagagtcaggcctccaagcaggtgatagtgagagagttcagccaggcctaccattggtgcttctccaaggattgggacgtgactgaatatggagtatgtgagctgattgacatcgtctctgagatcccagacacaaccatctgcttgtcacagcaggataatgaaatggttatctgcattcccaagcgagagcggacacaggacgaaatcgaaagaacgaaacaattttccaaggatgtggttgatctgctgagacaccagccgcactttcgcatgccgttcaacaagtttatcccgtcttaccatcaccactttgggcgccagtgtaaactagcctattacggcttcaccaagctcttggagctgttcgaagcaattcccgacaccctgcaagttcttgagtgtggcgaagaaaagatcttgacgctgactgaggtggaacgtttcaaagctctagcagcccagtttgttaagctgttacgcagtcaaaaggacaactgcctaatgatgactgacctcctgaccgaatatgctaagaccttcggatataccttccgtctgcaagattacgacgtttcgtcgatctccgctctcacacaaaagctgtgtcatgtcgtcaaggtggccgacatcgagagcgggcggcaaatccagttgattaaccgtaaatctctccgctccctgaccgcccagctgttggtgcttctgatgagctgggagggtactactcacctgtctgtggaggagttaaaaaggcattatgagtcaacccacaatacgcctctgaatccttgtgagtacggatttatgacattgaccgaactgctcaaatccctcccatatctggtggaagtgtttaccaacgataagatggaggaatgcgtcaaacttacgtccttgtatctgttcgctaaaaacgtgagatccctccttcatacttatcattaccagcagattttcctgcatgaattctccatggcctacaccaaatacgtgggagagacactccagcctaagacctacggccatagctcagtggaggagctgttgggcgctattcctcaagtggtgtggatcaaagggcacggccataaaaggatcgttgtacttaagaatgatatgaagtcacgactttcttctctcagcttgagcccagcaaaccatgaaaatcagcccagtgaaggcgagaggatactggaggtgcccgagtcccacacagcatccgagttgaaattgggggcggacggaagcgggccctcccataccgaacaggagctgctgcgccttaccgatgattcacccgtcgatctactttgcgcacctgtcccttcctgtttgccgtcaccacaactgaggcctgacccagttatacttcagtcagcagaccttatccagttcgaagagcggcctcaggagccaagtgaaatcatgattctgaaccaagaagagaaaatggagattcctattcctggaaagagtaagacattgacctcagacagctcttcctcctgcatctccgccgccgtccccgtacccccatgcccatcttcggagaccagtgagtctttgctgtcgaaagatcctgtggagagcccggctaaaaagcaaccaaaaaaccgtgtgaaattggccgccaactttagcctagctcctatcacgaaactttag

SEQ ID NO: 27078 - DNA, 390 bp, synthetic construct
  source 1..390: mol_type = other DNA; note = Synthetic coding sequence
atggccgagctgatccagaagaagctgcagggcgaggtggagaagtatcagcagctgcagaaagacctttctaagtccatgtctggaagacagaagttggaggctcaactcaccgaaaataacatcgtgaaggaggagctagccctcctggatggatccaacgttgtgtttaaacttctgggtcccgtgctggtgaagcaagagctgggtgaagccagagccacggttgggaagaggctggattacatcactgcagagatcaagagatacgaatcacagctccgggatctagaaagacagagcgaacagcagagagaaacactagcacagttgcaacaagaattccaaagggcccaggcagctaaagcgggggctccaggtaaggcgtag

SEQ ID NO: 27079 - DNA, 432 bp, synthetic construct
  source 1..432: mol_type = other DNA; note = Synthetic coding sequence
atgaccctgcggtgcctggagcccagcggcaacggcggcgagggcactcgttctcagtggggcacagcagggagcgccgaggagccatccccccaggcagccagactcgctaaagcgcttagagagctcgggcagaccggctggtattggggctcaatgactgtgaatgaggctaaggagaagttgaaggaggccccggagggtaccttcctgatccgggattcgtcccatagtgactaccttctcacaatctccgttaagaccagcgcagggcccactaatttgagaattgaataccaggatggcaaatttcgtctggactctatcatctgtgtgaaatccaagttaaaacagtttgatagcgtggtacacctcattgactactatgtgcagatgtgcaaagacaaaagaaccgggcccgaagccccctag

SEQ ID NO: 27080 - DNA, 156 bp, synthetic construct
  source 1..156: mol_type = other DNA; note = Synthetic coding sequence
atgagcagcagcatgtggtacatcatgcagagcatccagagcaagtactcacttagcgagagactgattaggacgattgccgccataaggtctttccctcatgacaacgtggaggatctcattcgcggaggggccgacgtgaactgtacacactag

SEQ ID NO: 27081 - DNA, 1902 bp, synthetic construct
  source 1..1902: mol_type = other DNA; note = Synthetic coding sequence
atggaggagagccccctgagccgggcccccagccggggcggcgtgaactttctcaatgtcgcacgcacctatatccctaatactaaggttgaatgtcactacacactcccacctggaactatgcccagtgcctccgactggattgggattttcaaagtggaggcagcgtgtgtacgggattatcacacatttgtttggagctcggtgccggaatccacgaccgatgggtctccaatccatactagcgttcaattccaggcttcctacctgccgaaaccaggagctcagttgtatcagtttagatatgttaaccgacagggccaggtgtgtgggcagtccccacccttccagttccgggagcctcggcctatggacgagttagtaaccctcgaggaggcagatgggggctcagatatcctgctggtggtgccaaaagccacggttctccagaatcagctggacgagtctcaacaagagagaaatgacctcatgcaattgaaactgcagcttgagggtcaggtaacagaactgagaagtagggtgcaggagctggaacgggccctcgccactgccagacaggagcacaccgagttgatggagcagtacaaaggaatcagccgaagtcatggcgaaataacagaagaacgggatatcctttccagacaacagggagaccacgtcgccagaatcttggaattagaggacgacatccagacaatcagcgagaaggttttgactaaggaggtcgagctggataggcttagagacaccgtgaaagcactcacacgtgaacaggagaagctgctcggccagttaaaagaagtccaggccgataaggagcagtctgaagccgaactccaagtagctcaacaggaaaatcatcatctgaacctggacctgaaggaggccaaatcttggcaggaagagcagtccgcccaagcccagcgcctcaaagacaaagttgcccagatgaaagatacactggggcaagctcagcagcgggtggctgagctggaaccgttgaaagaacagctccgtggggcccaggaactagcagcaagctctcagcagaaagccacactgctcggtgaagagctggcctctgctgccgctgccagggataggaccattgcggaactgcacaggagccgtttggaagtggctgaagtcaatggtcgtcttgcagagctgggtctgcacttgaaagaggagaagtgtcagtggtccaaggagcgcgccggactgctgcaaagcgtggaagcagaaaaggataaaattctgaagttgtccgcagagatactgcgcttggaaaaggccgttcaggaggagcgcacccaaaatcaggtctttaaaaccgagctggctagagaaaaggattcatccctggtccaattgtccgagagcaagcgtgaactcactgagctgcgctctgcgcttagggttctgcaaaaggaaaaagagcagttacaggaagagaagcaggagttgctggaatacatgcggaaactggaggccagattggaaaaggtagctgacgaaaaatggaatgaggacgcaactacagaggatgaggaggccgcagttggcttgtcttgcccggcggccctaactgatagcgaagacgagtcaccagaagatatgagattgcccccgtatggactgtgcgaaagaggagatccaggctctagcccagcagggccccgcgaggcaagcccgctcgtcgtgattagccaacctgcaccaatatccccgcacttgtcaggccccgctgaggactccagctccgacagcgaagccgaagacgaaaagtccgtgttgatggccgcagtccaatctggaggtgaagaggctaatttgctcttgcccgaactcggatctgccttttacgacatggccagatag

SEQ ID NO: 27082 - DNA, 810 bp, synthetic construct
  source 1..810: mol_type = other DNA; note = Synthetic coding sequence
atgaagacccccgtggagctggccgtgagcggcatgcagaccctggggctccagcatcggtgtcggggcgggtacagggtgaaggcccgtacttcctacgtggacgagaccctgtttgggtcacctgccgggacgcggccaactccgccggacttcgacccaccatgggtggaaaaagcaaaccggaccagaggtgttggcaaagaggcaagcaaagccctgggagcaaaaggtagctgcgagaccacaccctcccgcggcagcacacccaccttaacccctaggaagaaaaacaagtacagaccgatcagtcacacgccatcctactgtgacgagagtctgtttggcagccgaagcgagggagcaagtttcggtgccccaagaatggccaagggggatgccgcaaaactgcgtgcgttactgtggacaccaccccccaccccgcgtggcagtcactcccctagaccgagagaagcccccctcagagccatacacccagctggcccttcaaagaccgagcctgggccagctgcagactcacaaaaactgagtatgggaggcctgcactcaagccgccctctgaagagaggcttgagccatagcctcacccatctgaatgtaccctcaaccggccatccggcgactagcgctccccatacaaacgggccacaagacctgagaccttcgaccagcggggtgacctttcgctctcctctggtgacaagccgagccaggtctgtctccatcagcgtgccctccacacccagaagaggcggcgctacgcagaaacctaaaccaccatggaaatag

SEQ ID NO: 27083 - DNA, 618 bp, synthetic construct
  source 1..618: mol_type = other DNA; note = Synthetic coding sequence
atggacaaggacagccagggcctgctggacagcagcctgatggccagcggtactgcatcaaggtctgaagatgaagagtccctggccggacagaagagagcctcctcccaggcgttaggaaccattcctaaaagacgaagtagtagcagattcataaaacgaaagaagttcgacgacgaacttgtcgagtcttccttagccaaatcctctacacgggcaaagggcgccagcggcgtcgaaccaggccgatgcagcgggtccgaacctagttcatcggagaagaagaaagttagtaaggccccaagtacgccagtcccaccaagcccagctccagccccagggctgacaaaaagggttaagaagagcaagcaaccattacaggttacaaaggacctgggccgatggaagccagccgacgacctgctcctgatcaacgcggtacttcagaccaacgaccttacttctgtgcatctgggcgtgaagttttcttgcaggttcaccctaagagaagtgcaagaaagatggtatgcactgctctatgatcccgtaatctccaagttggcatgccaggccatgaggcaacttcatcctgaggcaatcgctgcgattcagagttag

SEQ ID NO: 27084 - DNA, 540 bp, synthetic construct
  source 1..540: mol_type = other DNA; note = Synthetic coding sequence
atggactggaccccccggctgcccagccggcacatcatcagcgagctggagcacctcacattcgtcaatactgatgtgggacgctgtagagcctggctgagactggccctcaacgatggcctcatggagtgctacctcaagctcctgctgcaagaacaggctcggctgcagctgcaacgaaaagaatccctagattctatctcacattccagtggctctgaggatatcgaggttcaccatagcggtcacaagattcgcagaaaccagaaattgaccgcatccagcttatccctggacaccgccagtagttcccagttgagttgcagcctcaactccgattcctgtctccttcaagagaacggaagcaagtcccctgatcactgtgaagaacctatgagttgtgacagcgaccttggcaccgccaacgcggaagactccgataggagcctacaggaaaaaacacgagccggatcgcaaaggatgacaagcactggtctgccggggagcaatccatggagagtcctccaaacaactcagtag

SEQ ID NO: 27085 - DNA, 735 bp, synthetic construct
  source 1..735: mol_type = other DNA; note = Synthetic coding sequence
atggagctgaccatcttcatcctgcggctggccatctacatcctgaccttcccgttgtatctcctgaatttcctggggttatggtcctggatatgtaagaagtggttcccatattttcttgtgaggttcaccgtgatctacaatgagcagatggcttccaaaaagagagagctgttcagtaacctgcaagaatttgccggcccatctggtaaactttccctgttggaggtcggctgtggcaccggagccaacttcaagttctaccctcccggatgcagagtcacgtgcatcgacccaaaccccaattttgagaaattcttgattaagtctatcgcggagaaccgacatcttcaatttgagaggttcgtcgtcgctgctggagagaatatgcaccaggtggccgacgggagtgtagatgtggtcgtgtgcaccctggtgctctgctccgtgaagaaccaggagaggatcctgcgggaggtctgccgagtactgcgacccggcggcgccttctactttatggaacatgtcgccgccgaatgcagcacctggaactacttctggcagcaggttctggaccctgcatggcacctcctgtttgacggatgtaatttgactagggaatcctggaaggcccttgaaagagccagtttttctaagctgaagctgcaacatattcaagctcccctatcatgggagttagttcgaccccatatctacgggtacgctgtgaagtag

SEQ ID NO: 27086 - DNA, 558 bp, synthetic construct
  source 1..558: mol_type = other DNA; note = Synthetic coding sequence
atggacaaggacagccagggcctgctggacagcagcctgatggccagcgggaccgctagtcgatccgaggacgaagagagtctagccggacagaagcgcgctagtagccaagcactcgggaccattcccaagcgtaggtcaagttcacgatttattaagcgcaaaaagtttgacgacgaactggtggagagttccctggccaagtcatccacacgcgcaaagggagcctcaggggtcgaacctggacggtgttccggctctgaaccctcttccagtgagaaaaagaaagtctcaaaagccccatcaactccggtccccccgagcccggccccagcacctggtctgacaaagcgggtaaagaagtcaaaacagccacttcaggtgaccaaggacctgggtcgctggaagcctgctgatgacctgctcctgataaatgctgtgctgcaaactaacgatttgacatccgtgcatctgggggtcaagttctcttgcagattcacactccgggaagttcaggagcgatggtacgccttactctacgaccctgtgatctcctag

SEQ ID NO: 27087 - DNA, 3003 bp, synthetic construct
  source 1..3003: mol_type = other DNA; note = Synthetic coding sequence
atggtggagtgcttcgagagcggcggcacccggctgagcctgagctcattcaacgtgtcctgcgatagtctccgggaacagttaagggagtggcggtgctttcagtggtggaggatggactggacaccgaggcttcctagccgacatatcatttctgaactggaacacctgacattcgtcaataccgatgtgggaagatgccgcgcctggctgcggctggcacttaatgatggtttaatggaatgttacctgaagctcctcttgcaagagcaggcacggctacacgaatactatcagcccactgctctgctgcgcgatgccgaagaaggcgagttcctattgtccttcctgcagggactgacatcactttcattcgaattaagctataagagtgcaattttgaacgaatggactctaacacccctcgccctgtcaggattatgtccccttagcgaacttgatcctctcagcacctcgggagctgagctgcaacgcaaggagagcctggactcgatttcgcatagctcgggtagcgaagatattgaagttcatcattccggtcacaagattcgccggaatcagaagctgacagcctctagcttgtcactcgatactgcctcttcttcacagctgtcttgcagtttaaattccgattcgtgtttgctccaggaaaatggcagcaagtcccctgaccactgcgaggagcctatgtcttgtgactctgacctggggacggcaaacgccgaggactccgacagatcactgcaagaggttctgctggagtttagcaaagcccaggtgaactccgttccaactaacggactgtcgcaggagaccgaaataccaacccctcaggccagcctgtccctgcatggcctgaacacttcaacatatctgcactgtgaggcccccgccgagcccctcccggcccaggctgcttccggaacccaagacggggtccatgttcaggaaccccggccccaggccccttcccccctagatctgcaacagcccgtggaatctacaagcggccaacaaccatccagcaccgtcagcgaaaccgccagagaagttggccaaggaaacggacttcagaaagcgcaggcccacgacggggctggactcaagttggtggtttctagtcccacatccccgaagaataagtcctggataagtgaggacgacttctaccgtccctcacgagaacagcccctggagtcagcttcggatcaccccattgcttcttacagaggaacccccgggtccagaccagggcttcacaggcatttctctcaggaaccccgaaagaactgtagtctgggagcacttgaccaggcatgtgtccctagccccggtcgtcgacaggcccaggcagccccttctcagggccacaagagtttcagagttgtccatcgaagacaaatgggtctgagcaatccatttcgcggtctcatgaagcttgggaccgtggaacgcagaggcgccatgggcatttggaaagagctcttctgcgagctgtcgcctctggagtttcgactttatctttccaatgaggagcacacctgtgtggagaactgcagccttctgaggtgcgaatccgtaggcccagcccacagtgatggccggttcgagctggtattttctgggaaaaaattagccctgagagcgtcttctcaagatgaggccgaagactggttggaccgggtgagagaagctctgcaaaaagtgcgcccccaacaagaggatgagtgggtgaatgtgcagtaccccgatcagcccgaagagccccctgaggccccacagggctgtctctctccttccgatctgctaagcgagcctgcggcactgcagggcacacagtttgattggtcgagcgcccaggtcccggagcccgatgccataaaggagagcctactgtatctatacatggaccgcacatggatgccctatattttttccctgtctctagaggccctgaagtgctttagaattcgcaacaatgaaaaaatgcttagcgatagccatggagtagagacgatccgcgacatattgcctgatacctccctgggtggacccagcttcttcaaaattattactgctaaagctgtactgaaactccaggcaggtaatgctgaggaggccgccttgtggcgagacttggtacgaaaggtgcttgcttcatacctggagaccgcggaggaggccgtgaccctgggaggctccctcgacgagaattgccaggaagtgctcaagttcgctacccgggagaatgggttcttactccaatatctggtggctattcctatggaaaagggactcgacagtcaggggtgcttttgtgcagggtgcagtaggcagatcgggtttagcttcgtccgaccaaagctgtgtgccttttcgggcttatattattgcgacatctgccaccaagatgacgcaagtgtgatccccgctagaatcattcacaattgggacctgaccaagaggcccatctgcagacaagccctcaaattcttgactcagatacgcgctcagcctctgatcaacctacagatggtgaatgcctcgctatacgaacatgtggagagaatgcatttaattggaagaagaagagagcagttaaagcttctcggtgactatttaggcctgtgtagaagcggagctctgaaagagttgagtaaacgcttgaatcaccgtaattatctgctggagtctccccaccggttttctgtagcggacctgcaacaaattgccgacggggtttacgagggcttctctccgaaagttcccagcgaagctgcaggcctgagaccatggggcgcacgttcacctgaagcagcaagcgccttccgatgtatcgattcttctcacctgccctctttgcgaaaagtggtgcctacattgtttctgaaatgttactttatgcagtatacagtgccaagcgaacaagggtctggtccagaagagagcttgcagtgtatcgaaggaattgcagccgtgtag

SEQ ID NO: 27088 - DNA, 525 bp, synthetic construct
  source 1..525: mol_type = other DNA; note = Synthetic coding sequence
atggacaccatgatgctgaacgtgcggaacctgttcgagcagctggttcgcagagtggagatcctttcggaagggaacgaagtgcagttcatccaattagctaaagattttgaagacttccgtaagaagtggcagcggaccgaccatgagctaggcaaatataaagacctcctcatgaaggcggagacagaaaggagcgcactcgacgtgaagctaaagcatgcccgcaaccaggtggatgttgagattaagcggcgacaaagagcagaggcagactgtgaaaaactggagcggcaaatccagttaatacgagaaatgctaatgtgcgacacaagcggctcgatccaactgtcggaggaacaaaagagcgccctggctttcctgaataggggtcaaccaagcagctcaaatgctgggaataaaagactgtcaaccatagacgagtccggaagcatcctatcggacatcagttttgacaagactgatgaatctttagactgggactccagcctcgtgaaaacttag

SEQ ID NO: 27089 - DNA, 2904 bp, synthetic construct
  source 1..2904: mol_type = other DNA; note = Synthetic coding sequence
atggactggaccccccggctgcccagccggcacatcatcagcgagctagagcacctaaccttcgtgaacactgacgttggcagatgtcgtgcttggctgagactggccttaaatgacggcttgatggagtgctacctgaagttgctgctgcaggagcaggcgcgcttacatgagtattaccagcccacagccttactaagagacgctgaggaaggcgagtttttgctcagcttcctccaggggctgacttcgctgagcttcgagctcagctacaaaagtgccatcctcaatgaatggacactaacacctctagctttatccgggctctgtccactgtctgagctggacccgttaagcacatctggagccgaactccagagaaaagaaagcctcgattctatctcacactcaagtggcagcgaggatattgaagtccaccactctggacataagatccgcagaaaccaaaagctgactgcttcctctctgtcattggatacagctagctccagccaattaagctgtagcctgaattctgattcctgtctcctgcaagagaacggctcaaagagcccagatcattgcgaggaacccatgtcctgtgactcagatttagggacagctaacgctgaagattcagatcgctcgttacaggaagttctgctggagttttccaaggctcaggttaactcagttcctaccaacgggctgtctcaagagacagaaattccgactccacaggcaagccttagcctgcacggtctaaatacgagtacttatctgcattgtgaagcacccgcagagcctctccccgcccaagccgcatctggcactcaggacggggtgcacgtccaggaacctcggccacaggcaccttcacctcttgatcttcagcagcccgtcgagtccacaagcggtcaacagcccagttctaccgtcagcgaaaccgcgcgcgaagtcggtcagggaaatggcctgcaaaaggctcaggcccacgacggagcagggctgaagctggtggtgagcagtccaacttccccaaagaataagtcatggatcagtgaggatgacttctacagaccctcccgcgaacagcctttggagtccgccagcgatcacccgattgctagctatagaggcacaccagggtctagacctggacttcaccgacacttcagccaggaacccagaaagaactgtagtcttggagccttggaccaggcctgcgtcccgagcccgggccgcaggcaggcgcaggccgcgccttcacaagggcataagagctttagagtggtgcaccggcgccaaatgggtctatctaatccgtttcgagggctgatgaagcttggtactgtggagcgacggggcgcaatgggaatctggaaagagctcttctgcgaactaagtccactggagtttcgactgtacctatcaaatgaagagcatacttgcgtggagaactgcagcctgctacggtgtgagagtgtaggcccagcccacagtgacggccggttcgaactggtgttcagtgggaagaaacttgccctgcgcgccagctcacaggacgaagctgaagactggctggatagggtgcgcgaggctttgcagaaggtgcgcccgcagcaagaggatgaatgggtaaatgttcaatatccggatcaaccagaggaacctcctgaagctccacaaggctgtttgtccccaagcgacttgttaagtgagcctgctgcccttcagggtacccagtttgattggtcatctgcccaggtacccgagccagacgcaataaaagagtcactgctgtatctatatatggacagaacatggatgccttatatttttagcctctcactcgaggccttgaagtgcttcagaatccggaacaacgagaagatgctgtcagacagccatggtgtggagaccatcagggatattttgcctgatacctctctcggtggtccgagttttttcaagattatcacagcaaaagcagttttaaagttgcaagccggtaacgccgaggaggccgcactgtggagggacctggtgaggaaagtgctggcctcgtatcttgagactgctgaggaagcagtcaccctggggggctccctagacgaaaattgccaggaagttctcaaatttgctactcgggagaacggtttcctgctgcaatatctcgtggcgattcccatggaaaaaggccttgactcccaggggtgcttttgcgccggctgttcgcggcagattggatttagtttcgtaagacccaaactatgcgctttctcagggctctactactgcgacatatgccaccaggacgatgcatccgtgatccctgcacgcatcattcacaattgggaccttactaagcggcccatttgtcgccaggctctgaaattcctcacacagatccgcgctcagccattgatcaacctgcagatggttaacgctagcttgtacgagcatgttgagaggatgcacttgattggcaggcgtagagaacagctgaagctgctaggagattatctgggactgtgtcgatccggtgccctgaaagaactgtctaaacgattgaatcacagaaactacctattggaaagtccacaccgcttcagcgtggccgatctccagcagatagctgacggcgtttatgaaggctttcttaaggcattaattgagttcgccagccagcacgtgtaccactgcgacctttgcacgcaacgggggttcatctgccagatctgtcaacaccacgacatcatttttccattcgaattcgacacaacagtccggtgtgcggagtgcaaaacagtgttccaccagagttgtcaggctgttgtgaaaaaaggttgccctcgctgcgcccgtaggcgaaaatatcaggagcaaaatatctttgcctag

SEQ ID NO: 27090 - DNA, 1446 bp, synthetic construct
  source 1..1446: mol_type = other DNA; note = Synthetic coding sequence
atggccagcgccgccagcgtgaccagcctggccgacgaggtgaactgccctatctgtcaggggactctgagagagccagtgaccatcgactgtggccacaatttctgccgggcgtgcctgacaaggtattgtgagattcctggcccagatctggaagaaagtcctacttgtccactatgtaaagagccgttccggcccggatctttccgacccaactggcagttggctaatgtagtcgaaaatattgagcggctgcaactcgtctccacattggggctgggagaggaggacgtgtgccaagagcacggagagaaaatctactttttctgtgaggatgacgaaatgcaactatgtgtcgtgtgccgcgaagcaggggagcacgctacccacacaatgagattcctcgaagacgccgctgctccataccgagagcagattcacaaatgcctcaaatgtctcaggaaggaaagggaggagatacaggagatccagtcccgagaaaataaacggatgcaggtcctccttacgcaggtgagcaccaagcggcagcaggtgatatccgagttcgctcacctcagaaagtttcttgaggagcagcagtctatcctgctggctcagttggagagtcaggatggcgacattttgcggcagagagacgagttcgatctcctggtggccggcgaaatctgtcggtttagtgcacttatcgaagagctggaggagaagaatgaacgaccagcccgggagctcctcaccgatatcaggagcactctcatccgatgcgagaccagaaaatgcagaaaacctgtggcagtatcaccagagcttggacagcgcatccgtgattttcctcagcaagccctaccattgcagagggagatgaaaatgtttctggagaatctgcccaatcacctggtgatacctaccgcccacatctcattagatcctcaaacaagtcacccaaagctgctcctgtctgaggaccaccagcgtgcacagttctcatacaagtggcagaattccccggacaacccccagagattcgatcgagcgacatgtgtgctagcccacacgggcattacaggtggccgccacacatgggtggtgtcaattgacctggcgcacggcggatcttgtaccgtgggcgttgtgagtgaggacgtgcagcggaagggtgagcttcgccttcgcccagaggagggcgtgtgggccgtgagactggcatggggattcgtttcggccctcggcagtttcccaactcgcctgacactgaaggagcaacctagacaagtccgggtgagtctggattacgaggtcgggtgggtgacattcaccaacgccgtgacccgcgaaccaatatatacattcacagcctcattcaccagaaaagtcatccccttcttcggcctctggggacggggttccagcttctctctttcttcttag

SEQ ID NO: 27091 - DNA, 462 bp, synthetic construct
  source 1..462: mol_type = other DNA; note = Synthetic coding sequence
atggcccccggcagccggggcgagcggagcagcttccggagccggagagggcccggcgtgccatccccgcaacctgatgttactatgctctcccgtctgctgaaagaacaccaggcgaaacaaaacgagcgtaaagaacttcaggagaagcgcaggcgcgaagcgatcaccgcagccacctgcctcaccgaggcgttagtcgaccatctgaacgttggggtggcccaggcctatatgaaccagaggaaactcgatcacgaagtgaagaccctgcaggtgcaggctgctcagttcgcgaaacagactgggcagtggataggtatggtggagaatttcaatcaggcgctgaaggagatcggcgacgtagaaaattgggcgcgatctatcgaactagacatgcgaacaattgctaccgccctcgaatatgtatataaagggcagttgcagtctgcaccaagctag

SEQ ID NO: 27092 - DNA, 1311 bp, synthetic construct
  source 1..1311: mol_type = other DNA; note = Synthetic coding sequence
atgctgtggaacttcaagccccacgcccgggcctaccggtacgtggggcataaagatgtggttacttctgtccagttttcgcctcatgggaatctgctggccagcgcttcgcgcgaccggactgtcagactgtggatccccgataagcgaggcaaattctccgagtttaaagcgcataccgccccagtgcgttctgtcgatttttcggccgacggccaatttctggccactgcgagcgaagacaagtccattaaggtctggtctatgtaccgacagaggtttctttattccttgtacaggcacacccattgggtaagatgtgcgaagtttagccctgacggtagactgatagtctcatgttctgaggacaagactattaaaatctgggatactaccaacaagcagtgtgtcaataacttctccgatagtgtcggtttcgcaaacttcgttgactttaatccctccggaacttgtatagcctctgcagggtccgaccagaccgtgaaggtgtgggatgtacgagtgaacaagctacttcagcattatcaagtccacagcggaggcgtaaactgtatcagttttcacccctctgggaactacctgattacagcctcttcagatgggacactgaagatactggatctgttagagggtcggctcatttacacattacagggccacaccggacccgtgtttaccgtgagtttcagcaagggtggcgagttattcgcctcagggggagcggacacacaggtgctactgtggcggacgaatttcgacgaactgcattgtaagggcctgactaagcggaatcttaaacgcctacacttcgactctcccccacacttgctggacatctacccccgcacgccccaccctcatgaagaaaaggtggagaccgtggaaattaacccaaaactagaggtcatcgatttgcagatcagcacccctcccgtgatggatatactgagtttcgatagcactacgaccaccgagacgagcggtcgtacgcttccagacaaaggggaggaggcttgcggatactttctgaatccgtcactcatgagcccggaatgcttgccaactacaaccaaaaagaaaacagaggatatgtccgacctgccctgtgagtcccaaaggagcatcccacttgcagtcacagacgcgctggagcatattatggagcagctgaacgtgctgacgcagacagtatctatcttggaacagagactcacattgaccgaagataaactgaaggattgtctcgaaaatcagcagaaactcttcagcgcagttcaacagaagtcctag

SEQ ID NO: 27093 - DNA, 597 bp, synthetic construct
  source 1..597: mol_type = other DNA; note = Synthetic coding sequence
atgaccctgcggtgcctggagcccagcggcaacggcggcgagggcaccaggtctcaatggggaacagcaggctctgccgaggaaccctccccccaggccgcccgcttggccaaagcattaagagaactgggccaaacaggatggtattggggaagtatgaccgtgaacgaggccaaggaaaagcttaaagaggcacccgagggtaccttcttgatacgggattcctcccactcagattacttactgacaatatcagtcaaaactagcgcaggacctaccaacctcaggattgagtatcaggacggcaaattcaggttggatagcatcatatgtgtgaagtccaagcttaagcaattcgacagcgtggtacacttgattgactattacgttcagatgtgtaaagacaagcggacggggcccgaggccccccggaacggcacagtgcacttatatctcacaaagcctctttacacctctgctccatctcttcagcacctttgtagacttacaatcaataagtgtacgggggccatctggggtctgcctctgcccaccaggttaaaggactatctcgaggagtacaaattccaagtctag

SEQ ID NO: 27094 - DNA, 597 bp, synthetic construct
  source 1..597: mol_type = other DNA; note = Synthetic coding sequence
atgaccctgcggtgcctggagcccagcggcaacggcggcgagggcacacgatcacagtggggcactgctgggtctgcagaagagccaagcccccaggccgccagactcgctaaggctttgcgggagctggggcagacggggtggtactggggatctatgaccgtcaacgaagcgaaggaaaaactgaaagaagcgcccgagggaacgttcctaattcgcgactctagccatagtgattatttgctgacaatttctgtgaagacttccgcaggcccgaccaacctccgcattgagtaccaggacggtaagtttcggctggactccatcatttgtgtgaaatctaaattgaagcaattcgatagtgtggtccacttgattgattactatgtacagatgtgcaaagataagcggactggccccgaggccccacggaacgggacagtgcacttgtacctcactaagcctctgtacacctctgctccatccctccaacacttgtgccgattgacgattaataagtgtactggagctatatggggactgcctctgcctactcgcctaaaggattacctcgaggaatataaattccaggtgtag

SEQ ID NO: 27095 - DNA, 495 bp, synthetic construct
  source 1..495: mol_type = other DNA; note = Synthetic coding sequence
atgatggagggcaacggcaccgagaacagctgcagccggacccgggggtggctgcagcaagataacgatgctaaaccctggctttggaaattttcaaactgcttcagtcgacccgagcaaacactgcctcactcaccacagactaaggagtacatggaaaataagaaggtcgccgtagaattaaaggacgttccctcgccattgcatgccggctccaagctgttccccgcagttcctttgcctgacatacggtccctgcagcaaccgaagattcaattatcaagcgtgcctaaagtttcatgttgtgcccactgtcccaatgagccctctacaagccctatgcggtttggggggggcggcggcggctctggaggaacatcatccttgatccatccaggagcactgctggactcccaaagcacacgcactataacctgtcaagtggggtctggctttgcctttcagagcgcttcatctctgcagaatgcgtcctag

SEQ ID NO: 27096 - DNA, 855 bp, synthetic construct
  source 1..855: mol_type = other DNA; note = Synthetic coding sequence
atgctgagcgtggtggagaacggcctggacccccaggccgccatccccgtgatcaagaaaaagctcgtgggaagtgtaaaagcgttacagaaacagtacgtgtcacttgacactgttgtgacatcagaggatggagatgctaatacaatgtgttcagctctggaagctgtcttcatacacggcctgcacgcaaagcacatccgggcagaagcaggggggaagaggaaaaaaagcgctcatcaaaagccactgcctcagccggtgttttggcctttgctgaaagcagtgactcacaagcacatcattagcgaactagaacatcttacctttgtaaacacagatgtcggcagatgtagagcctggttgaggttggcgctgaacgacggcctaatggagtgctacctcaagcttttactccaggagcaagcccgcctgcagctacagcgtaaagaatccctggacagcatctcacacagcagcggttcagaggacattgaggtgcatcactctggacataaaatccggaggaaccagaaattgaccgccagcagtctaagcctagatactgcctcaagcagtcaactcagttgcagtttaaacagcgactcttgccttcttcaggagaacggctcaaaatctcccgaccactgtgaagaacccatgtcttgcgactctgatctgggcacggcaaatgcagaggactcagatcgtagtcttcaggacataaagattttttcctgggctcagtggctaactccagtcatacctgccctctgggaagcagaagcaggaggaagtcaaagacaacaaatagagacttttctggcaaataccgtaaaacctcacctgtactag

SEQ ID NO: 27097 - DNA, 3282 bp, synthetic construct
  source 1..3282: mol_type = other DNA; note = Synthetic coding sequence
atgggcggcaaggcctggccccggcgggccgtgggcaccgccggcggcccgtgtgcggaacagatctcagccccctttcaaactctgcttatgccgcaccttcccctcgcctcgttcagacccccattctgggggttgaggcattctaggggactaccacggttccattccgtaagtacccagtctgaaccccatggatctcctatttctagaaggaacagagaagccaagcagaagaggctgagagagaagcaggcaactttggaagccgaaatcgccggagagagcaagagccccgccgaatccattaaggcatggaggcctaaggagctcgtgttatacgaaatcccaacaaagcccggtgagaaaaaagacgtatccggcccacttcctcccgcttacagtcctcgatatgtggaagccgcttggtatccatggtgggttcgcgagggcttcttcaaacctgaatatcaggcaagattacctcaggccaccggcgaaaccttctccatgtgtatccccccaccgaacgtcacaggaagtttgcacatcggccacgcattaacagtggcaattcaggatgccctggtacggtggcacagaatgcgcggcgatcaagtgctctgggtaccaggttccgatcacgcagggattgcgacccaggccgtcgtggagaagcagctgtggaaagaacggggcgttcgcagacatgagttgtcacgggaggctttcctaagagaagtttggcagtggaaagaggcaaaggggggtgagatctgtgagcagctgagggccttaggtgcctcattagactgggatcgggagtgcttcaccatggatgtgggttcctcggtggcggtcaccgaggcctttgttcgcctgtacaaggcagggctgctgtaccgcaaccaccagctagtgaattggtcttgcgctctgcggtctgctatctcggacatcgaggttgagaatcgaccccttccggggcacactcagctcaggcttcccggctgtcctactccggtctcgttcggcctgctcttctcagtggctttcccagtcgacggcgagcccgatgcagaggttgtcgtagggacaacacggcctgaaactctcccaggcgatgtggccgtggcggtccaccctgacgattcccggtatacccacctgcatggaaggcagcttcgccacccactaatggggcagcctctgccactcatcaccgattacgccgtccagccccatgtgggaactggagctgtcaaggttacccctgctcactccccagcagatgcagagatgggcgcccgtcatggcctttctcctttgaacgtaatcgccgaggacggcaccatgacgagcttgtgcggggactggctgcagggtcttcataggtttgtcgcaagggagaagatcatgtctgtcctgtctgaacgcgggctttttcggggccttcagaaccaccccatggtgctccccatttgctcccgctccggcgacgtcatagagtacctactgaaaaaccaatggtttgtaagatgccaggagatgggcgcccgtgccgcgaaagcggtagagagcggtgcgttggagctgtccccttcatttcaccagaagaactggcagcattggttttctcatatcggggactggtgtgtatctcgacagctgtggtggggccaccagatcccagcatacctggtggtggaagaccacgcacagggcgaagaggattgctgggtcgtgggtcgaagcgaggctgaggcgcgagaagtagcagccgaactgacaggtcgacccggtgccgaactcaccctcgaacgagaccctgacgttctggatacctggttttcctcagctctgtttcccttttcagcattaggatggcctcaggagactccagatctcgcacggttctacccactcagccttctggaaaccgggagcgatctcttgctcttctgggtgggcagaatggtcatgctgggaactcagctgactgggcagttacccttttcaaaagtgctgcttcacccaatggttagggacagacagggcaggaagatgtcaaagtcccttggaaacgtccttgacccccgcgatataatctctggtgtggagatgcagctactgcaggaaaaactccggagcggtaatttggaccctgccgagctcgccatcgtggctgcagcccagaagaaggactttcctcatgggatccccgaatgcggtacggatgccctgcgctttacactgtgctcccacggagttcaggccggcgacttacacctatccgtgtccgaggtgcagagctgtcggcacttttgcaacaaaatttggaatgctctcagattcatcctcaatgcactgggggaaaaatttgtacctcagcctgcagaagaactttccccctcatccccaatggatgcctggattctctcgcgtctggctctggcagcccaggagtgtgaacggggatttttgaccagggagttgagtctggtgacacacgctctgcaccatttttggctccacaatctgtgcgatgtttacctggaggcggtaaaaccagtgctttggcacagtccgagacccctcggaccaccacaggtgctgttctcctgcgcagatcttggactgcgattactggcgcctctcatgccctttctcgccgaggaactctggcaaagactgccacctaggccaggctgccccccggccccctctatctccgtggccccctacccatctgcttgctctcttgagcactggcgtcaacctgaattggagcgcaggttttctcgagtgcaggaggtggttcaggttctgcgggcactgcgcgcaacataccagttgacgaaagcccggccacgtgtcctactgcagagttccgagcccggtgatcaggggttgtttgaggcctttctcgagcccctcggcaccctagggtactgcggcgccgttgggcttctgccacccggtaccgctgctccatccgggtgggcccaggctcccttgtcagataccgcccaagtgtatatggagctgcaaggtctcgttgatccacagatccaacttcccttacttgctgctcgccggtataagctccagaaacaactggatagtctgacagctagaacacccagtgaaggagaggctggcacgcagcgccagcaaaaactctccagcctccagctcgagttatcaaaattggataaggccgcatcccacctgagacaactgatggacgagccacccgctcctgggagtcccgaattgtag

SEQ ID NO: 27098 - DNA, 3621 bp, synthetic construct
  source 1..3621: mol_type = other DNA; note = Synthetic coding sequence
atgaccagcgccgccgagatcaagaagccccccgtggcccccaagccaaaatttgtcgttgctaataacaaaccagccccccccccgatagcaccaaaacctgatattgttattagtagtgttcctcaatccactaaaaagatgaagcccgccatcgcccctaagcccaaggtactgaaaaccagcccagtgagagaaataggacaatctccaagcagaaagataatgcttaatctcgaaggtcataagcaggaacttgccgagagcaccgataattttaactgtaaatatgagggcaaccaaagtaatgactacatatctccaatgtgcagctgcagtagcgaatgtatccacaagctgggacatagagagaacctctgcgtgaagcagcttgtgcttgagcctctggagatgaatgaaaacctggagaattctaaaatagatgaaacgcttaccataaaaacgagatcaaaatgtgatctctacggagaaaaagcaaaaaaccagggaggagtagtactgaaggcgtcagtcttggaagaggagttaaaggacgctctgatccaccagatgccgccatttatttcagcccagaagcacaggccgaccgattcacccgaaatgaacggggggtgcaactccaacggtcagttccgaattgaattcgctgacctctcaccttctccgtcatcgttcgagaaagtacctgaccatcatagctgccacctacaactcccatccgacgagtgtgaacattttgagacgtgccaggatgacagcgagaagtcgaacaactgctttcagtccagtgaactggaggccttggaaaacggaaagcgcagtacactgataagctccgatggagtttccaaaaagagcgaggttaaggaccttgggcctttagagatacacctggtgccatacacacccaagttccccacgcctaaaccacgtaaaacacggaccgcgcgactgctacgacagaagtgtgtggacaccccaagcgagagcaccgaagaacctggcaattccgattccagcagctcctgcctgacggagaattcactgaagatcaataagatctccgtgctgcaccagaacgtactatgtaagcaagagcaggttgacaagatgaagcttggtaacaaaagcgagctgaacatggagagcaactctgacgctcaggatctcgtgaatagccagaaagcaatgtgtaacgagacgacaagcttcgaaaagatggccccgtcttttgacaaggattccaacctttcaagcgacagcaccacggtggacggatcatccatgtctctcgcagttgacgaggggactggatttattcggtgcactgtttcaatgtctctccccaaacagctgaagctcacttgtaacgagcatctgcagtcaggccggaacttgggggtaagcgccccgcagatgcagaaagaatccgttatcaaagaagagaactccctccgcattgtaccaaagaagcctcaaagacattcccttcctgcgactggggtgctgaaaaaagccgcttctgaggagttgctcgaaaagagttcctacccaagcagcgaagagaaatcatcggagaaaagcttggagagaaaccacctccagcacttgtgcgcacagaaccgaggggttagcagcagctttgatatgcctaagagggcttcagagaagcccgtctggaagctgccccatcccattctcccgttctccgggaaccccgaatttctgaaatccgtgacagtgagctccaactccgagccatctacggccctgactaaaccccgcgcaaagagcctgagtgcaatggacgtcgagaaatgcacaaagccatgcaaggactctaccaaaaagaactcttttaaaaagctcttgtccatgaaactgagcatttgtttcatgaaaagcgattttcaaaagttttggtctaaatctagtcagcttggcgacactacaacaggtcatttatcctctggcgagcagaagggcatagagtccgactggcagggtttgctggtcggtgaggagaaaaggtctaaaccaataaaggcttactcgactgaaaactactctctagaaagccaaaaaaagaggaagaagtctcggggtcagacgtccgcagccaacggtctgagggctgaaagtctggacgatcagatgttatccagagaatcatcctcccaggctccctacaagagcgtcacatctctgtgtgctccagaatatgagaatattcggcactatgaggagattcctgagtatgaaaaccttcccttcataatggcgattagaaagacccaggaactggagtggcagaactcttcctccatggaggacgcggacgccaacgtatacgaagtagaggaaccatacgaagcccccgatggtcagctgcagctagggccaagacaccagcacagcagtagcggtgcatcacaggaagagcagaatgatctaggtctgggcgatctcccgtcggatgaagaagaaattatcaacagcagcgatgaggatgacgtcagctctgagtcctctaaaggtgaaccggatcctcttgaggataaacaagatgaggacaacgggatgaagtccaaagtgcatcatatcgccaaagaaataatgagttccgagaaggtctttgtggacgttctcaagctgcttcatatcgatttccgggacgcggtggcccacgcctccaggcagttagggaaacctgtgattgaggaccgaatcctgaaccaaattctctactacctcccccagctatacgagttgaacagggacctcctcaaggaactggaagagaggatgctgcattggaccgaacaacaacgtatagcagatatttttgttaaaaagggtccctatctgaaaatgtatagtacatacattaaggagtttgataagaatattgctctgctggatgagcagtgcaaaaaaaaccccggcttcgcggctgtggttcgcgagtttgagatgtctccacggtgtgctaacctggctttaaagcattacctgctgaagccagtacagcgtatacctcagtataggctcttgctcactgactatcttaagaacctgattgaggatgccggggactaccgagatacccaagatgccctggccgtggtcatcgaggtggcgaatcatgcgaatgataccatgaagcagggcgacaatttccagaaacttatgcagatccaatattcactgaatggtcaccatgagattgttcagccggggagagtgtttctgaaagaaggaattcttatgaagctgtcccgcaaagtcatgcagccgcgtatgtttttcttgttcaatgatgctttgctgtacaccacacctgtccagtccggcatgtataagttgaacaatatgctcagcctggccggcatgaaggtccgaaagcctactcaggaggcttaccagaacgaactcaagatagagtcagtcgaacgcagttttatcttgtctgcaagttcggctaccgaaagagatgaatggctggaggcaataagtcgagccatcgaggagtatgccaaaaagcgtatcacgttctgcccctcacgctctctcgatgaagccgactctgaaaataagtag

SEQ ID NO: 27099 - DNA, 435 bp, synthetic construct
  source 1..435: mol_type = other DNA; note = Synthetic coding sequence
atggacaaggacagccagggcctgctggacagcagcctgatggccagcgggaccgcatccagaagtgaagacgaggaaagccttgcaggccaaaagcgggcttcttcccaggctcttggtaccatacccaagagaagaagctctagtcggactctttatcgctttatcaaaaggaaaaagtttgacgatgagttggtggagtcttcactcgccaaatccagcacacgggcaaagggagcgagtggcgtggagcccggccggtgtagcggaagcgaaccaagctcttccgaaaagaaaaaggtgagtaaagccccatcaacccctgtgccccccagccctgcacccgctcccggtctgacaaaaagggtgaaaaagagcaagcagccgctgcaggtgaccaaggacctggggcgatggaagcctgcagatgactag

SEQ ID NO: 27100 - DNA, 810 bp, synthetic construct
  source 1..810: mol_type = other DNA; note = Synthetic coding sequence
atgaagacccccgtggagctggccgtgagcggcatgcagaccctggggctgcaacacaggtgtcgaggagggtatagagtcaaggccagaacaagttacgtggacgagacactgtttggctccccagctggtactcggcctacccctcccgacttcgacccaccctgggtggaaaaagctaataggacaaggggcgttggaaaggaggcatctaaagccctcggggctaagggttcatgcgagacgaccccaagtcggggcagcacgcctacattgacacctagaaaaaagaataagtataggcctatctcacatacgccatcctattgtgacgaaagtctattcggctcgaggagtgagggcgcatcgttcggagccccacggatggccaaaggggatgcagcgaaactgcgggcactcctctggacccctccacctacgccacggggttcccacagtccccgcccacgagaggcacctctgcgcgctatccaccctgcgggtccgagcaagacagagcctggccccgccgcggattcccagaagctgagcatggggggactgcactcttctagacccttgaagagaggccttagccactctctgacccacttaaatgtgccttccactggtcatccagccacctcggcaccccacacaaacggcccccaggatctgcggccctccacctctggtgtgacatttcggtctcccctcgtgactagtcgggcacgaagcgtctccatttctgtgccgagtactcccagacgaggcggcgccacgcaaaagccaaaacctccctggaagtag

SEQ ID NO: 27101 - DNA, 501 bp, synthetic construct
  source 1..501: mol_type = other DNA; note = Synthetic coding sequence
atggccaacgaccccctggagggcttccacgaggtgaacctggccagcccaacatcccctgatctgctgggcgtttatgagtctggtacacaggaacagaccacctcacccagtgtcatctacagaccgcacccaagcgccctgagttccgtccctattcaggccaatgctttggacgtatccgaactgcccacacagcccgtgtactctagtccccggcgactcaactgcgcagagatttctagcatctccttccacgtcacagaccccgctccctgttctaccagtggggtgaccgcgggattaactaaactgactactcgcaaggataactacaatgcagagcgggagtttttgcagggcgccaccataaccgaggcatgcgacggatccgacgatatctttggactgtccacagatagtctctcacgactgcgtagcccatctgttttggaagtgcgggagaaaggctacgagcggcttaaagaggagcttgcctag

SEQ ID NO: 27102 - DNA, 390 bp, synthetic construct
  source 1..390: mol_type = other DNA; note = Synthetic coding sequence
atggacaccatgatgctgaacgtgcggaacctgttcgagcagctggtgcggcgcgtagagatcctttccgaaggtaatgaagtgcagtttatccagctggcaaaagatttcgaggacttcaggaaaaagtggcagagaaccgaccacgagctgggcaaatacaaggatcttctcatgaaggctgagactgagagatccgctctagatgtgaaattgaaacatgccaggaatcaggttgatgttgagatcaagcggcgtcagcgggctgaggcagattgcgagaaactggaaaggcagattcaactgatccgcgagatgctgatgtgtgacacgagcggatcaatacagctaagcgaagagcagaagagtgccttggcatttctcaattag

SEQ ID NO: 27103 - DNA, 486 bp, synthetic construct
  source 1..486: mol_type = other DNA; note = Synthetic coding sequence
atgaccctgcggtgcctggagcccagcggcaacggcggcgagggcaccaggtcacagtgggggactgctgggtcagctgaggagccgtctccacaagctgcccgtctggctaaagcactgcgggagctggggcagacaggatggtactggggatccatgaccgtcaacgaagccaaggaaaagctgaaggaggcccccgagggcacgttcctgattcgcgactcaagccattcagactacttgctgaccatctccgtgaagacgtccgctggcccaactaatctgcgcatagagtaccaggatgggaaattccgcctcgatagcatcatatgcgtgaagagtaagctgaagcagtttgatagcgtcgtccacttgatcgattattacgtccagatgtgcaaagacaagcgtactgggcccgaggctccgaggaacggtaccgttcacttgtacctaacaaagcccctatacactagcgcaccatag

SEQ ID NO: 27104 - DNA, 1389 bp, synthetic construct
  source 1..1389: mol_type = other DNA; note = Synthetic coding sequence
atggacaaggacagccagggcctgctggacagcagcctgatggcctctgggacagcctcaagaagtgaagacgaggagagcctggctgggcagaagagagcatcaagtcaggcgcttggtacaatccccaaaagacgatcaagctcacgtttcattaaacgaaaaaagtttgacgatgagcttgtagagtctagccttgccaaatcatccaccagggcgaagggcgctagcggtgttgaaccagggaggtgtagcggcagtgaaccgtcaagtagcgaaaaaaaaaaagtaagtaaggcaccctctaccccagttcctccatcccctgcaccagcaccaggcttgacaaagagagtcaagaaatcaaaacaaccgctgcaggtgaccaaggatttagggaggtggaagcctgccgacgacctgctgctgattaacgctgtgctccaaactaacgacctgacatctgtgcaccttggtgtgaaattctcatgtagattcacccttagggaagtgcaggaacggtggtatgccctgctgtacgatcctgtgatctcgaaactcgcatgtcaggccatgagacagcttcaccccgaggcaatcgccgcaatccagagtaaggctctgttctctaaggcagaagagcagttgctgagtaaagtaggatctaccagccagccaactctggaaacctttcaggacctgttgcaccggcacccagatgcattctatctggcccgtaccgctaaggctttgcaggcacattggcagctgatgaaacagtactatcttctggaagaccagaccgttcagcccttaccaaaaggcgatcaggtgctgaacttcagcgacgcagaggacctgattgatgactctaagttgaaggacatgcgtgacgaggtcttggagcacgagttaatggtggccgataggcgacaaaaacgcgagatcagacagttagagcaagaattgcacaaatggcaggtgttagtggactccatcacaggcatgtccagcccagatttcgataatcagacactggccgtgttgcgaggcagaatggtgagatatctgatgcgctcgagggaaattactttgggacgcgctactaaagataaccagatcgacgtcgacttaagcctcgaagggccagcctggaaaatcagccgaaaacagggagtgataaaattgaagaataacggcgatttcttcatagccaacgaaggccggcgcccgatttacatagacggcaggcctgtattgtgcgggagtaagtggaggctgtccaataactctgtggtcgaaatcgcatccttgcgctttgtcttcttgattaaccaagacttaattgctctgatcagggcagaagctgctaagatcaccccacagtag

SEQ ID NO: 27105 - DNA, 576 bp, synthetic construct
  source 1..576: mol_type = other DNA; note = Synthetic coding sequence
atgggcaagaagaccaagcggaccgccgacagcagcagcagcgaggatgaggaggaatatgttgtcgagaaggtgctcgaccgcagagtggtgaaagggcaagtcgaatatcttctcaagtggaaagggttctcagaggaacataacacatgggaacccgaaaagaacctggattgccctgaattaattagcgagtttatgaagaagtataagaagatgaaagagggggagaataataaaccacgcgagaaatccgagtcaaacaaacgcaagtcaaacttttccaactctgcagacgacattaagagtaagaagaaaagagaacagtccaacgatatcgcccgcggcttcgaaagaggcctggaacccgagaaaattataggagccaccgatagctgcggcgatctgatgttcctcatgaagtggaaagacaccgacgaagcagatctcgtcctggccaaggaagcgaacgtgaagtgcccccagattgtcatcgcgttttatgaagaacgcctaacgtggcatgcgtatcctgaggatgcagagaacaaagaaaaagagactgcaaaatcctag

SEQ ID NO: 27106 - DNA, 1212 bp, synthetic construct
  source 1..1212: mol_type = other DNA; note = Synthetic coding sequence
atggccagcagcagcgtgccccccgccaccgtgagcgccgccaccgcaggtcccggacctggtttcggcttcgccagtaagacaaaaaaaaaacatttcgtgcagcagaaggtgaaagtgtttcgggcagcagatcctctcgtcggagtattcctgtggggcgtcgcccacagcattaacgagctgagccaggtgcccccacccgtcatgctgctccccgatgattttaaagcgtcaagcaaaatcaaggagtattgccctcaggtgttcaggaatctgagggacagatttggtattgacgaccaagattacctggtttcactgactcggaacccaccctctgaatctgaaggatccgatggtaggtttctgatcagctacgatcggaccctagtgattaaggaggttagttctgaagacatcgctgatatgcattctaatctgtcaaattaccatcagtacatagttaagtgtcacggaaacactttactgccccaattcctgggcatgtacagggtgagcgtggataacgaagacagttacatgctggtgatgaggaacatgttcagtcacagattgcccgtccatcgcaagtacgatctcaagggcagtttggtcagcagggaggcgtcagataaagaaaaggtgaaagaattgcccacgttaaaagacatggatttccttaacaagaaccaaaaggtctatatcggcgaggaggagaagaaaatttttctggaaaagttgaagcgcgatgtggaatttctcgtgcagcttaagataatggactactctttacttctcgggattcacgacatcatcagaggatccgagccagaggaggaggcccccgtcagggaggacgagagcgaagtcgatggtgactgctctctgacaggccccccagcacttgtcggcagctacggtacgtctcccgagggcattggcgggtacatccatagccatcgcccattaggcccaggcgagtttgaatcttttatagacgtctacgccatcaggagcgccgaaggagcacctcagaaggaggtgtacttcatgggactgatagacatcctcactcagtacgatgccaaaaagaaagcagctcacgcagcgaagacagttaagcacggcgctggcgcggaaatctcaacagtccaccccgagcagtatgctaaacgcttcctggatttcattaccaatattttcgcgtag

SEQ ID NO: 27107 - DNA, 576 bp, synthetic construct
  source 1..576: mol_type = other DNA; note = Synthetic coding sequence
aagatcgaggtgatcgagatcatgaccgaccggggcagcggcaagaagcggggcttcgcctttgtgacttttgatgaccatgactccgttgataagatagtcatccagaaataccacacagtgaacgggcataattgcgaagtgcgcaaggcgctttcaaagcaggagatggcttccgcaagctccagccagcgggggcggagcggaagtgggaattttggtggggggcgaggtggcggattcggcggaaacgacaacttcggtcggggcggtaacttttccggacgaggggggtttggagggtcgagaggcggcggaggttatggcggcagcggtgatggttataatggcttcggaaatgatggttcaaacttcgggggtggaggctcatacaacgacttcggtaattataacaatcagagttctaattttggcccaatgaagggaggcaacttcgggggcagaagttctgggccctatggtggaggaggacaatattttgccaaacctcgtaatcagggtggttacgggggtagttcatcctcgtcaagctacgggagcggtagaaggttctag

SEQ ID NO: 27108 - DNA, 543 bp, synthetic construct
  source 1..543: mol_type = other DNA; note = Synthetic coding sequence
atggagctgaccatcttcatcctgcggctggccatctacatcctgacgttcccgctgtacctcctgaatttcctgggactgtggtcatggatatgcaagaagtggttcccctattttctggttaggtttacagttatctacaatgagcagatggcaagtaagaaaagggaactgtttagtaacctgcaggaattcgccggtcctagcggcaagctgtccctcctcgaggtgggatgcgggaccggagccaatttcaagttctaccctcccggctgccgggtgacttgtattgaccctaaccctaacttcgagaagtttctgatcaagtccattgcggagaatcgccacctacaattcgaacgatttgtcgttgctgccggggaaaatatgcaccaggttgctgacggctccgtggacgtggtcgtttgcactctggttctgtgctccgttaagaatcaagaaaggatcctaagagaggtatgtagggtgttgcgacctgggggagccttctactttatggagcacgtggctgccgagtgttag

SEQ ID NO: 27109 - DNA, 1431 bp, synthetic construct
  source 1..1431: mol_type = other DNA; note = Synthetic coding sequence
atgggcctgaagaagatgaagggcctgagctacgacgaggccttcgccatggcaaacgatcctctggaggggttccatgaagttaacctggcttcaccgacatccccagacctgcttggcgtgtatgaaagtgggacgcaggagcagacgacttctccaagtgtcatatacaggcctcaccccagtgctctgtcctccgtccccattcaagcgaacgcgctcgacgtgagcgagctgcccactcagcctgtgtatagcagccctagaagactgaactgcgctgagatttcgagtatctcgttccatgtcactgatcccgccccatgctctacatccggagtcaccgctggcctcacgaaactcaccacgcgtaaggataactataacgcagagagggaatttctgcaaggcgctactataacagaggcgtgcgacggtagcgacgacatctttggattgtccactgattctctctctcggttgcggtctccctccgtgttggaggtgcgggagaaagggtatgaaaggctaaaggaagagttggccaaggcccagcgcgagctgaaactgaaagacgaggagtgcgagaggttgtccaaggtcagagatcagttggggcaagagctggaggaactcactgcgagcctgtttgaggaggcacataagatggtgcgcgaagcgaacatcaagcaggctacagctgagaagcagctgaaggaggctcaggggaaaatagacgtgctccaggcagaggtggctgctctcaaaacgcttgttttatctagtagtcctacctcaccaacacaggagcccctacccggcggcaagacacccttcaagaagggacatactcgcaacaaatctaccagctcagccatgagtggctcgcaccaggacttgagcgtaattcaacctatagttaaggactgtaaagaagcagacctgagcctgtacaacgaatttcgtttgtggaaagacgagccaaccatggacaggacctgtccttttctggacaagatttatcaggaggacatatttccatgtctcactttctcgaaatctgagttggctagcgccgtgctcgaagcagtcgaaaacaacacattatctatagagcctgttgggctccagccgatccgattcgtgaaagcgagcgccgtcgaatgcgggggacccaaaaagtgcgcactcacagggcagtcaaagtcctgtaagcatagaataaagctgggcgactctagtaactattactatatttcccccttttgtcgctacaggatcacttccgtgtgcaactttttcacatatatccggtacatacaacaggggctggtgaaacaacaggatgtggatcagatgttctgggaggtgatgcagcttagaaaggaaatgtccttggcaaagttgggttacttcaaggaggaattatag

SEQ ID NO: 27110 - DNA, 336 bp, synthetic construct
  source 1..336: mol_type = other DNA; note = Synthetic coding sequence
atggacaccatgatgctgaacgtgcggaacctgttcgagcagctggtgcggcgcgttgagatcttgagtgaaggcaacgaagtgcagtttatccagctagcaaaggacttcgaagacttccgtaaaaagtggcaaaggaccgaccatgagctgggtaaatataaagacctgctgatgaaagccgagactgagcgctcagccctggacgtcaaattgaaacacgctagaaaccaagtggacgtcgagattaagaggcggcagcgagccgaggcagattgtgagaagcttgagagacaaatccagcttatccgcgaaatgctgatgtgcgatacctag

SEQ ID NO: 27111 - DNA, 324 bp, synthetic construct
  source 1..324: mol_type = other DNA; note = Synthetic coding sequence
atgatcaagaacctggaggtgcagctgcggcgggccaccgacgagatgaaggcatatatttctagcgatcagcaggaaaaacggaaggctattagggaacaatatacaaaaaatacagctgaacaggagaatctcggcaagaaactccgcgaaaagcagaaggtcattcgcgagtcccatggcccaaacatgaagcaggctaaaatgtggagggatctcgagcaactcatggagtgtaaaaagcagtgctttctcaaacagcagagccagacctcgatcggccaggtcatccaagagggcggcgaggataggctgatcctctag

SEQ ID NO: 27112 - DNA, 2772 bp, synthetic construct
  source 1..2772: mol_type = other DNA; note = Synthetic coding sequence
atgtgcatccccccccccaacgtgaccggcagcctgcacatcggccatgccctaactgttgcaatacaagacgcgctcgtacgttggcacaggatgcggggggaccaggtgttgtgggtccccgggagtgaccacgccggcattgccacccaggctgtggttgaaaagcagctctggaaggaacggggcgtgcggagacacgagctgagccgcgaggccttcctgcgggaggtgtggcagtggaaggaagctaaggggggagaaatctgcgaacagctgcgcgctctgggggcctctctggattgggaccgggagtgctttacgatggatgtcggttcctccgtagccgtcaccgaagccttcgttcgcttatataaggcgggcctgctttatcggaatcatcaactcgtgaactggtcctgcgccctccgcagcgccattagtgacattgaggtggagaacagacctttgccaggccacacccagctccggctccccggctgccccacaccagtgagttttgggttgctcttctcagtcgcctttccagttgacggggaaccagacgccgaagtcgtggtaggtactactcggccggaaactctccccggggatgtggcggttgccgtgcacccagatgactccagatacactcatctccacggaagacaactgcggcatccgctaatggggcagcccttgcctctgatcaccgattacgctgtacagcctcatgttggtaccggggccgtcaaggtcacgccggctcactcccccgcagacgcagaaatgggcgcaagacacggcttgagtcccctaaacgtaatcgctgaggatggcacaatgaccagcttatgcggcgattggctgcagggcctgcatcggttcgtggctagggaaaaaattatgtctgttctgagtgaaaggggcctgtttcgaggattacaaaatcacccaatggtgcttcccatctgtagcagaagcggcgatgttatcgagtacctgctaaagaatcagtggttcgttcgatgccaagaaatgggagccagggcagccaaagctgttgagtctggcgcattggagcttagcccaagctttcaccagaaaaactggcagcactggttctctcacatcggcgactggtgcgttagcagacaactgtggtggggccaccagatccctgcttacctagttgtggaggaccatgcgcagggagaggaagattgttgggtggtgggtagatcagaggcggaggcgcgtgaagtggctgccgagctgactggcaggcctggtgctgagctcaccttggagcgcgatcccgatgtccttgatacttggttctcatccgctctgtttcccttctccgctctcggatggcctcaagaaactcctgacttggcccggttctatccactgtccctgctggaaaccggttctgacctcttattgttttgggtcggtagaatggttatgcttggtacccagctcacaggccaactgccattctcaaaagtgttgctgcatccgatggtgagggaccggcaaggccgcaagatgtccaaatctctggggaatgtactggaccctcgggacatcattagcggggtagagatgcagttgctgcaggagaaactgcgttccggcaacctcgatcccgcagagttggcgattgtcgctgctgcccaaaagaaggacttcccacacggaatccccgaatgtggcacagatgctttgcgttttactctgtgttcccatggcgtgcaggcaggggatctgcacctgtctgtatctgaggttcagtcatgccgccatttttgcaataagatttggaacgctcttcgatttatcttaaacgcactcggggagaagttcgttcctcagccagcagaagaactgtccccttccagcccaatggacgcttggattcttagtcgcttagcactggcggctcaggagtgtgaacggggattcctgacacgtgagctgtcccttgtcactcacgccctacaccacttttggctccataatctgtgtgacgtttatctcgaggccgtgaagccagtcttgtggcattccccaagacctctgggaccaccccaggtgctcttcagttgtgccgacctcggcctgaggctgctcgctcctcttatgccatttctggcagaggagctgtggcaacgactgccaccccggcctggttgcccccccgctccttccataagcgtggcgccctaccctagtgcgtgctctctcgagcattggcggcagccagaactagagcgcagattcagtagggtccaagaggtggttcaagttctccgtgctttgcgcgcgacgtaccaactaaccaaggccaggccacgggtgctcctgcagtcaagcgagcctggagaccaaggcttgtttgaggcattccttgagccattagggacactgggttactgtggtgccgtagggttgctaccacctggcacagcggctccaagcggctgggcccaggcccctttatccgacactgctcaggtgtacatggagttacagggattggtggatccacagatccaactgcccttactggctgcgaggaggtacaagctgcagaaacagctggattctctgacagccagaactcccagcgagggagaggctgggacacagcgacaacagaaattgtcctccctgcaattggaattaagcaagctggacaaggcggcctcacacctgagacagctcatggatgagcctcccgcccccggctcacctgagctctag

SEQ ID NO: 27113 - DNA, 2076 bp, synthetic construct
  source 1..2076: mol_type = other DNA; note = Synthetic coding sequence
atggaggagagccccctgagccgggcccccagccggggcggcgtgaacttccttaatgtcgcccgaacatacatccctaatacaaaagttgagtgccactacaccttacctcccggcactatgcccagcgccagtgactggataggcatctttaaggtggaggcagcgtgtgtgagggactaccacacttttgtgtggtccagcgtgcctgagtccacgactgacggatctcccatacatacttctgtgcagttccaggcttcttatctgccaaagccgggtgcacaattataccaatttaggtacgtcaatcggcagggtcaggtttgtgggcaaagccctcccttccagttccgcgaacctaggcctatggatgagttagtgacacttgaagaggcagatggcggaagtgatattctgttagtagtccccaaagctactgtgctgcaaaaccagttggatgagtcccagcaagagcggaacgatctcatgcagctcaaactgcaactggaagggcaggttaccgagctgaggagccgggttcaggaattggaacgggcactggcaactgcccgccaggagcacacagaactgatggagcaatataaggggatttcacgtagtcacggtgagatcacagaagaacgcgatattctttccagacagcaaggagaccatgtggcccgcatccttgagcttgaagacgatattcaaaccatctccgagaaggtgttgacaaaagaggtggagctagaccgattgcgagataccgtgaaggcactaacgagggagcaagagaaattactgggacagttaaaagaagtgcaggccgataaagaacaaagcgaagctgagctccaggtggcccagcaagagaatcatcatctcaacctggacctgaaagaggccaagagctggcaggaagagcagtccgctcaggcccagaggctgaaggataaagtggcgcagatgaaagataccctggggcaggcacagcagcgggtggccgaactcgaacctttgaaagagcagctacgaggtgcccaagagctcgccgcctcctctcagcaaaaagctaccctgctcggcgaggagctagcaagtgcagcagccgcccgggaccggacgattgcggaactgcaccgctcacgcctggaagttgccgaggtgaacggaaggctggcagaactgggcttacacctgaaagaagagaaatgccaatggagcaaagaacgagccggtttattgcagtctgtagaagccgagaaagacaagattctcaaactgtctgcagaaatccttcggctggagaaggccgtgcaggaggaacgcactcagaaccaagtttttaagacagagctggcaagagagaaggattcatccttagtgcagctgtccgagagcaaacgtgagttgaccgagctgcggagcgcactgcgagtgttgcaaaaagagaaagaacagctgcaggaagaaaaacaagagctgttggaatatatgcggaaactggaggcaaggttggagaaagtcgctgatgaaaaatggaacgaggacgcaaccacagaggatgaggaggccgcagttggacttagttgccccgcagcactgaccgactccgaggacgaatctcccgaggacatgagactcccaccctacgggctgtgcgagcgtggtgatcccggttcctctcctgcaggacctcgagaggccagccccttggtcgtgatctcccagcccgcccccatctctccccacctttctgggcctgccgaagactcctcaagcgattctgaggccgaagacgaaaaaagtgtcctgatggcagccgtccagagtggaggtgaggaggctaatttactcctccctgagctaggatccgccttctacgacatggcttctgggttcaccgtcggcacactttcagagacctccactggaggccctgccactcctacctggaaggaatgccctatctgtaaggagcgctttcctgcagagagtgacaaggatgcactggaagatcacatggacggacactttttcttctccacccaggaccccttcaccttcgagtag

SEQ ID NO: 27114 - DNA, 366 bp, synthetic construct
  source 1..366: mol_type = other DNA; note = Synthetic coding sequence
atgaacgagagcaagcccggcgacagccagaacctggcctgcgtgttctgccgcaaacacgacgattgccctaacaagtacggagagaagaagaccaaagagaagtggaacttaaccgttcactactattgtctgctcatgtccagcggtatttggcagcgtggaaaggaggaagagggagtgtacggcttcctaatagaggacattagaaaagaggtcaatagagcttctaaacttaaatgttgcgtgtgtaaaaaaaacggggcctctatcggctgcgtggctccccgatgtaaacggtcatatcacttcccctgtggcctgcagagggaatgcatttttcagtttaccggtaattttgcctag

SEQ ID NO: 27115 - DNA, 657 bp, synthetic construct
  source 1..657: mol_type = other DNA; note = Synthetic coding sequence
atgaactgccggagcgaggtgctggaggtgagcgtggagggccggcaggtagaggaagccatgctggccgtgctgcacactgttctgttacatcgcagcactgggaagttccactacaaaaaggaaggcacctattctatcggaacagtggggacacaggacgtagattgtgatttcattgattttacttacgtccgcgtgagcagcgaagagctcgaccgcgccttgagaaaagtggtaggagagtttaaggacgctttgaggaactcagggggcgatggcctgggccagatgtctctcgaattttatcaaaaaaaaaagagccggtggccgttttccgacgagtgtataccatgggaagtatggaccgttaaagtgcacgtagtggctctcgccaccgagcaggagcgacaaatctgtcgagaaaaggtaggggagaagttgtgcgagaaaattattaacattgttgaagttatgaacagacacgagtacctgccgaaaatgcccacgcagtctgaggtggataacgtgttcgatactgggcttcgcgatgtacagccatatctgtacaagatatctttccaaatcaccgacgcgctaggaacctcagtcaccaccaccatgagaaggctgattaaggatacgttggccctgtag

SEQ ID NO: 27116 - DNA, 1899 bp, synthetic construct
  source 1..1899: mol_type = other DNA; note = Synthetic coding sequence
atggacaccatgatgctgaacgtgcggaacctgttcgagcagctggtccggagagtggaaatactttccgaagggaatgaagtgcagttcatccagttagctaaggatttcgaagactttcggaaaaaatggcagagaacagatcacgagctcggaaagtataaggaccttttaatgaaagccgagactgagaggagcgccttggacgtgaagctgaaacatgctcggaaccaggtcgacgtggagatcaaacggcgacagagggcagaggccgactgtgagaagttggagcggcagatccagctgatccgggaaatgctaatgtgcgacactagcgggagcattcaattaagcgaagaacagaagagcgcacttgccttcttaaatcgagggcagccctcttcaagcaatgcaggcaacaaaagattatcgactatcgatgagtctggtagcatccttagcgatattagtttcgacaaaaccgacgaaagcctggactgggacagttccctagttaaaacttttaagcttaaaaaacgtgaaaaacggcggtcgacttcaaggcaatttgtggacggaccccccggcccagtgaagaagaccaggagcattggttcagcagtggatcagggaaacgagtcgatcgtcgccaagacaaccgttacggtaccaaatgatggaggaccaattgaagctgtctctacaattgaaaccgttccctactggacacggtcccgacgaaaaaccggcaccttgcagccttggaatagcgatagtaccctgaattctaggcaactcgaacccagaacagagactgactctgttggcacgccacagagtaatgggggtatgcgcctgcacgacttcgtctcaaaaacggttattaagccagagagctgcgtaccctgcggcaagcgaattaagtttggaaaactgtccctgaaatgcagggactgccgtgtggtgtctcacccggagtgcagggatagatgcccactaccttgcattcctacgctgatcggcactccagtaaagataggtgaagggatgctggctgattttgtctcacagacaagtcccatgatcccctctatagtagtgcactgcgtgaacgagattgaacagagaggactgactgagacaggtctttacagaatatccggctgtgaccgcactgtcaaggaattaaaggaaaagttccttcgcgtcaagacagtgcccctgctgagtaaagtggacgatattcacgccatctgttccttgctgaaagactttttacgtaatctaaaggaaccgctgttaacattccggctgaacagagcttttatggaggccgccgagatcaccgacgaagacaactccattgccgccatgtaccaagctgtcggcgagctgcctcaggctaacagagatacccttgcttttcttatgattcacctccaaagggtggcacagagcccccacaccaagatggacgttgctaatctggccaaagtgttcggcccaactattgtggcccatgcagtcccaaaccccgaccctgtgactatgctgcaggatattaaaaggcagcccaaagttgtggagcggttgttgtctctgcccctagaatactggtcccagtttatgatggtagagcaggagaatatagatcctctgcacgtcatcgaaaactcaaacgccttctctacaccacagacaccagacattaaggtgtctctgcttgggcctgtaacaacgcctgagcaccagttgctaaagactccaagcagctcatcactgtcacagagggtccggagcacattgaccaagaacacccccaggttcggttctaagagtaaatcagccacaaacctcggaagacagggaaacttctttgctagtcctatgcttaagtag

SEQ ID NO: 27117 - DNA, 1134 bp, synthetic construct
  source 1..1134: mol_type = other DNA; note = Synthetic coding sequence
atggccaccatccccgactggaagctgcagctgctggcccggcggcgccaggaagaggctagcgtacgcggcagggaaaaggctgagagggaacgactgtctcagatgccagcatggaagagagggctgcttgagcgcagacgtgcaaagttgggcctgagtcccggcgagcctagtcctgtcctgggaactgttgaagccgggcctccagacccggatgagagtgcagtattactggaagccatagggcctgttcaccagaacaggttcatccgacaggaaaggcaacagcagcaacagcaacaacagcgctccgaggaactgctagcagagcgcaaacctggacccctggaagcacgggaaagaaggccaagtcccggggagatgcgcgatcagagtcccaaggggagagagagccgagaggaacgcctgagtcctagagaaacaagagaacgcagactgggcatcggcggcgctcaggagctttcacttcgcccactggaggcccgagattggagacagagtccaggcgaagtgggggatagatccagtaggctttccgaagcctggaagtggcggctaagccccggcgagaccccggaaaggagccttcggcttgcggagagtagggagcagagcccgagacgcaaagaggttgagtcccgtctcagccccggggaatccgcctatcagaaactagggctcactgaggctcataagtggcgccccgattccagggaaagccaggagcagagcttagttcaactggaagctaccgaatggcgccttcggtcaggggaggagcgacaggattacagtgaagagtgtggtcggaaggaggaatggccagtccctggagtggcccccaaggaaacagcagaattgtccgagacacttaccagagaggcacaggggaacagtagcgcgggggttgaagctgccgaacagagaccggtcgaggatggcgagagagggatgaagcctacagaaggctggaaatggaccctgatcatgagcttagccggcaagggcaaccagcatctggtgacctgctttccacaccccgtctcaggtgggcgagctaactgtcccatttccaccttaatacagtccccctggtgtgggtggggttag

SEQ ID NO: 27118 - DNA, 1134 bp, synthetic construct
  source 1..1134: mol_type = other DNA; note = Synthetic coding sequence
atggccaccatccccgactggaagctgcagctgctggcccggcggaggcaggaggaagcatcggtacggggccgagaaaaggctgagagggaaaggctgtctcagatgcccgcctggaaacggggccttctagaaaggcggcgggccaaattaggtctttcacccggggaaccttcacctgtgctgggcaccgtcgaagcagggccccctgaccctgatgaatctgccgtcctactcgaagccatcggccctgtgcatcagaaccgctttattaggcaggagcgccagcaacagcagcaacaacagcaaaggtctgaagagctactagcagagcggaaacctgggccgctggaagcgcgagagagaagaccttcaccaggcgaaatgagagatcaatctcccaaggggagggagagccgcgaagaacgcctgagcccccgggaaacccgagagcgcaggctgggcatcgggggtgcccaagaactctccctcagaccactggaggcacgagactggagacagtcccctggcgaggtcggagatcggagttccagattaagtgaggcctggaagtggaggctctctcccggggagacaccggagcgatctctgcggttagccgaatctagagagcagagtccacgccgcaaggaagttgaaagcagactctcgcctggcgagtctgcctaccaaaagcttggactgaccgaagctcacaagtggagacccgattcacgcgaaagtcaagagcagagcttagtccagctcgaagctaccgagtggcggctcagaagtggcgaggaacgccaagattatagtgaggagtgcggaaggaaagaggagtggccagtacctggagtggcgcccaaggagacggcagagctctctgaaaccctcacacgtgaggctcagggcaattccagcgccggagtagaagccgcagagcagcgaccagtggaagacggcgaacggggcatgaagcctaccgaaggctggaagtggaccctcatcatgtctctcgcaggcaaggggaatcagcacctggttacttgtttcccccacccagttagcggcggtcgcgccaactgtcccatcagcaccctgatacagtcgccttggtgcggctggggctag

SEQ ID NO: 27119 - DNA, 774 bp, synthetic construct
  source 1..774: mol_type = other DNA; note = Synthetic coding sequence
atgccccacctgcccctggccagcttccggccccccttctggggcctaagacacagccgaggactgcctagattccactctgtatcaacacagagtgagcctcacggctcccctattagccggcgcaacagggaagcgaagcagaaaagattgagggagaagcaggcaacccttgaagctgagatagcgggggaatcaaagtctcctgcggagtccatcaaggcctggcgcccaaaggagcttgtgttgtacgagatcccaaccaaacccggtgagaaaaaggatgtgagtggacccctcccaccggcttattccccccgatacgtggaggcagcctggtacccgtggtgggtacgtgaaggattcttcaaaccagaataccaggcaagactgccccaggccaccggagaaaccttttcaatgtgtattccgcctccaaacgtgacagggagcctccacataggccacgctctgactgttgctattcaagatgctcttgtcagatggcatagaatgaggggtgaccaggtgctttgggtgccgggaagcgatcatgcagggatcgccacccaggctgtggtcgaaaagcagctgtggaaggagagaggagttcgccgtcacgagctgtctagggaagccttcctgcgtgaagtttggcagtggaaggaggctaaaggaggtgagatctgcgagcaactaagagccctcggggcctccctggactgggatcgggtgttttatcacgggtgctggctgctgtctggttgcgactag

SEQ ID NO: 27120 - DNA, 1446 bp, synthetic construct
  source 1..1446: mol_type = other DNA; note = Synthetic coding sequence
atggccagcgccgccagcgtgaccagcctggccgacgaggtgaactgccccatctgtcagggaacgctgcgtgagcctgtgactatagactgcggtcacaatttttgcagagcttgtcttactcgatattgcgagattccggggccggatctcgaagaatcacccacgtgtcctctgtgtaaagagcccttccgacccggcagcttccgccctaattggcaactagcaaacgtcgtagaaaacattgagcggcttcagcttgtctccacactgggactgggcgaggaggatgtgtgccaggaacatggggagaagatatacttcttttgtgaggatgatgaaatgcagctgtgcgtagtctgtagggaggccggagagcacgccactcatactatgcgcttcttagaggacgctgctgctccatatcgcgaacaaatccacaagtgtttgaaatgcctgagaaaggaacgagaggagattcaggaaattcagtcacgagagaataaacgaatgcaagtactcctgactcaggtgagtactaaaagacagcaggtcataagtgagtttgctcacctgagaaaattccttgaagagcaacagagcattcttctggcacagttggaaagtcaggatggcgatattctgcgtcagcgcgatgaatttgacctgctggtggcaggggaaatctgtcggttttctgctttgattgaagagctcgaggagaagaacgagaggccggcacgcgagctgctcactgatatcaggtccaccctgattcgttgcgaaacccggaaatgccgcaagcctgtggcggtctccccagagttgggacaaagaattcgggacttccctcagcaggcgctgcccctgcagcgcgagatgaaaatgtttctggagaatctccctaaccatctggtaatccccaccgcgcacatttccctggatccgcagacctctcacccgaagctactgctttctgaagatcaccagagagctcagttctcttataaatggcagaacagccccgataacccccaacgttttgatagggccacctgcgttttagctcacactggaatcaccggtggtcgtcacacttgggtggtcagtatcgacctcgctcatgggggatcctgtacagtgggcgtggtgagtgaagacgtccagaggaagggcgaactccggctgcggcccgaggaaggcgtctgggctgtcagactggcgtggggattcgtatctgccctgggttcgtttccaactaggttgacactgaaggagcagcccagacaagttcgcgtcagcctggattacgaagtaggatgggtaacttttaccaatgctgttacacgtgaaccgatctacacttttacagcgagcttcacacgcaaggtaattccattttttggcttatggggccgggggagttccttcagcctctccagttag

SEQ ID NO: 27121 - DNA, 597 bp, synthetic construct
  source 1..597: mol_type = other DNA; note = Synthetic coding sequence
atgaccctgcggtgcctggagcccagcggcaacggcggcgagggcacccggtctcaatgggggactgcaggcagcgcagaggagccttctccacaggcagcacgactcgcaaaggccctacgtgagctcggacagacaggctggtactgggggagcatgacagtcaatgaggctaaagagaaactcaaagaagccccagaaggaacattccttatacgtgattccagccacagtgattatctgctgaccattagtgtgaagacaagcgccggaccaaccaacctacggatagagtaccaagacggaaaattcagacttgactcgataatctgcgttaagagcaagcttaagcaatttgattccgtggttcatcttatcgattattatgtacagatgtgtaaagataagagaactggccctgaggctcctcggaatggtacggtccatctgtacctgactaaaccgctgtataccagcgcaccttctctacagcacctgtgccgcctgacaatcaacaaatgtactggcgctatttggggcctgccactgcccacacggctgaaggactatctcgaagagtataaattccaggtgtag

SEQ ID NO: 27122 - DNA, 345 bp, synthetic construct
  source 1..345: mol_type = other DNA; note = Synthetic coding sequence
atgaccacccggcaggccaccaaggaccccctgctgcggggcgtgtcacctacgccatccaaaatccccgtgcggtctcaaaaaagaactccctttcctactgtcacctcatgcgccgtggatcaggagaaccaagatcccaggcggtgggttcagaagccacctctgaatatccaacggcccctggtggactctgcgggccccagaccgaaggctaggcaccaagcggagacctctcagcgcctggttgggattagtcagccacggaaccccttggaagagttacggcccagccctaggggccagaacgtgggacctgggccacctgctcaaaccgaggcctag

SEQ ID NO: 27123 - DNA, 1446 bp, synthetic construct
  source 1..1446: mol_type = other DNA; note = Synthetic coding sequence
atggccagcgccgccagcgtgaccagcctggccgacgaggtgaactgccccatttgtcaagggacactgcgggagccagtgaccatcgactgcggccataacttttgccgtgcctgtctgactcgatattgtgagattcccggcccggatctggaggagtccccaacatgccccctctgtaaagagccttttcgtcccggctctttcagacctaattggcaactggctaacgtggttgagaacatcgagcgattacagctagtctctacattaggcctcggagaggaggacgtatgtcaagagcatggcgagaaaatatacttcttctgtgaagatgatgaaatgcagctgtgtgtcgtgtgtagggaagccggagagcacgctacccacaccatgcggttcctggaagacgccgccgctccatatagagagcagattcataagtgtctgaaatgcctcaggaaagagagggaagaaatacaagagatacaatctcgtgaaaacaaacgaatgcaggtcctgctgactcaggtgtccacaaagaggcagcaggtgatttcagaattcgcacatctccgcaagttcttagaagaacagcaatcaatcctcctagcacagctggagtcccaagacggcgacattctccgccaacgtgacgaattcgacctgcttgtcgctggcgaaatttgtcggtttagcgccctgatagaggaactcgaggaaaagaatgagcgacccgctagagagctgctcaccgatatcaggtctacactgatcaggtgtgagacccgcaaatgtcgtaaacccgtggccgtctcgcccgaactcggtcaaaggattagagacttcccccagcaggcgctgccactgcagcgggaaatgaagatgttcctggagaacctgccaaatcacctagtcatcccgacagcacatatttctcttgacccacagacttcccaccctaaactgttactttcggaagatcaccagcgcgcacaattcagctacaaatggcagaacagccccgacaatccccaacggttcgaccgcgccacctgcgtgctggctcataccggcatcacaggcggaaggcatacctgggtggtgtccattgacttggcacacggagggtcatgcacggtcggcgtggtcagtgaagacgttcagcggaagggcgagttgcggctccgcccagaggagggcgtctgggccgtaaggcttgcttggggcttcgtttctgctttaggatcctttcccacaaggctcacactcaaggagcaacccaggcaggtcagagtgagtttggactacgaggtaggctgggtcactttcactaacgcagtgactagagaacccatctacacctttactgccagctttactagaaaggtgatcccgttcttcgggttgtggggacgtggctcaagtttcagcctttcttcctag

SEQ ID NO: 27124 - DNA, 396 bp, synthetic construct
  source 1..396: mol_type = other DNA; note = Synthetic coding sequence
atgagcaagcggtacctgcagaaggccaccaagggcaagctgctgatcattatatttatcgttactctgtggggtaaagtggtatcctcagcaaaccaccacaaggcccatcacgtgaagacaggaacctgcgaggtggtggccctgcataggtgctgtaataaaaacaaaattgaagagagatcacagaccgtgaagtgctcatgttttcccggacaagtcgctgggacaacccgcgcagctccgtcctgtgtcgacgctagtatcgtcgaacagaaatggtggtgtcatatgcagccttgtctggaaggagaggagtgtaaggtgctcccggaccgtaagggttggagctgcagttccggcaacaaagtcaagaccacccgtgtaactcactag

SEQ ID NO: 27125 - DNA, 765 bp, synthetic construct
  source 1..765: mol_type = other DNA; note = Synthetic coding sequence
atggtgcgggaggccaacatcaagcaggccaccgccgagaagcagttaaaggaggctcagggtaagattgatgtcctgcaggcggaggtggccgctttaaagacgcttgtgctgagctcatcaccaacctctcctacccaggaacctttaccagggggtaaaaccccttttaaaaagggtcatacacggaataaatcgacaagctcagccatgtcaggtagtcatcaggacctatcagtgattcaacccatcgtaaaggactgtaaggaagccgacctctctctgtacaatgagtttaggttgtggaaggacgagcccaccatggatagaacctgcccatttctcgataaaatctaccaagaggacattttcccctgtctgacctttagtaaatccgaattagccagtgccgtcttagaggctgtcgagaataacacattaagtatcgaacctgtaggcctccaacctatacggttcgtgaaagcctcggcggtggaatgcgggggcccgaagaagtgcgctttaactggacagagcaagtcatgcaaacacagaattaagctgggagatagcagtaattattactacatatctcccttttgcaggtataggattacgtctgtgtgtaatttcttcacatatatccgctacatccaacaggggctggtcaaacagcaggatgtcgatcagatgttctgggaggtgatgcagttacgaaaggagatgtcattagcgaaactgggctactttaaagaggagctgtag

SEQ ID NO: 27126 - DNA, 2772 bp, synthetic construct
  source 1..2772: mol_type = other DNA; note = Synthetic coding sequence
atgtgcatccccccccccaacgtgaccggcagcctgcacatcggccacgccttgactgtcgccattcaggacgccttggtgagatggcaccgcatgcgtggcgatcaggtgctgtgggtgcccgggtcagatcacgccggaatagccacacaagctgtggttgaaaaacagctgtggaaagagaggggggtgaggaggcatgaattgagccgagaggctttcttacgtgaggtgtggcaatggaaagaggccaagggcggcgaaatctgtgagcagttgagagctctgggggctagcctggactgggatagagaatgttttaccatggatgtgggcagcagcgttgctgtgaccgaagcgtttgtgagattgtacaaggccggtcttctttatcggaaccaccaacttgtgaattggtcgtgtgccctgagatctgctatctctgatatagaagtggagaatcgacctctacctggacacacacagctcaggctgcccggctgccctacacctgtttcttttggattacttttttctgtagcattcccggtggatggcgagcccgacgcagaagtggtcgtgggcacgacccgaccagaaacactacctggagatgtcgcagttgctgtgcatccggacgactcaaggtacacgcacttacacgggaggcaacttaggcacccactgatgggacaacctctgcccctgatcactgactatgctgtgcagccccacgtggggacaggggccgtgaaggtaactcccgcgcatagtcccgctgatgccgaaatgggggccagacacgggctaagtcctctgaatgtgattgccgaggatggaacaatgaccagtctgtgtggcgattggctgcaggggctccacagatttgtggcccgcgagaagattatgtcagtgctctccgaatggggactctttagaggcctgcagaaccatcctatggtgctgcccatctgttcacggtcgggcgacgtgattgagtatctactgaagaatcagtggtttgtgaggtgccaggagatgggagctcgtgccgcgaaagctgtggaaagtggagctttggaattgtctccaagcttccaccaaaaaaactggcagcactggttcagccacattggcgactggtgcgtgtcccgtcagctctggtggggacatcagataccagcctacttagtcgtggaggaccatgctcaaggcgaagaggattgctgggttgtgggccgctccgaagccgaggcacgcgaggtagcagccgagctgaccggccgaccaggcgctgagttaaccctggaacgagaccctgacgtgttggacacttggttcagctcggccctgtttcccttcagtgcactcggctggccgcaggagacacccgacctggctagattctacccactgagcctgctggagaccgggtccgacctgctcctcttctgggtgggacgaatggtcatgctgggcacacaactgaccgggcagctcccattctctaaggtgttactgcacccaatggtgcgcgacagacaagggaggaagatgagcaagtccctaggaaatgtgctcgacccacgtgatattatctcaggggttgagatgcaagtgctgcaagaaaagctccgaagtgggaatctggatccggctgaattggctatcgttgccgccgcccagaagaaagactttccccatggcattccagagtgtggaacggacgccttgcgctttaccctgtgctctcatggagtgcaagccggagacctccatttatcggtaagtgaagtacagtcctgccggcacttttgcaataaaatctggaatgcactgcgctttatactgaacgcgctcggagaaaaattcgttccacagcctgctgaagaactcagcccttcctcccctatggatgcttggatactatctaggctcgcattggctgcgcaggagtgcgaaagggggtttttgacccgggaactgtcactggtgacacacgccttacatcatttttggctgcataacctgtgcgatgtctaccttgaggcagttaagcccgtgctgtggcactcaccgcgtcctttagggccaccacaggttctgttctcctgtgctgatcttggattacgactgctggctcctctgatgccttttttagcagaagaactgtggcagagactgcctccaaggcccggttgccctcccgcaccttcaatatcagttgccccctatcccagtgcctgcagcctggagcactggaggcaaccggagctggagagaagattttctagggtgcaggaagtggtccaggtactgcgggcactgagggccacgtaccagcttacaaaagcccggcccagggtgctcttacaatcctcggagcccggcgaccagggcctctttgaagcgttcctggagcccctgggcactcttggctattgtggcgccgtgggcctcctcccaccgggtgcggctgcaccaagtggctgggcacaagccccattgagtgacacagcccaggtatatatggagctgcaagggctcgtcgacccacaaatacagctgcccctgttggcggctagacggtacaaactccagaaacagctggattctttgaccgcaaggacacccagtgaaggcgaggcggggacacagcgccagcagaaactatcgagcctgcagttagagctttccaagttagacaaagctgcctcccacctgaggcagcttatggacgagcctcccgcacctggttctcccgagctctag

SEQ ID NO: 27127 - DNA, 5229 bp, synthetic construct
  source 1..5229: mol_type = other DNA; note = Synthetic coding sequence
atgatggagggcaacggcaccgagaacagctgcagccggacccggggttggctccagcaggacaacgacgcgaagccatggctctggaagttcagtaattgtttcagccgaccggagcagaccctgccgcattctccacagactaaggagtacatggaaaataagaaggtggccgtcgaattgaaggatgtgcctagccctcttcacgccggaagcaaactgttcccagctgtgccacttcctgacataagaagcctgcagcagcccaaaattcagctgagctctgttcccaaagtatcatgttgcgcccattgccccaatgagccttctactagccctatgaggttcggcgggggaggcggtgggtccggcggaacatcaagtttgatccatccaggagcactgttggacagccagtctaccagaaccataacttgtcaggtgggatcaggttttgctttccagagtgcctccagccttcagaacgcctccgccagaaacaatctcgccggcattgcctccgatttccctagcatgtgcttagaatcaaatcttagctcctgcaaacacctgccgtgctgtgggaagctgcactttcagtcctgccacggtaacgtacataagctgcaccagttcccaagtctgcaagggtgcactagcgcaggatatttcccctgttccgactttacaagtggcgcgcctggccatctggaagagcacatcagtcagagcgagctgaccccccacctgtgtactaatagcctgcatcttaatgtggtaccccctgtatgcctgaaagggagcctctattgtgaggactgcctgaacaaaccggcaaggaactccatcatagatgcagccaaagtttggcccaatatccccccgccgaatacccagcccgccccattagccgtgcctctgtgtaatggttgtggtacaaaaggcacgggcaaggagactaccctgctgctggctactagtctaggcaaggccgcctctaaatttggcagtcccgaggttgccgtagccggtcaggtgttagagaacttgccacctatcggggttttctgggatattgagaattgtagcgtgccctccggccgcagcgcaaccgccgtggtacagcgaatcagggagaagttctttaaggggcaccgcgaggcggagttcatctgtgtttgcgacatttctaaagagaacaaagaagtgatccaagagctgaataactgtcaggtaaccgtggcccatatcaacgctaccgcaaaaaacgcggccgatgacaaactgaggcagagccttcgtcggttcgcaaatacccacaccgcacccgcaacagtggtactggtgtctacggacgttaatttcgccctggagctgagtgatctacgacaccgccacggatttcatattatactcgtgcataagaaccaggccagcgaagctctcctgcaccacgcaaatgagctgatccgctttgaagagttcattagtgacttgccgccgcgattacccttgaagatgccgtgccacactctcttgtatgtgtataatttgcctgccaacaaagatggcaagtcagtttcgaacaggctgcgccgattatccgataactgcggcgggaaggttctaagtatcaccggctgttctgctattctccgcttcattaatcaggactctgcggagagagcccaaaaaagaatggagaacgaggacgtgttcggaaatcgcatcatcgtcagcttcacgccaaagaacagagaactgtgcgagactaagagttccaatgccatcgccgataaggtgaaaagccccaagaagctaaaaaacccaaaattatgccttatcaaggatgcatcagagcagagctcgagcgcaaaggcaacccctggaaaaggatcccaagcaaactccggatcagccacaaagaacactaatgtaaagtcgttacaggagttgtgccgaatggagtccaaaaccggccaccgcaattcagagcaccagcaaggacatctgcgactcgtcgtgcccactcacggcaactcaagtgccgcagtgtccacaccaaagaacagcggtgtggcggaaccagtctataaaacatctcaaaagaaagaaaacttaagtgccagatctgtaacttcaagtccagttgagaaaaaagacaaagaagagacagtcttccaggtgagttatccctctgctttttctaaactcgtggcctccaggcaggtgtcccccctgctggcctctcagtcctggagcagttcgcgctcaatgagtccaaaccttctaaacagagcttcccccctcgccttcaacatagccaactcttctagcgaggctgattgtccagacccgtttgctaatggtgctgatgtccaggtttctaacattgattaccgactctcccgcaaggaacttcagcagctactgcaggaagccttcgctagacacgggaaagttaaatcagtggaactgtccccccacaccgactatcagctcaaggctgtggtgcagatggaaaatctgcaagacgctatcggcgcagttaattcactgcataggtataaaatcggctccaaaaagatcctcgtgtccctggctactggcgcggcatcaaagtctctgagtctgctatccgccgaaaccatgtctgtcctgcaggatgcacctgcttgttgtcttcccctctttaaatttaccgatatctacgagaagaagttcggccacaaactcaacgttagtgatctgtacaagttgaccgacaccgtggctattcgggaacagggcaatggcaggttagtttgcctgctgccctcctctcaggcccgccaatctccccttggcagcagccagtcacacgacggaagctcaaccaactgctctcccatcatcttcgaagagctggaatatcacgagccagtgtgtcggcagcactgcagtaacaaggacttttccgagcacgaattcgatccggactcttacaagatccctttcgtgatattgtcactgaagacattcgcccctcaggtgcattcacttcttcagactcatgaggggaccgtgcctctgttatcttttccggactgttacatcgctgaatttggggacttggaggtcgtgcaggagaaccaaggcggggtcccgttggagcacttcataacatgcgtacctggcgtgaacatagccaccgcccagaacggcatcaaggtagtgaagtggattcacaacaagcctccccctccgaataccgacccgtggctgctcaggtcgaaatcgcctgtgggcaacccgcagctgatccaattcagcagagaggtgatagacctgctcaagagccagcctagctgcgttattcctatttcccacttcataccatcataccaccaccacttcgcaaagcagtgccgggtgagcgactacgggtacagcaaactgattgagctactcgaggccgtgccccacgtactgcagatcttgggcatggggagcaaaagactgctaacgctgacccatagagctcaagtgaagcgcttcacccaggacctgcttaaactgctgaagagccaagcctctaaacaggtgatcgtacgggagttttcccaggcataccactggtgcttttccaaggactgggatgtcacggagtacggcgtttgcgaattgatcgacatcgtctccgagattcctgacactaccatatgcttatcgcagcaggataacgagatggtgatatgtattccgaagagggagcggacccaagacgaaatcgaacgcactaaacaattttcaaaggacgtggtggaccttctcaggcaccagccgcactttagaatgccatttaacaagttcatcccatcttatcatcatcactttggaagacagtgtaaattggcatattatggattcaccaagttgctggagttattcgaggccattccggacaccctgcaggtcttggagtgcggggaggagaagatcttaacattgaccgaggtggagaggtttaaagccctcgccgcacagtttgttaaactcctgaggagtcagaaggacaactgtttgatgatgacggatctgcttacggaatacgcaaagacattcggatacaccttccgtctgcaggactacgatgtgtctagcatcagcgccctcactcagaaactctgtcacgtcgtcaaagtggccgacattgagtctgggcggcagatccagcttatcaatcgaaagtccttgagaagtctcacagcgcaactccttgtgctgttgatgagttgggaagggactacccatctgagtgtcgaagagctgaaaaggcactacgaaagcacacataatactcccttgaacccctgcgaatatggtttcatgactctaacagagctactgaaatctcttccttacttggtagaagtgttcacaaacgacaagatggaagagtgcgttaagctaacctcactgtacctcttcgccaagaacgtgcgaagcctcttgcacacataccattaccaacagatcttcctgcacgagttttcaatggcctacaccaaatacgttggggagacgctgcagcctaagacctacggtcactcgagcgtggaggaactcctgggggccattccgcaggtcgtgtggatcaagggccatgggcataaaagaattgtcgtgctgaaaaacgacatgaagtccaggttgagcagcctgagcctaagcccagcaaatcatgaaaatcagccgagcgagggcgagcggattcttgaggttcccgagtctcatactgcatctgagctcaaattaggcgctgacgggagcggcccatcacacacagagcaggaactccttcgcctcaccgacgactcacccgtcgacctgctatgcgcaccagtgccaagttgcctgcctagcccccagttacggcctgatccagtcattcttcaaagcgccgatctcattcagtttgaagaaagaccacaagagccctctgaaattatgattttgaaccaggaagagaaaatggaaatccctatccccggcaaatcaaaaaccttgacttccgattcctcctcttcatgcatcagcgccgctgtcccggtccccccctgtccaagcagtgagacatcagaatccctgctaagtaaggatcccgtggagtcccccgcaaagaaacaacccaaaaatagagtgaaattggctgcaaacttttcgctagccccaatcactaagctgtag

SEQ ID NO: 27128 - DNA, 774 bp, synthetic construct
  source 1..774: mol_type = other DNA; note = Synthetic coding sequence
atgccccacctgcccctggccagcttccggccccccttctggggcttaaggcactcaaggggtctcccacggttccacagcgtgtctacgcaatcagaacctcacgggagccccatcagcaggagaaacagggaggccaaacagaagcgcttgagagaaaagcaggccacactggaagccgaaattgctggggaaagcaagtcgcctgcagaatctatcaaagcctggcgtcccaaggagcttgtgctgtatgagatacccactaagcctggagagaagaaagatgtcagtgggcctctgcctcccgcatatagcccgaggtacgtggaggccgcctggtacccttggtgggtaagggagggattcttcaaacctgagtatcaggcccgacttcctcaagctaccggcgaaacattcagtatgtgcatccccccaccaaatgtgaccggcagcctccacataggacacgcactcactgtcgcaatccaggatgcccttgtgagatggcacagaatgcggggcgatcaggtgctgtgggtgcccggctcagaccacgctggaatcgccacacaggccgtggtcgagaaacagctgtggaaggaacggggagtcagacgtcacgagttgagcagggaggcgtttttgcgtgaagtttggcagtggaaggaggctaaaggcggcgaaatttgcgaacaactaagagccctgggcgcgtcacttgactgggatcgcgttttctaccacggttgctggctgctgagcgggtgcgattag

SEQ ID NO: 27129 - DNA, 1134 bp, synthetic construct
  source 1..1134: mol_type = other DNA; note = Synthetic coding sequence
atggccaccatccccgactggaagctgcagctgctggcccggcggcgtcaggaagaagccagtgtaagaggtagagagaaagcggaacgtgaaagactgtcacaaatgccagcctggaagcgtgggctcttggaacgcagaagagcaaaactaggcctctccccaggagaaccttcacccgtcctggggactgttgaggcaggtccaccagatcctgacgaaagcgcagtcttgctcgaggccatcggcccggtacaccagaatcgctttatcaggcaggaacgccagcagcagcagcagcaacaacagcgttctgaagaattgctggcagagcgtaagcccgggccactagaggcacgtgagagacgcccctccccgggggagatgcgggatcagtctccgaaggggagagagagcagagaggagaggctgagcccacgcgagacacgcgaaaggcggctcggcatcggaggcgcccaagagctgtctcttaggcccctcgaggcccgggattggagacaaagtccaggcgaggtgggtgaccggtcaagcagattgtccgaggcctggaagtggcggctttctcctggcgaaaccccggagcgatctctcagactggcggaaagtcgggaacagagtcctaggcggaaagaggttgaaagcagattgagcccgggcgagtccgcttatcagaagctgggcttaaccgaggcccataagtggcggccggacagtagagagtcacaggagcaaagcctcgtgcagcttgaggccacagagtggagactgcggagtggcgaggagcgacaggattactcggaggagtgcgggaggaaagaagaatggccggtacccggggttgcccccaaagagaccgccgagctctcggagaccttgacccgagaagctcagggcaattcttccgccggcgtcgaggcagccgagcaacgacccgttgaagacggcgagcgaggcatgaagccgaccgagggctggaagtggactttgatcatgtcgctagccggaaaggggaatcaacacctagtgacatgttttccacatccagtgtcaggcggaagagcaaactgtcctatctcgactctcatacagtctccatggtgcggatggggctag

SEQ ID NO: 27130 - DNA, 495 bp, synthetic construct
  source 1..495: mol_type = other DNA; note = Synthetic coding sequence
atgcggatcctgatcctgggcctggacggcgccggcaagaccaccatactgtacagattgcaggttggcgaggtagttacaacaattccaaccataggatttaacgtcgagaccgtgacctataaaaaccttaagtttcaggtctgggacttaggcggacagacttctataaggccatactggcgatgttactattcgaacactgacgctgtgatttacgtcgtcgactcctgtgaccgggatcgcatcgggatttcaaagtcagagttagtcgctatgctggaggaagaagagctccggaaggctattttggtcgtgttcgctaacaagcaggacatggaacaggcgatgacgtcctccgagatggctaatagtttagggctcccagccctgaaagaccgaaagtggcaaatctttaaaactagcgccactaagggaacgggccttgatgaggcgatggagtggctagtggagaccctcaaatcacgtcaatag

SEQ ID NO: 27131 - DNA, 393 bp, synthetic construct
  source 1..393: mol_type = other DNA; note = Synthetic coding sequence
atggacaccatgatgctgaacgtgcggaacctgttcgagcagctggtgcgacgagtggagatactgtcggagggaaatgaagttcagtttatccagcttgcaaaagatttcgaggacttccgaaagaagtggcaacgcactgatcatgaactgggtaagtataaggatctgttgatgaaggcggaaactgaaagatccgctctagatgtaaagttaaagcacgcacgcaaccaggtggatgtcgagataaaacggcgccagcgggctgaggccgattgcgaaaaactggaacgccaaatccagttgatccgagagatgttgatgtgcgataccagtggctccattcagctgtccgaggaacaaaagagtgcgttagcatttcttaacagatag

SEQ ID NO: 27132 - DNA, 324 bp, synthetic construct
  source 1..324: mol_type = other DNA; note = Synthetic coding sequence
atggacaccatgatgctgaacgtgcggaacctgttcgagcagctggttcgtagagtagagatcttgtccgaaggaaatgaagtacagttcattcagctggctaaagactttgaggattttcgaaagaagtggcagaggactgatcatgagctaggcaagtacaaggatctgctcatgaaagccgagacagagcggagtgcactggacgtaaagctgaagcacgctcggaatcaggtggatgtcgaaattaagcgcaggcagagggctgaagcagactgtgagaagctggagcgccaaatccaactcatcagagagatgctgtag

SEQ ID NO: 27133 - DNA, 885 bp, synthetic construct
  source 1..885: mol_type = other DNA; note = Synthetic coding sequence
atggacaccatgatgctgaacgtgcggaacctgttcgagcagctggtgagacgcgtcgagatcttgagtgaggggaatgaggttcaattcatccagctagctaaagattttgaagattttcgcaagaagtggcaaagaaccgaccatgagctgggtaagtacaaagacctgcttatgaaagctgaaactgagaggtctgctctggacgttaagctgaagcatgctcgcaaccaggttgatgttgaaattaagcggaggcagagggccgaagccgactgcgagaaactggaaaggcagatccaattgatccgggagatgctgatgtgcgacacttcgggaagtatacagctgtctgaggaacagaagtccgccctcgcatttctgaataggggccagcccagttcaagcaacgccggaaacaaaaggctaagcaccatcgacgagtccggaagcatactctctgacattagctttgacaagacagatgaaagtctagattgggatagtagtctggtgaaaaccttcaagctgaagaaaagagagaaacgccggtctacctcgcgacagtttgtggacggcccacctgggcccgtgaagaaaactagatcgattggatcagctgtggatcaggggaacgaatctatcgtggccaagacaaccgtcacagtgccaaatgatggaggaccaatagaggcagtctccaccatcgagaccgttccttactggacacgcagccgtaggaagaccgggactttacaaccctggaacagcgacagcaccctaaacagtagacagctcgagcctagaactgagacagactctgtaggcacacctcagtcgaacggggggatgcgcctgcacgacttcgtgtctaagaccgtctag

SEQ ID NO: 27134 - DNA, 504 bp, synthetic construct
  source 1..504: mol_type = other DNA; note = Synthetic coding sequence
atggaggagacctacaccgacagcctggaccccgagaagctgctgcagtgtccctacgacaaaaatcaccaaatcagggcttgccgctttccttatcaccttattaagtgcagaaagaatcatcctgacgtcgcaagcaaactggccacttgtccgtttaatgccagacaccaggtgccacgcgctgagatctcccaccatatttctagctgcgatgaccgctcttgcatcgagcaggatgtagttaatcaaacaagaagcttaagacaggaaacccttgccgaatctacatggcagtgtcccccctgtgacgaggactgggataaggatctctgggagcagacttcaacccctttcgtctgggggactacacattacagcgacaacaatagccccgctagtaacatcgtcacagagcataaaaacaacctggcttctggaatgcgggtgcccaagagcctgccctatgtcttgccatggaagaacaatgggaatgcccaatag

SEQ ID NO: 27135 - DNA, 882 bp, synthetic construct
  source 1..882: mol_type = other DNA; note = Synthetic coding sequence
atgctgcgggagccccggaagcagggcctggccggccgggcccacctgctctccccaggcacaacaggctccatgaaaacccccgtagagcttgcggtgtctggtatgcagaccttggggctgcagcaccggtgcagggggggctatcgcgtcaaagcccgtacatcgtatgtggatgagacattatttgggtctcctgctgggaccaggcccaccccgcccgatttcgacccgccatgggttgagaaagccaatagaacaagaggagtgggtaaggaggcctcaaaggctctgggggctaagggatcctgtgaaactactccctccaggggctctactcccacgcttacgcccagaaaaaagaataaatacaggcccatttcacacaccccaagttattgtgacgagtccttatttggatctaggagcgagggtgcctcgtttggggcccccagaatggctaagggtgacgctgctaagcttagggccttactctggacacccccccccactcctcgcggcagtcatagtccaaggccgcgggaggcgccattgcgggcaattcaccccgcggggccaagcaaaacggaaccagggcctgctgctgactcccagaaactgagcatgggcgggttgcactctagcaggccactaaagcgcgggctttctcactcgctcactcacctgaatgtaccaagtactggccaccccgcaactagtgcacctcacactaacggtccgcaggatctccgaccgtcaacttccggggtcacttttcggtcgcctttagtcacctccagagcccggagcgtgagtataagcgtaccttctactccacggagaggcggcgctactcagaaaccaaaacctccatggaagtag

SEQ ID NO: 27136 - DNA, 3282 bp, synthetic construct
  source 1..3282: mol_type = other DNA; note = Synthetic coding sequence
atgggcggcaaggcctggccccggcgggccgtgggcaccgccggcggtccttgcgccgagcagatttcagcgcccttccaaaccctcctgatgccccatctgccattagcgtccttccgacctcctttctggggactgaggcactctaggggactgccaagatttcattctgtatcgacacagtctgagcctcacggtagtccaattagcagacggaaccgtgaagccaaacagaaaaggcttcgcgagaaacaggccaccctggaggcagaaatcgctggagagagcaagagcccagccgaatccatcaaagcctggcgaccaaaagaacttgtactctacgagataccaacaaagcccggggaaaaaaaggatgtctctggacccctacccccagcttattcaccacgctacgtcgaagctgcatggtacccttggtgggttcgtgaaggattcttcaagccagagtaccaagcccgtctgccacaggccaccggcgagaccttttcgatgtgcatccctccgcccaacgtgaccggatcattgcatatcggtcacgccctgactgtggctattcaggacgctcttgttcggtggcaccggatgagaggggatcaggtcctgtgggttccaggttcagatcacgcaggaatcgccacccaagccgtggttgagaagcagctgtggaaggaaagaggagtcaggcggcacgagttgagcagagaggcttttttgcgggaggtatggcagtggaaagaagcgaagggcggcgagatttgcgaacagctgcgagctctgggtgcttccttggattgggacagagagtgcttcacaatggatgtgggatccagcgtggcagtgacagaggcttttgtcagactgtacaaggcagggttactgtatcgcaaccatcagctggttaactggtcttgtgcccttagaagtgccattagcgatattgaagtggaaaaccgtcccctgcctggccacactcagctacgactccctggctgtccaacgccagtgtcattcggactcctgtttagcgtcgcctttcccgttgatggcgagcccgacgcagaggtcgtggtgggtacaacccgccccgagaccttaccaggtgacgtcgcagtcgcggtgcaccctgacgactcgcggtacactcacctacatggccgacagctcaggcaccccctcatgggacaaccgcttcccctgatcaccgattacgcggtgcagcctcacgtcggtacaggcgcagtcaaggttacgccagctcattctcctgccgacgcagagatgggggccaggcatggtctatcaccgctaaacgtgattgcagaggacggcacaatgaccagcttatgcggcgactggttacaggggcttcatagattcgttgcacgggagaagataatgtccgtgctctccgagaggggtttgttcagagggctgcagaatcacccaatggtgttacccatatgtagcaggtctggagacgtaatcgaatacctgcttaaaaaccagtggttcgtccgttgccaggagatgggcgcccgagccgcgaaggcggtagagtccggagccttggagctttcccctagcttccaccagaagaactggcagcactggttcagccatatcggggactggtgcgtgtcccgccagctctggtggggccatcagatccccgcctacctggtagtcgaggaccacgcccagggggaggaggattgttgggttgtcggtcgttcagaggccgaagcgagggaagtcgctgcagagctgactggtagacccggcgccgaacttactctggaacgagacccagatgtgttagatacatggtttagtagcgccctgtttccgtttagtgcacttggttggccccaagaaacgccggatctggcccggttctaccctttgagtctgctcgagaccggaagtgatctgctgctgttctgggttgggagaatggttatgctcggcactcagcttaccggccagctgccattttctaaagtgctcttgcatcccatggtgagagaccgccagggcagaaagatgagcaagtccctgggtaatgtgctcgaccctagggatatcatcagtggggtcgaaatgcagcttctccaagagaagttgaggtccggaaatctggaccccgcggaactggcaatagtcgcggccgcgcagaaaaaggatttcccacacgggatccctgagtgtgggacagacgccctgaggtttaccctatgcagtcatggagtgcaggctggtgatctccacctttctgtatcggaggttcagagctgtaggcacttttgcaataagatctggaacgctttacgttttattttaaatgcgctaggcgaaaagtttgttccacagcctgccgaggagctgtctcccagctctccgatggacgcttggatcctcagccgccttgccttggcggcccaagagtgcgaacgtggcttcttgacacgggaattgagccttgtcacacacgccctgcaccatttctggttacacaacctctgcgatgtgtacttggaagccgtcaagccagtcctgtggcactcaccacgaccgcttggacctcctcaggttctcttcagctgcgcagatctcggtcttagactccttgcgcctctgatgccttttctggctgaagagctttggcagagattgcctccacgtccaggatgcccacccgcacccagcatttcagtagccccctacccatcggcctgttctctcgaacactggcgtcagccggaactggagaggcggttctcaagagtccaggaagtggttcaggtgctgcgggctctcagagccacctatcagttgaccaaagctcggcccagagttctgttacagagtagcgagcccggggatcagggcctgttcgaggcctttttggaaccacttgggacacttggatactgcggcgctgtggggttgctacctcctgggaccgccgccccctccggctgggcccaagctccactgtccgatacagcgcaggtctatatggagttacaaggcttggtggatccacagatccagcttcccctgctcgctgcaagacggtacaaactccagaaacagttggacagtctgacagctcggactcccagcgagggggaagcaggaacccagaggcagcaaaagctgtctagcctacaactcgagctctccaaactggataaggctgcgtctcatctgcgccagctcatggatgagcctccagctcctggctcccccgagttatag

SEQ ID NO: 27137 - DNA, 276 bp, synthetic construct
  source 1..276: mol_type = other DNA; note = Synthetic coding sequence
atgggcaagaagaccaagcggaccgccgacagcagcagcagcgaggatgaggaagagtacgtggttgaaaaagtactggataggagagtggtcaaggggcaagtggagtatctcctcaagtggaaggggttctccgaagagcacaacacctgggaacccgagaagaacttggattgtccagaactgatttccgaatttatgaagaaatataaaaagatgaaggaaggcgagaacaataagccacgggagaagtctgaaagcaataaacggaagtag

SEQ ID NO: 27138 - DNA, 390 bp, synthetic construct
  source 1..390: mol_type = other DNA; note = Synthetic coding sequence
atggccgagctgatccagaagaagctgcagggcgaggtggagaagtatcagcaattacaaaaagatctttcaaaatcaatgtctggccggcagaagctcgaggcacagctcaccgaaaataatattgtcaaggaggagctggcactattagatgggtcaaacgtggttttcaagctgctggggcccgtgttggtgaaacaggagctaggtgaggcaagagctacagtcggcaagcggctggattacatcactgctgaaataaagcgctatgaatctcaactgagagacctggaacgacagagtgagcaacagcgcgagacactggcacagctccagcaagagtttcagcgtgcccaggccgcaaaggccggcgctcccggtaaggcttag

SEQ ID NO: 27139 - DNA, 1134 bp, synthetic construct
  source 1..1134: mol_type = other DNA; note = Synthetic coding sequence
atggccaccatccccgactggaagctgcagctgctggcccggcggagacaggaggaggcctcggtgcgggggcgagagaaggccgagcgcgagagactttcacagatgcccgcttggaagcgaggacttcttgagagacgacgggcaaagctgggtctgagtcctggtgagccaagtccagtattggggacagtcgaggcggggccgcccgaccccgatgagtccgcagttctgttagaggcaatcggacccgtgcaccaaaatagatttattaggcaggagcgccaacagcagcagcaacaacaacagagaagcgaggaactgcttgctgagcgaaaacccggaccactggaggcacgcgaaagaagaccatctccaggggagatgcgtgaccaaagccctaaggggcgagagagtagggaggaaagactgtctccgcgtgagacccgcgagcgtcgactggggatcgggggagctcaggaactgtcactaaggccactcgaagccagagactggaggcagtcacccggtgaggtcggcgatcgctctagccgtctgtctgaggcatggaaatggaggctgtcgcctggtgagacacctgaacggtcgctgcggttggctgagtcccgcgagcagtctcctaggcgaaaagaagtagagtcacgactgtcacccggcgagtcagcctatcagaagctgggcctgaccgaggcacacaagtggcgacccgatagtcgagaatcccaggaacaatcactcgtgcaactcgaagcgactgagtggaggctgaggagcggtgaggagaggcaggactacagcgaagaatgcggccggaaggaagagtggccagtcccgggagtggcccccaaggagaccgccgagctatctgagacactgactagagaagcccagggcaattcctccgccggagtggaggccgcggaacagcgacccgtggaagacggagagagaggaatgaagcccactgagggttggaaatggactttgataatgagcttggccggaaaggggaaccagcatcttgtgacatgcttcccgcaccctgtgtcaggggggagagcaaattgcccaatcagcacgctcatccaaagcccatggtgcgggtggggctag

SEQ ID NO: 27140 - DNA, 2031 bp, synthetic construct
  source 1..2031: mol_type = other DNA; note = Synthetic coding sequence
atgagcgaccagatcaagttcatcatggacagcctgaacaaggagccgttccgtaagaattacaacctcataactttcgacagcctggaacccatgcagttgttacaggtccttagtgacgtgcttgctgagatcgacccaaaacaactagttgacattagggaggagatgcccgagcagaccgcgaagcgcatgctgagtttactgggtatactaaagtataaaccaagcggaaacgcaaccgacatgagtacctttagacaagggctggtgattggttctaaaccagtgatctatccagttctgcactggctcctgcaacggaccaatgagcttaagaaaagggcctacctcgctaggttcctaattaagctggaagtgccctcagaatttcttcaagacgagaccgtggccgatactaataaacagtacgaagagttaatggaagccttcaaaacactgcacaaggagtacgagcagcttaaaatttccgggttttccacagcagaaattagaaaggatatcagtgcaatggaagaggagaaagatcagttgattaaaagagtggagcatctgaaaaagagagtggagaccgctcagaaccatcagtggatgctaaaaatcgcgcggcagctgagagtggagaaagagagggaagaatatctggcacagcagaaacaagagcagaagaatcagctgttccatgctgtgcagcgattgcagcgggttcaaaatcagctaaaatccatgaggcaagccgccgctgatgctaagccggagtctctgatgaagagactagaggaggaaatcaaattcaatctctatatggttacagaaaaattcccaaaggagctggagaataagaagaaggagctccactttctgcagaaagttgtctctgagccggccatgggacacagcgacctactggaactcgagtctaagataaatgagatcaacacagagattaaccagctcatcgagaaaaagatgatgagaaacgagccgattgagggcaaacttagcttgtatcgacagcaggcatcaattatatcacgcaagaaggaagcgaaagccgaagagctgcaggaggcaaaagagaaacttgcgagcctcgagcgggaagcctctgttaaacgcaatcagactcgcgagttcgacggtacagaggtactcaagggagacgagttcaagcgttatgtcaacaagttgcggtctaagagcacagtgtttaaaaagaaacatcagattattgctgagctcaaagccgagtttgggctgctgcagcgcactgaagaactgctgaagcagcgccatgaaaatattcaacagcagcttcagactatggaggaaaaaaaaggcatctcagggtacagctacacacaagaagagttagaacgggtgagcgcactcaaaagcgaggtcgatgaaatgaagggacgaacccttgacgacatgtctgaaatggtcaagaaactgtactctctggtctcagaaaaaaagtcagccctggcgtctgtgatcaaggagctcagacagctgaggcagaaataccaggaactgactcaggaatgtgacgagaagaagagccagtacgatagctgcgcagctggtctggaatctaatcggtccaaactcgagcaggaagttcgccggctgcgcgaggaatgcctacaggaagagtcccgttatcactacacgaattgtatgattaagaacttggaggttcagttgagacgggccacggatgagatgaaggcatatatctcgagcgaccagcaagaaaaaagaaaggctattagggagcagtatactaagaataccgcggagcaggagaatctcggaaagaaactgagagaaaaacagaaagttataagggaatctcatggccccaatatgaaacaagcgaagatgtggagagaccttgagcagctgatggaatgcaagaagcagtgttttctcaaacagcagagccaaacttccatcgggcaggtgatccaagaaggcggagaggatagactgatcctgtag

SEQ ID NO: 27141 - DNA, 456 bp, synthetic construct
  source 1..456: mol_type = other DNA; note = Synthetic coding sequence
atggacaccatgatgctgaacgtgcggaacctgttcgagcagctggtgcggcgagtagagattctgtccgagggaaacgaggtgcagttcatccagctggccaaggattttgaggatttcagaaagaaatggcaaaggaccgatcatgagttaggcaaatataaggacctgctcatgaaagctgagactgagcgcagcgcattggatgttaaactgaaacacgccagaaaccaggtcgacgttgagatcaaaagaagacagcgcgctgaagccgactgcgagaagcttgagaggcagattcaactgatccgcgaaatgctgatgtgcgacacttcgggctcaatccagctgagcgaagaacagaaaagcgcacttgcctttctcaacaggggtcagccttcaagcagcaatgccggaaacaagaggttgtcaactatcgacgaaagcgggtcctag

SEQ ID NO: 27142 - DNA, 1446 bp, synthetic construct
  source 1..1446: mol_type = other DNA; note = Synthetic coding sequence
atggccagcgccgccagcgtgaccagcctggccgacgaggtgaactgtcctatttgccagggtacattacgtgaaccagtcactattgactgtggacacaacttctgccgcgcctgtctcacacgatattgtgaaatccctgggccagacttggaggagagccccacatgtcctttatgcaaagaacccttcaggccgggctctttccgcccgaactggcagttggccaacgtggttgagaatatagaaaggctgcagttggtatccaccttagggctaggcgaggaggacgtatgccaagagcatggggaaaaaatatatttcttttgcgaagatgacgaaatgcaattatgcgtggtctgtcgggaagccggagaacatgctactcacacaatgcggtttcttgaggacgccgccgccccttatcgggaacaaattcacaagtgtctgaagtgcctacgcaaggaaagagaggaaattcaggaaatacagtcacgggagaacaaaaggatgcaggtgcttttaacacaggtgagcactaagcggcaacaggtgatcagcgaattcgctcatctcaggaaatttctcgaagagcagcagagcattctgctggcccaactcgaatcacaggacggtgatatacttagacagcgcgacgagtttgatctccttgtagcaggagaaatatgcagattttccgcactgatcgaagaactggaagagaaaaatgagaggccagctcgtgagctcctgaccgacattcgtagtaccctcatccgctgcgagaccagaaagtgtagaaagcccgtcgccgtcagcccagaactggggcagaggatccgagacttcccccagcaggccctgccattgcagagggagatgaaaatgtttctcgagaacctccctaatcatctggtaattccaacggctcatatctccttagatccccagacttcccaccccaaactcctgctctccgaggaccaccagcgggcgcagttctcctacaaatggcagaacagtccagataatcctcagcggttcgatagggctacttgcgtcttggcccataccggaatcacaggcgggcgccacacctgggtcgtctctattgatttagcccacggcggttcctgcacagtgggtgtggtgtcggaagacgtgcagagaaagggagaactgcggctgcgacccgaggagggggtctgggctgtgcgcttggcatggggtttcgtcagtgccctcggaagttttcctactagactgactctgaaagaacagccccgccaggtccgcgtgtctcttgactacgaggttggctgggtaacctttacgaacgcggtcacaagggagcccatatatacctttaccgcatcctttaccaggaaggtcatacccttcttcggcctgtgggggcgaggaagctccttctcactcagctcttag

SEQ ID NO: 27143 - DNA, 765 bp, synthetic construct
  source 1..765: mol_type = other DNA; note = Synthetic coding sequence
atggtgcgggaggccaacatcaagcaggccaccgccgagaagcagttgaaagaggctcagggcaaaatagacgtcctgcaagcagaggtagccgccctgaagacgctggtgctctctagctctccaacttcccctactcaggagccgctgcccggaggcaaaacacccttcaaaaagggacacacaagaaataagtccaccagcagtgcgatgtccggatctcaccaggatttatccgtgattcaacccatcgtcaaagattgcaaggaggctgacctgtcactttataatgaattccgcctttggaaggatgagcctacaatggaccgaacatgtccctttctagacaagatctaccaagaggacatcttcccatgcctgacattttctaaatccgaactcgccagcgctgtgctcgaggccgttgagaataacacattgtccatagagccagtcggtttgcagcccattagattcgtgaaggcttccgccgtggaatgtggcggtccaaagaagtgcgccctaaccgggcagtcaaaaagctgcaaacatcgcatcaaattgggtgattcgtccaactattattatatatcccctttttgcaggtaccgcatcacctcagtctgcaacttcttcacgtacatccgctatattcagcaaggcctggtgaagcagcaagatgtggaccagatgttttgggaagtcatgcagctgaggaaagagatgtccttggccaaacttggatactttaaggaagagttgtag

SEQ ID NO: 27144 - DNA, 1446 bp, synthetic construct
  source 1..1446: mol_type = other DNA; note = Synthetic coding sequence
atggccagcgccgccagcgtgaccagcctggccgacgaggtgaactgtcccatttgtcagggaaccctcagggagccagtgacgatcgactgtggtcacaacttttgtcgcgcctgcctgaccagatactgtgagatccctggacccgacctggaagaaagccccacgtgcccactgtgcaaagaaccttttcgccctgggtctttccggcctaattggcaactggccaatgtggtcgagaacatcgagagattacagctggtctctacccttggactgggggaggaggatgtgtgtcaggaacacggagagaaaatctatttcttctgtgaagacgacgagatgcaattatgcgtcgtctgccgcgaagccggagaacacgccacacacacaatgaggttcctggaggacgccgcggccccatatagggaacagatccataagtgtcttaaatgtctcagaaaggagcgggaggaaatacaggagatccagtcaagggaaaacaagcggatgcaggtcctccttacccaagtttctaccaaaaggcaacaagtgatctcagagtttgcccacttaagaaagttcctggaggagcagcaatccatccttcttgcccagctggagagtcaggatggggacattctgcggcagcgtgatgagtttgacttactggtcgccggcgagatctgtcggttctccgcgctgatcgaggagctcgaagagaagaatgaacgccccgcgagagaactgctaacggacatccggagcaccttaatccgctgcgagactagaaaatgccgaaagcctgtggctgtgagtcccgaacttggccaaagaataagagatttccctcaacaggctctccccctgcagcgcgagatgaaaatgtttctggaaaacctgcccaaccacctggtcatccctactgcccacataagcctggaccctcagacatctcatccaaagctgctgctgagcgaggaccaccagcgagcgcagttcagttacaagtggcaaaacagccccgacaatccacaacgttttgaccgagcgacgtgcgttcttgcgcacaccgggatcacagggggaaggcatacttgggttgtcagcatagatttggcccacggagggagctgcaccgtcggggttgtatctgaagacgtacagagaaagggtgaactgcgcctgaggcccgaggagggcgtttgggctgtcaggttggcctggggcttcgtctccgcccttggctcattcccaacgcgcctgacacttaaggagcagcctcggcaggtcagggtatccttggactatgaggtcggatgggtaacgttcaccaatgccgtgacgcgggagcctatctacacgttcaccgcgtccttcacgagaaaggttattccattcttcgggctgtggggccgcgggagctccttctcactcagttcatag

SEQ ID NO: 27145 - DNA, 1974 bp, synthetic construct
  source 1..1974: mol_type = other DNA; note = Synthetic coding sequence
atgctgggccccagctgggacggcgacgaggccgagagcaccggcgagatcatcaggctcggagatactgctcacactttctccctccggagcaatggcgctcagtgccctaatgagatgctgagtaagaaggctctggcgagccccagtagcaaaagtcacgaggacatgctttaccccccctctgtcttgagcaagagtcggacgagctttgttgaggatactgaaaccctctctgtcagtgggatccccaacgcccggaaattgggagaacctataagagccgctatccccctccatcctccgtaccaccctagcgaacctagagccccatgtcctataggtaaggaatacctccatagttcccattgttctcccgccgtcaattctacaggcgagcataccgagttttcaggcgatctggatgatggccttttcctcatctctaagcttcccaagggttcgaaatgggaagtgtatcctgcccaggtgcaaggcccaaggaccaggaagcctccaaagggcaagcgcaacgaaaatcgcgctacggctagttcctgtaactcaccttttcctcagaggccaagaaagaggttaaccgaacaggagctgcatgacgtgagcgagaagctatcacagcgcctctccgagctggattggatgctcaagtccgctctgggcgaccgtatcaaggaaaagaccgatcacaaagaggaaaacactggaaacgaggaagtggaagacggtaccgaggagacgctgtctcagcacagcgatggaatagtggagtatgggcctaaaaagagccggcctggcttgtctatgaggagaaaaccgccttaccgatctcactccttgtctccttctccagttaataagcataaacagttccatctggagaggaagcgccagaggaaaccgagggagaccgatgtccggcagtttcaagctcaggcctttacagaagccttcgagcgcgagctgaggagacataaggtgcaggaaaacatcggaccacttcggatacatgagaaggaagaggaaacagagaaaatataccgtggcgaagctgtcaggaagggaacaccagagtgttctcaaccctggaagatctatagcaggaagacaaccacccagtctctaagaggagggttaccgaaaccaaacaaagcagtgcccatgaaagtttcggagcactcactactgccactcatgctggagcagttcccgtttttgtacgtttcagggccaacccttagcaagatgtggaagcagcaaattgcacaagtagagcagcttaaaaaggaggcctgcagggaaaaccgtagcaaaaagaagcttcaggacgaaatcgaggaagccctgcgcaggcatgatcttcttactacgctggtgaaaaaggagtatgaacataacaagcgcttgcaggattttaaggactgcatcagaaggcagcgtctgactcaatcaaagatcaaggaaaatagacagcaaatcgtacgggcccgaaagtactacgacgactacagagtccagctttgtgcgaaaatgatgcgaatgcgcactcgggaggaaatgatctttaaaaagctttttgaagaggggctgaacatccaaaaacagcggctgcgcgacctgcggaactatgccaaagaaaagcgagacgagcagcggaggcgccaccaggacgagttggattctatggagaactattacaaggaccagtttagcttgctggccgaggcaatctcccaggagcaccaggagttgaaggcgagggaaaaatctcaggcgcagactctccataaagtcaagcgtgaactccgatcgaaaatggagaaggagatccagcagctacaggacatgatcacccagaatgacgatgacgtgttcttcagggagttggaggctgaacggtttcggagccgactgcaactggcctcgtttcaatacagcaagtccccatctctctag

SEQ ID NO: 27146 - DNA, 507 bp, synthetic construct
  source 1..507: mol_type = other DNA; note = Synthetic coding sequence
atgcagaccttcctgaagggcaagcgggtgggctactggctgagcgaaaaaaagatcaagaagctgaacttccaggctttcgcggaattgtgtaggaagcgtggcatggaagttgtccagctgaatctcagcaggccaatcgaagaacaggggcccttggacgttatcatccacaagctgaccgacgtgatactggaagctgaccaaaacgatagccagagcctcgagttggtccacaggtttcaagaatacattgacgcccaccccgagacaatcgtcctcgatcccttgccggccatccgcactttgcttgaccgctcaaagtcctacgagttgattcggaaaatagaagcgtacatggaagacgatcgaatctgctccccaccttttatggagctgacctctttatgcggcgatgacaccatgcgcctcttggaaaagaacggtttaacattcccatttatatgcaagacaagggtcgcacacggcacaaattcccacgagtag

SEQ ID NO: 27147 - DNA, 2211 bp, synthetic construct
  source 1..2211: mol_type = other DNA; note = Synthetic coding sequence
atgctgatccccgccctgcagatcagcgacagcgagagcgtgggcctcgaagatggtatagaacaaagcgcatatctcacagaatctaagatgaacgagtccaagccgggtgactcccagaatctcgcatgcgttttctgccggaaacacgacgactgcccaaataaatatggcgagaagaagaccaaagagaagtggaacttaaccgttcattattattgcctcctaatgtcatccggcatctggcagaggggcaaggaagaggaaggtgtgtacggtttcctcatcgaggacatcagaaaggaagtgaaccgtgcttcgaagctgaaatgttgtgtgtgtaagaaaaatggtgcttccatagggtgcgtcgcccctaggtgcaagaggagttatcatttcccttgcggtctccagcgggaatgcatcttccaatttaccggaaacttcgcgtcattctgctgggaccataggcccgtacagataattacaagcaacaactaccgcgaatcactaccttgtaccatctgtttggaatttattgaaccgatcccatcatataatatccttcgcagcccgtgctgcaagaatgcttggtttcaccgcgattgtctccaggtgcaggctattaatgccggcgtgttcttctttcgctgcactatatgtaataacagtgatatcttccagaaggagatgctgcgtatgggcatccatatcccagaaaaggacgcttcctgggagctggaagaaaacgcataccaggagctgctacaacattacgaaaggtgcgatgttcgcaggtgccggtgtaaagagggaagagattacaacgcgcctgactctaaatgggaaattaaacgctgccaatgctgtggatcaagtggaacgcatctggcctgcagctccctgaggagttgggagcaaaattgggagtgcctggaatgtcgaggcatcatctataactctggggaatttcagaaggcgaagaagcatgtgttgcccaacagcaataacgtgggcattacagactgcctcctcgaggaatcatccccaaagctgccccggcagagccctggttcccagtcaaaagacctcctgaggcagggctcgaaatttcgacgcaacgtttctaccttactcatcgaattgggcttccagatcaaaaagaaaactaagcgactgtacattaacaaggctaatatttggaattcagcgttagacgctttccgcaaccggaacttcaaccccagctacgccatcgaagtagcctacgtcattgaaaacgataatttcggctcggaacaccccggctccaagcaggagttcctgtccctgttgatgcagcatctcgagaactcatcactgtttgaaggatctcttagcaaaaatctctctctgaactctcaggccctgaaagagaacttatactacgaggcgggcaagatgctggcgatttcgctggtccatggaggcccttccccaggtttcttcagtaagactttgttcaactgcttggtctacggacccgaaaatacacaaccaatattggatgatgtcagtgattttgacgttgcgcagattataattaggatcaacaccgcgactacagtggccgatctgaaatcaatcataaatgagtgttataactacctggagctgatcggctgcttgcggttgatcacgaccctgtctgacaagtacatgctggtgaaggatattctgggctatcacgtgattcaaagggttcacacgccctttgagtcgttcaaacaggggttgaaaaccctaggagtgctggagaagatccaggcttaccctgaggccttttgttccatcctgtgccacaagcccgagtcactgagtgccaaaatcctgagcgagctctttacagtgcacactctaccggacgttaaagctctcgggttttggaatagttacctgcaagcggtagaggacggcaagtcgaccaccactatggaagatattctgattttcgccaccggctgctctagtattccacctgctggcttcaaacctacgccgtccatagaatgcctccatgtggactttcccgttggaaacaagtgtaacaattgccttgcaattcctatcacaaatacctacaaggaatttcaggagaatatggacttcaccatcagaaacactctgaggctagagaaagaagagtccagccactacattggccattag

SEQ ID NO: 27148 - DNA, 1131 bp, synthetic construct
  source 1..1131: mol_type = other DNA; note = Synthetic coding sequence
atggccaacagcgccaacaccaacaccgtgcccaagctgtaccggtccgttatcgaagacgtcatcaatgatgtgcgcgatatctttctcgacgacggagtggatgagcaagttttgatggagttaaagacactgtgggagaataagctcatgcagtcccgcgcggtcgacggcttccatagtgaggaacagcagcttctgttgcaggtgcagcagcagcatcagccccagcagcagcagcaccaccaccatcatcaccaccagcaagcacaaccacaacagaccgttcctcaacaggcgcagacccagcaagtactcatccccgccagccagcaggccaccgccccccaggtgattgtgcctgactctaagctcattcagcacatgaatgcctcgaacatgagcgccgctgctacggccgccacactggctctgccagcgggggtgacgccggtgcaacaaattctcacaaattctgggcagctgctccaggtcgtcagagccgccaatggtgcccagtacatctttcagccccaacagtctgtggtgctgcaacagcaggtgattccccaaatgcagcctggaggagtgcaagccccggttatacagcaggtactggctccacttcccggggggataagcccccagacaggggtgattatacaaccacaacaaatcctgttcacagggaacaagacacaagtgatcccaaccacggtggcagctcccactcccgcccaggcccaaatcacggctaccggccagcagcagccgcaggcccagcctgcccagacacaggcccccctggtgctgcaggtcgatggtactggcgatacgtcatcagaggaggatgaggacgaagaagaggactacgatgatgacgaggaggaggataaggaaaaggacggagcagaggacgggcaagtagaggaagagcccctcaactccgaggacgatgtgtccgacgaggaagggcaagaactctttgatacagagaatgtggtggtatgtcagtatgataagattcacaggagtaagaacaagtggaagtttcacctcaaggacggcatcatgaatctaaatggccgcgattacatcttctccaaggctatcggggacgccgagtggtag

SEQ ID NO: 27149 - DNA, 237 bp, synthetic construct
  source 1..237: mol_type = other DNA; note = Synthetic coding sequence
atggagaccgactgcaaccccatggagctgagcagcatgagcggctttgaagaaggaagcgaactgaatggctttgaaggaacagacatgaaggacatgcgtttggaagctgaggcggttgttaatgatgtgctgtttgctgttaataacatgttcgtttcaaagagtcttaggtgcgccgacgatgtcgcatatattaacgtggaaaccaaggagagaaataggtactgcttatag

SEQ ID NO: 27150 - DNA, 747 bp, synthetic construct
  source 1..747: mol_type = other DNA; note = Synthetic coding sequence
atggccttcagcggccgggcccggccctgcatcatccccgagaacgaggagattcccagggctgcactgaataccgtgcacgaagccaacggtacagaggatgaacgggcggtgtcgaaactgcaaaggaggcactctgatgtgaaggtgtacaaagagttttgcgacttttacgccaagtttaatatggcaaacgcattggcctccgccacctgtgagcgttgcaaagggggctttgcccccgccgaaacaattgtgaactccaatggcgaactgtatcacgagcagtgctttgtctgtgctcaatgtttccaacagttcccagaaggccttttttatgagtttgaggggcggaagtattgcgagcacgatttccagatgctttttgcaccatgttgccaccagtgtggcgaattcattatcggaagggtgatcaaggcgatgaacaactcatggcaccctgagtgcttccggtgcgacctttgccaggaagtgctcgccgacatcggcttcgttaaaaatgccgggaggcatctgtgtcgaccatgtcataaccgggagaaagctcgcggtctagggaagtacatttgtcaaaaatgtcatgctataattgacgagcagcctctcatcttcaagaacgatccttaccacccagatcactttaactgcgcaaattgcggccaggaaggaagcgactgtaggtgcactggagccgaacgcggagccatactgcctgccatgccgtag

SEQ ID NO: 27151 - DNA, 2370 bp, synthetic construct
  source 1..2370: mol_type = other DNA; note = Synthetic coding sequence
atgagcgcccagaccagccccgccgagaagggcctgaaccccggcttaatgtgtcaggaatcgtacgcctgtagcggcacagatgaggcaatcttcgagtgcgacgaatgctgctctttacaatgtctcagatgtgaagaggagctgcatcggcaggaaagactgcggaatcacgagcgcattcgactgaagcctgggcatgtcccatactgtgatctgtgcaagggattaagcggacacctgccaggggtgaggcagagagctatagtccgctgccagacgtgcaagattaatctttgcctggagtgtcagaagcggacacattcaggagggaacaaaagaaggcatcccgtgaccgtgtataatgtgagcaaccttcaggagagtctggaagccgaagaaatggatgaagaaaccaagcgcaaaaaaatgacagaaaaagtggtgtcttttctgttagtggatgaaaacgaagaaatccaggtgactaatgaggaagatttcatcaggaagctggactgtaaaccagaccagcacctgaaggttgtgtcgatctttggcaatacaggagacggcaaatcgcacactctgaatcacacgttcttctacggcagagaggtgttcaagacttctcccacccaggagtcttgtactgttggcgtgtgggccgcttacgaccccgttcataaagttgcagtcatagacaccgagggactgctgggcgcaactgtcaatctgagtcagcggacacggctgcttctgaaagtccttgccattagcgatctggttatctatcggacacatgctgacagactgcataatgatctgtttaagtttctgggggacgcatcagaggcctacctgaagcatttcactaaggaactgaaagccactacagctcgatgcggcttagatgtgccactttctactcttggacccgcggtcattattttccatgagaccgtgcatacacagctactcgggtccgatcacccatctgaggtgcctgaaaagctcatccaggaccgcttccggaaattaggccggttccctgaggctttctcatcaatccattacaaagggacaagaacttacaatccccccaccgatttctccgggctgaggcgagcgctcgagcagcttctcgagaataatacaactagaagcccgaggcaccctggagtgatattcaaggcgctcaaggccctgtccgaccgctttagtggggaaatcccagacgatcagatggctcactcctctttttttccagacgagtacttcacatgcagttctctgtgtctcagttgtggcgtgggttgcaaaaagagcatgaaccatggaaaggagggtgttcctcacgaggccaagtctagatgccgttattcccatcagtacgacaaccgagtctatacctgcaaagcttgctacgagcggggggaagaggtgtctgtcgtcccaaaaactagcgcctcgacagattcaccgtggatgggtctcgctaaatatgcatggtccggatatgtaattgaatgtcccaactgtggcgtggtctatcgatccaggcagtattggtttggaaatcaagaccccgtggatactgtggtgcgtaccgagattgtccacgtatggccgggaacagacggctttctgaaagataacaacaacgccgcgcaacgcctgcttgatgggatgaacttcatggctcagagcgtgtctgaattgtccctcgggcctacgaaggctgtgacctcgtggttgaccgaccagattgcgcctgcctactggagacccaactctcagatcctgagttgcaacaaatgtgcgacctccttcaaagacaatgatacaaaacatcactgccgtgcatgcggcgagggcttttgcgactcctgcagctccaagacgaggccagtcccagagagaggttggggaccagcacctgttcgcgtttgcgacaactgttacgaagctcgaaacgtacagctggccgtcaccgaagctcaagtggacgacgagggcggcactctaatagcacgcaaagttggcgaggctgtgcagaataccctcggagctgttgtgacggccatagacatccctctggggctcgtcaaagacgcggccaggccagcctactgggtccctgatcacgaaatcctccattgtcacaactgccgcaaagagttctctataaaactcagcaaacaccattgcagagcatgtggccagggtttctgtgacgaatgttctcatgacaggagggcagtgccctcgcgtggatgggaccatcccgttagagtgtgttttaactgtaacaagaagcccgcctggactagcctctccgtcatgacaggcaagggtccactgtgttag

SEQ ID NO: 27152 - DNA, 2271 bp, synthetic construct
  source 1..2271: mol_type = other DNA; note = Synthetic coding sequence
ctggccggcaacgagaccgagtgggtgaccatcgccaacaacctgctgttcaaatgccacatacacctgcgcatacacgagctacaggactgtgatgccaatgttttcattgccctgtaccagagtatcctgggcgaaaaggtcccagatctaatagtgattccacgcagtcaggaggacgacgcgcataatgtccaggccgtgattgacagcctcgctttggactatcttcaggtgtctctttcccatatcaccgcgctctactctgtgtcacggagaaagtacagtgagaggagaatgctcgggccttcctgggacggtgatgaggccgagtcaactggcgaaatcattcgtctcggagacaccgcccatactttcagcctgaggtccaatggagctcagtgccctaacgagatgctgagcaagaaggccctggcatcgcccagcagcaagtcacatgaggacatgctctaccccccatctgtcttatctaagagccgtacatcctttgtcgaggacaccgagaccttgtcagtttctggaattcccaatgctaggaagttgggggaacccattcgggccgctatccctttacatccgccctaccacccttcagaacctcgcgctccctgtccaatcggcaaggagtacctgcacagtagccactgctcccccgccgtgaatagcaccggggaacataccgagttctctggtgacctagacgacggattgtttctcatctctaaactgccaaaaggatctaagtgggaagtctatccggcacaagtgcagggcccacgaaccagaaagcctcctaaaggtaagaggaacgaaaacagagctaccgccagtagctgtaattctccatttccccagaggcctcgcaaaaggctaacggaacaggaactacatgatgtttctgagaaactgtcacagcgtctctccgaactggactggatgctaaagagcgcccttggcgaccgcatcaaggaaaagaccgatcataaggaggaaaatactgggaatgaggaagttgaggacgggaccgaggagactttgtcccaacactcagacggcatcgtcgagtatggtcccaaaaaatctagaccaggcctgtctatgaggagaaaaccaccttatcgttcacatagcctttccccctcacctgtgaacaaacacaagcagtttcacctcgagcggaaaagacagaggaaaccccgagagactgacgtgaggcagtttcaagcacaggctttcactgaggcatttgaacgcgagctcaggcgccataaagtgcaggaaaatataggcccattacggatccacgagaaggaggaagagacagtggggaaaaacatacagcgccgctcctttgtgaaagagctgcagaatgtggtgagtcctggcagattcacgctggagaaacctcagagaagagtgcgcggaggattgcccaaacccaacaaggcggttcctatgaaggtctctgagcacagcttgctccccctgatgctcgaacaatttccattcttgtatgtatctggtccgacattatctaagatgtggaagcagcagattgcacaggtcgaacagctgaagaaggaggcctgcagggagaacaggagtaagaagaaactccaggatgagatagaggaggcactgcggcgacacgatctactgactactctggttaaaaaggagtacgaacacaataagcgacttcaagacttcaaagactgtattcgcagacaacgactgactcaaagtaagatcaaggaaaacagacaacagatcgtgagggcgcgcaagtactacgacgactacagagttcagttgtgcgctaaaatgatgcgcatgaggacacgagaggaaatgatcttcaagaagcttttcgaggagggactcaatattcagaagcagcggctgagggatctgcgaaattatgcaaaggagaaacgagatgagcaacgacgaagacaccaggatgagctggacagcatggaaaattactacaaggaccagtttagcctgctcgcggaggctatctcccaggagcatcaggaactgaaggcaagagaaaaaagccaggcacagacgttacataaggttaagcgcgagctgcgcagcaagatggaaaaggagatccaacagctgcaggatatgataacccaaaatgacgacgacgtcttcttccgtgaactggaagccgagcgctttaggtctcgtctacagctggcctcgttccagtactctaagagtcccagtttgtag

SEQ ID NO: 27153 - DNA, 420 bp, synthetic construct
  source 1..420: mol_type = other DNA; note = Synthetic coding sequence
atggagaccgactgcaaccccatggagctgagcagcatgagcggcttcgaagaaggctccgaactgaacgggttcgagggcactgatatgaaagacatgaggcttgaggcagaggcggtggtcaatgacgtgctcttcgcggtgaacaacatgttcgtgagtaaaagccttaggtgcgcagacgacgttgcttacattaacgtcgaaacaaaagagcgtaaccggtattgcctggagctcaccgaagccgggcttaaagtggtcggctacgcctttgaccaagtggatgaccacctgcagactccgtatcacgaaactgtttatagtttgctggatactttaagccccgcttatagagaggccttcggaaatgctctgcttcagcgactcgaggctctgaagcgggacggccagagctag

SEQ ID NO: 27154 - DNA, 300 bp, synthetic construct
  source 1..300: mol_type = other DNA; note = Synthetic coding sequence
atgaccgacacccggcggcgggtgaaggtgtacaccctgaacgaggatcgacaatgggatgatcggggaaccggacacgtttcttcaggctacgtggagcggctcaagggaatgtccctgttggtgcgtgctgaatctgacggttctctcctgctggagtccaagattaacccaaatacagcgtatcagaaacagcaggacacactgattgtgtggtcagaggccgaaaattacgatctggcgctttcatttcaagagaaagccggatgcgacgaaatatgggaaaaaatttgccagtag

SEQ ID NO: 27155 - DNA, 2463 bp, synthetic construct
  source 1..2463: mol_type = other DNA; note = Synthetic coding sequence
atgaccgacacccggcggcgggtgaaggtgtacaccctgaacgaggaccggcagtgggatgacagaggaacaggtcacgtgtccagcgggtacgtggagcgattaaagggtatgtctctgctggttcgcgctgagtcggatggcagtctgctgctggagagcaaaattaatccgaatactgcctaccagaagcagcaggacaccctgatcgtctggtccgaagctgagaattacgatctggctttgtcttttcaagaaaaagctgggtgtgacgagatttgggagaaaatatgccaggtgcagggcaaggaccccagcgtggatatcacacaggacctggtagatgaatcagaggaggagcggtttgacgacatgagtagtcctggtctcgagctgccgagttgcgaactgtcacgcttagaggaaatcgccgagctcgtagcttcttccctgcctagcccgctgcggcgagagaaactcgccctcgccctcgaaaacgaggggtacattaaaaaattgctggagttattccacgtctgtgaggatcttgagaatatcgaaggcctgcaccacttatacgagatcattaagggtattttcctgctgaaccgaacggcactgtttgaggttatgttctcagaagagtgtatcatggatgtgattggctgcctcgagtatgatccagcgctcagccagcctcggaaacatcgagaattcttgacgaaaactgctaagtttaaggaggttattcccataagcgatcccgaactgaaacagaagatccaccaaacctatcgcgtgcaatacattcaagacatggttctgcctacgccatccgtcttcgaggagaacatgctctcaacactgcactcgtttattttttttaataaagtcgaaattgttggtatgcttcaggaggacgagaagttcttaacagacttattcgcccagctgactgacgaggcaacggacgaggagaagcgacaggagctggtgaacttcttaaaggaattttgtgcattttcccagacacttcagcctcaaaatagggacgccttctttaagacactttcaaacatgggaatcctccccgcactggaagttattcttgggatggacgatacccaggtgagatccgccgctactgatatcttctcctaccttgtggagtataaccccagcatggttcgggagttcgtgatgcaggaagcccagcagaatgacgacgatatcttacttataaacctcataattgaacacatgatctgtgacacagatcccgagctgggcggcgcagtgcaactcatgggactgctgagaactctggtggacccagaaaacatgcttgctactgccaacaagacagagaagaccgagtttttaggctttttctataaacactgcatgcacgtgctgacagcccctttgcttgccaatacaactgaagacaagccatctaaagacgacttccagaccgcacagttgttggcactggtcctcgaactcctgactttttgcgttgagcaccatacataccacatcaaaaactatattatcaataaggatattctgcggagagtgctggtgctgatggcttctaaacatgccttcctggcactgtgcgcccttcgtttcaagcgaaaaatcattggcttgaaagacgagttctataacaggtacattatgaagtccttcctattcgaaccagtggtgaaggcctttttaaacaacgggagcagatacaacctgatgaattcagccattatcgaaatgtttgaatttattagggtggaagacatcaaaagcctgactgctcacgtcattgagaactactggaaagctttggaggacgtcgactatgtccagacctttaaaggcctgaagctgagattcgaacagcaaagagagcgccaggataaccctaaattggactctatgcggtctattttacgaaaccacagatatcgaagggatgccagaacattggaggatgaagaggagatgtggtttaacactgatgaggatgacatggaggacggcgaggccgtggtgtctccatcggacaaaactaaaaacgatgatgatatcatggatccaatctcaaagttcatggagcggaaaaaacttaaggaatctgaggaaaaggaggtgctcctgaaaacaaatctgtctggacgtcaaagcccatctttcaagctctctctctcttccgggaccaagaccaacttgacatcacagtcctccactaccaacctgcctggttctccgggctcacccggctccccaggatctcctggctcacctggaagtgttcctaaaaacacaagccagacagcggcgataacgacgaagggaggtctcgtcgggctggtagattaccctgacgacgatgaggatgatgatgaggatgaggacaaagaggacactctgcccctttcgaagaaagctaaatttgattcctag

SEQ ID NO: 27156 - DNA, 396 bp, synthetic construct
  source 1..396: mol_type = other DNA; note = Synthetic coding sequence
atgaacgagagcaagcccggcgacagccagaacctggcctgcgtgttctgccgcaaacatgatgattgccctaacaagtacggagagaaaaagaccaaagaaaaatggaatcttaccgtgcactattactgtcttcttatgagttccggaatttggcaaaggggcaaggaggaggaaggggtctatggtttcttgattgaggacatccggaaggaagtcaatcgagctagtaagttaaaatgttgcgtgtgtaaaaaaaatggagcctccattggatgtgtagcgcctaggtgtaagcgcagttaccactttccttgcggcctccagagggaatgtattttccagtttaccgggaacttcgcttccttctgctgggatcaccggccagtgcaatag

SEQ ID NO: 27157 - DNA, 5934 bp, synthetic construct
  source 1..5934: mol_type = other DNA; note = Synthetic coding sequence
atggccgcccggagcgcccccagctgccacctgcggctggagtgggtttatggttatcgtgggcaccagtgccgcaacaatctgtactacactgcggcgaaagagattgtgtacttcgtggccggtgtaggagtcgtgtactcccctcgagagcaccgccagaagttttacagaggccattctgatgacattataagtctggctttgcaccccgaacgcgtcctggtcgcaaccgggcaagttgggaaggaaccatatatttgcatttgggattcctacactgtgcagacaatttccgtgctgaaagacgtgcacacacatgggatcgcatgccttgcctttgatctggacggacagcggttggtgtctgtcggtctggactctaagaacgccgtgtgcgtctgggactggaagagaggaaagatgctatccatggcaccaggccacacagataggatctttgacatttcttgggatctttaccagccaaacaaacttgtatcttgcggcgttaagcacataaagttttggtctttatgtggtaacgcccttacgcccaaacggggggttttcggcaagaccggcgatctgcagactatattatgtctggcttgcgccagagatgaacttacgtactccggcgcactaaacggagacatttatgtgtggaagggaatcaatcttatcagaacgatccagggggcccatgccgcgggcatctttagcatgaatgcctgtgaggaggggttcgctaccggcggaagagatggatgcatccgactatgggacttgacatttaagcccataacagtgatcgacctcagagaaaccgaccagggttacaagggcctgtccgtgcgctccgtatgttggaggggtgaccacatcctggttgggactcaggactctgaaatcttcgagatagtggtccaggaacggaacaagccttttctgatcatgcaggggcattgtgaaggagaactgtgggcactggccgtgcaccccactaaacccctggcagttaccggttcagatgatcgctcagtgcgtatttggtctctggtggaccatgccctgatagcccgttgcaacatggaagagcccatccgctgtgcagccgtcaatgccgacggcatccatctggccctgggcatgaaagatggttccttcactgttttgagagtacgagacatgaccgaagtggtccacatcaaggacagaaaggaggctatccacgagctgaagtacagtcccgatgggacgtatctagccgttggctgtaatgattctagcgttgatatctacggcgtggctcaaaggtataagaaagttggcgagtgtttgggtagcctatcttttatcacacatttagactggtcatcggactcccggtacctgcagacaaacgacgggaatgggaaacgcctcttctaccgcatgcccggcggtaaggaagtgacgagcaccgaggaaatcaagggagtgcactgggcgtcctggacctgtgtcagcggacttgaggtgaacggtatctggcccaaatacagcgacattaacgatataaattctgttgacggaaattatatagggcaagtgcttgtgacggctgacgattacggcattattaaactgtttcggtatccgtgtctccgcaagggcgctaagttccgcaagtatatcgggcatagtgcccacgtgacaaatgtccggtggtcacatgattaccagtgggtgatcagtataggaggcgcggatcactcagtgttccagtggaagttcatcccagagaggaagctgaaggatgccgtccatattgcccctcaggagtccctcgccgactcacattcggatgaaagcgactccgatctgtcagacgtgcccgaattagattctgagattgagcaggagactcaactcacataccgccggcaggtgtacaaggaagatctgcctcaactaaaggagcaatgcaaggagaaacagaagtctgccacttctaagcggcgggaaagggcccccgggaactccatccggctgcactttgtgcacgggtataggggatatgactgtcgatccaacttgttctacacccagataggggagatcgtgtatcatgtagccgcagtgggtgtgatctacaatcgacagcagaacactcagcgattttacttaggacacgatgacgacatcctgtgtctcaccattcaccctctgaaagattacgtggccactggtcaggtgggaagagatccaagcatccatatttgggacaccgagactataaaacccctcagtatcctcaaaggccatcatcagtatggcgtgagtgccgtcgactttagcgccgacggaaagaggctagcctccgtaggcatagacgacagccacacagtagtgctgtgggattggaaaaaaggcgagaagctttctattgcacgtggaagcaaagacaaaatctttgtggtcaagatgaacccctacgttcctgacaaactgattaccgccggcataaagcatatgaagttctggcgaaaggccggtggcggactgatcgggaggaaaggctacatcggcacactgggaaagaacgacacaatgatgtgcgcagtatatgggtggacggaagagatggcattctccggcacctcgaccggggacgtgtgcatatggagggatatcttcttggtgaaaactgtgaaagctcacgacggccctgtgttttccatgcacgctctagagaagggtttcgtcacagggggcaaggacggcatagtggctctctgggacgatagtttcgaacgctgcttaaagacatacgccattaagcgggctgcactggccccagggagtaagggattgctactggaagacaatcctagtatccgggcgattagtttaggccatggacacattctggtcgggacaaaaaacggtgagatcctggaggtcgacaagagtggccccataactttgcttgtgcagggacacatggagggcgaagtgtggggcttagccacccatccctacttaccgatttgtgccaccgtctccgatgacaagacattacgaatttgggacttgagcccctcacactgcatgctggccgttcgcaaattaaagaaaggtggtcggtgctgctgcttctcgcctgatggcaaggctcttgccgttggcctcaatgacggatcttttctgatggcgaacgcggacactctcgaagatttagtgtcattccatcaccggaaagacatgatctctgatattagattttcccccggcagtgggaagtatttggccgttgcaagccacgactcttttattgatatatacaacgtgatgtcaagcaagagggtgggcatttgcaagggcgcgaccagctatataacgcacattgattgggatattaggggcaaacttctgcaggtgaacacgggcgccaaggaacagctgttttttgaggcccctaggggcaaaaaacagacgattcctagcgtagaggtggaaaagatcgcgtgggctagctggacctcagtcctgggtctttgttgtgaagggatctggccggtgattggcgaagtgactgatgtgactgcctcatgtttgacatcggataagatggtactcgctacgggcgacgaccttgggttcgtgaaactgtttaggtatcccacaaaggggaagttcggtaagtttaaacgatacgtggctcacagcactcatgtcaccaacgtcaggtggacctatgatgactcaatgctggtcacactaggcggtacagacatgtctctgatggtctggacgaacgagatggagggttaccgggaaaaacgaccttgtgacagtgaggaatccgacatagatagtgaagaagacggtggctacgacagcgacgttacccgggaaaatgagattagctacaccatcagagccctgagtactaatattcgaccaatgcttggcatcaagcctcacctacaacaaaaggagccctcaatcgatgaacgacagggagtggtgaggggaagtaggccaccggtatctagagctccgccccagcccgaaaagctgcagactaataatgttggaaagaaaaagcgacctatcgaggatctggtcctggagctaatcttcgggtatcggggacgagactgtcgcaacaacgtccactacctgaatgatggcgacgacattatctatcatacggcttcagtgggcatcctccacaatgtagcgactggctcacagtctttttaccaggagcataacgatgatatactgtgtctgacagtgaaccagcaccccaaatttattaacattgtggcaactggccaggtgggggactccgccgatatgagtgcaaccgccccatctatacacatttgggacgccatgaataaacaaaccttgtctattctgagatgctaccactcaaagggcgtttgcagcgtttccttctccgctactggcaaactgctgttaagtgtgggcctggatcctgaacatactattactatttggaggtggcaggaaggagccaagatcgcctcaagggctggccataatcaacgcatctttgtagcagagttccgccccgattctgacactcagtttgtgtccgtaggagtcaagcatgtgaagttctggacgctcgcaggccgggcgctcttgtccaaaaagggtttactgagcactcttgaggatgcgcgcatgcaaaccatgctagccatcgcttttggagctaacaacctcacatttacaggtaccattagcggcgatgtgtgtgtttggaaagatcacatcttgtgtcgaattgtcgcaagggcacacaacggtcctgtttttgctatgtacaccacactccgggacggcctcatagtgaccgggggaaaggaaagaccaagtaaggaaggaggtgctgtgaagctgtgggatcaggaacttagacgctgcagggctttcaggctggagacagggcaggctactgattgcgtgaggtccgtatgccgagggaaaggcaagatactcgttggcacgcggaacgccgaaattatcgaggtgggcgagaaaaacgctgcctgtaacatccttgtcaatggccatgtggatggaccaatttggggacttgcaacgcatccctcccgcgacttttttttatccgccgccgaggacggaaccgttcggctgtgggacattgccgataagaagatgctgaacaaggtgaatctcgggcatgcagctcggaccgtatgttactctcccgaaggagacatggtggccatcggcatgaaaaacggcgagtttataatacttctggtgtcaagtctgaagatctggggtaagaagagggataggaggtgtgccattcacgatatacggttctcccccgattcaagatacctagccgtgggctcatcagagaatagcgtcgatttttacgacctgacactgggcccaaccttgaaccgcatttcctattgtaaagatatcccttcctttgtaatacagatggactttagcgctgactcttcctatcttcaggtgagttctggctgttataagaggcacgtttacgaagtcccctccggcaaacatctcatggatcatgcagccatcgataggattacatgggccacttggaccagtattctgggcgacgaagtgttgggtatctggtctcgacacgccgagaaagcagatgtgaactgcgcttgcgtgagccattctgggattagcttagtgacaggagatgatttcggtatggtgaagctgtttgactttccgtgtcccgagaagtttgctaagcataagaggtttctcgggcattccccccacgtaactaacattagatttaccagcggggaccgccacgtcgtgagtgctgggggcgatgactgcagcctgtttgtgtggaaatgtgtgcatacccctcactag

SEQ ID NO: 27158 - DNA, 2502 bp, synthetic construct
  source 1..2502: mol_type = other DNA; note = Synthetic coding sequence
atgaccgacacccggcggcgggtgaaggtgtacaccctgaacgaggaccgacagtgggacgacaggggcactggccatgtctcaagtggctatgtggagcggctgaagggcatgtcattactggtccgcgccgagtctgacggatctctgctgctggaaagcaaaattaaccccaataccgcctatcagaaacagcaagatactctaattgtgtggtcagaggcagaaaactacgaccttgcgctctctttccaggagaaggccggatgcgatgagatttgggagaagatttgtcaagtccaaggaaaggacccaagcgtcgacattactcaggacctggtggatgagtctgaagaagaacgttttgacgatatgtcctcacctggattagagcttccatcatgcgagctctcaaggcttgaggaaatcgccgagctcgttgcaagttctctgccctctccccttaggagggagaaactcgccctcgcattggaaaacgaggggtacataaaaaagcttctggagctgttccacgtctgcgaggacctagagaacattgaaggactacaccacctatacgagatcataaagggaatcttcctgttgaaccgaacggcccttttcgaggttatgttttctgaggagtgcataatggatgtcataggttgcctcgaatatgacccggcgctgtcacaaccacggaaacacagagaatttctcactaaaaccgctaaattcaaagaagttattcctatctccgatcctgaactgaagcagaaaattcatcaaacataccgtgtgcagtacattcaagacatggttttgccaacacccagcgtgtttgaggagaacatgttgtcgactctgcacagcttcattttcttcaacaaggtagaaatcgttggtatgttacaggaagatgaaaaatttttgaccgacctcttcgcgcagctgacagatgaggctaccgatgaggagaagcggcaagagctggtaaacttcctgaaagaattttgtgctttctcacagactctccaacctcagaaccgggatgccttcttcaagacactgagtaatatggggatactccccgccctcgaggtaattctggggatggacgacacccaggttagaagcgccgccaccgatattttcagctacctggttgagtacaacccttctatggttcgagagttcgtgatgcaggaggcccagcagaatgacgatgtaagtaaaaaacttaccgagcaaaaaattacaagcaaagacattctcctgataaatctgatcatcgagcatatgatctgtgacacagatcctgagctgggaggtgcagtccagttgatgggccttctgaggaccttggttgatcctgagaacatgctggctaccgccaacaagacagaaaaaaccgagttcctgggctttttctacaaacactgcatgcatgtgctcactgcaccactgctggccaataccactgaagacaagccttctaaggatgattttcagaccgcgcagcttctagccctggttctggaacttctgactttctgcgtggagcatcacacataccacatcaagaattacatcatcaacaaggacattctgcgccgcgtgctggtgttaatggcctccaagcacgcgttcctggccttgtgtgctctgagatttaaaagaaaaatcattgggttgaaagacgaattctataaccgctacataatgaaaagctttctgtttgagccagtggtcaaagctttcctgaataacgggtctcgctacaacctcatgaattccgctatcattgaaatgtttgaattcatccgtgtggaagacatcaagtcattgaccgctcatgttatcgagaactattggaaagccctcgaagacgtggactacgtacagaccttcaaggggctcaaattgagatttgaacagcagagagagcgccaggacaatcctaagttggatagcatgaggagtatccttaggaaccaccgttatcgacgggatgccagaaccctcgaagacgaagaagaaatgtggttcaacacggacgaagacgacatggaagacggcgaggccgtggttagtccctcggacaagacaaagaacgacgatgatattatggatcccatcagtaaattcatggaacgcaaaaagttgaaggagagtgaggagaaggaggtcttactcaagacaaacctgagcggtcggcagtcccctagcttcaagctgagcttgtcctctggaaccaagacaaacctaacatcccagtcctcgactacaaacttacctggttctcccggctcccctggaagcccaggaagccctggcagtccggggtcagtgcctaagaatacgagccaaacagcggcaattaccaccaaaggaggtctggtaggcttagtggactatcctgatgatgacgaagacgacgatgaggatgaggacaaggaagatactctgccactgtcaaaaaaggcgaaatttgatagctag

SEQ ID NO: 27159 - DNA, 3987 bp, synthetic construct
  source 1..3987: mol_type = other DNA; note = Synthetic coding sequence
atgtggcggcggaagcacccccggaccagcggcggcacccggggcgtgctcagcgggaaccggggcgttgagtacggctctggaagaggacaccttgggacttttgagggacggtggcgaaagctgccaaaaatgccagaggctgtgggcactgacccctccacgtctcggaagatggcagagctggaagaagtgactctggacggcaagcccctccaggccctgcgcgtcacagatctgaaagctgctttagagcaacggggacttgccaagtcaggacagaaatcagcactggttaagcgtctgaagggcgcccttatgctagaaaatctccagaagcattccacaccacacgccgcatttcaacctaacagccaaattggcgaggaaatgtcccagaacagttttatcaagcagtacctcgaaaaacagcaagaactgctgcgacagagactggaaagggaggcaagagaagccgccgagctggaggaggcttcagccgagtccgaagacgagatgatccatccggagggcgttgctagcctcctgcctccagacttccagagcagcctcgagcggcctgagcttgaactgtctcgccacagccctcgcaagtctagttctatctctgaggaaaagggggactcagatgacgagaagccgcgaaaaggggagcgacggtcgtcgagggtccgtcaggcaagagccgccaagctgtcagagggaagccagccagctgaggaagaggaggaccaagagacaccttcaagaaatcttcgagtaagggccgataggaatctgaagaccgaggaggaagaggaagaagaagaggaggaagaagaggatgacgaagaggaggagggcgacgatgaagggcagaaatcacgggaggcacctatactgaaagagtttaaagaggagggagaggagatcccaagagtgaaacctgaagagatgatggacgagcgcccaaaaacccgctcccaggagcaggaggtcttggagcgtggtggacgctttacacgatctcaggaagaagcacgaaagtcacacctcgccagacagcaacaggagaaggagatgaagacaaccagccctttggaggaggaggagcgggagatcaaaagctcccagggcctgaaggaaaagtccaagtctccatcaccacctagacttacggaggatcggaagaaggcctctctagtggcactgccagagcagacggcctccgaggaggaaacgcccccacccctgctgacgaaagaagcctcgagtccccctcctcacccccaactgcattcagaggaagaaatcgagcccatggagggacctgctcctgccgtgttaattcaactgagccctcccaacacggatgccgatacccgtgaactgcttgtgtctcagcacacggtacagctggtagggggactgagccccctctcaagcccttctgacactaaggccgagagccctgcagagaaggtgcccgaggagtctgtgttgcctttagtccaaaagagtaccctagcagactactcagctcagaaagatctcgagccggagtcagaccggtcagcccaacctctcccactgaaaatcgaggagctcgctctggcaaaaggcattacagaagagtgtttaaaacaaccatctttggagcaaaaagagggcaggagagcatcgcatactctcctccccagccacaggctgaaacaaagtgctgatagtagctctagccgcagttcctctagctcatccagttcctcgagatctaggtccaggtcccctgacagcagtggaagcagatctcatagccctctgcgcagcaaacagcgagatgtcgcacaggccagaacccatgccaatcccaggggccgccctaagatgggcagccgctctacttccgagtctagaagcagaagtcgatccagatctaggtccgcctccagtaattcacgcaagagcttgagtccgggtgtgtcacgagacagctctaccagctacaccgaaactaaggacccctccagtgggcaggaagtggccacgcctcccgtgccccagctgcaggtgtgcgagcccaaagagcgaacttcgacatcttccagcagcgtccaagcgcggcggcttagtcagcccgaaagtgccgagaagcatgtgacacagcgtttgcaacctgagcgggggagccctaaaaaatgtgaggccgaggaggcagaacctcctgccgcaactcaaccacagaccagtgaaacccagaccagccacctccccgaaagcgaacgcatacaccatacggtggaagagaaggaggaggtgaccatggatacgagtgagaataggcctgagaatgacgtgccggaacctccaatgccaattgcagatcaggtttcaaatgacgatagacccgaggggtccgtcgaagatgaggaaaaaaaggagagcagcttgccgaaatcattcaagcggaagattagcgtggtgtccaccaaaggcgtaccagcaggcaacagcgataccgagggcgggcagccagggaggaagaggcggtggggtgcgtctaccgccacaactcagaagaaacctagcatctcaatcacaaccgagagtctcaaggaggccgtagtggatctgcatgcagacgattcacggattagcgaagatgagacagagcggaacggggatgatggcacacacgataaagggttgaaaatatgccgcacagtaacgcaggtggtacctgccgagggccaggagaacggccagcgcgaggaggaggaggaggagaaggagccggaggctgaaccacctgtgccaccccaggtatctgtggaggtcgcacttccaccaccagctgaacacgaggtcaaaaaagtcaccctaggcgacacactcacacggcggagtataagtcaacagaaatccggtgtcagcatcacaattgatgacccagttaggactgctcaagtccccagtcccccccgcggtaaaattagtaatattgttcacatctccaatttggtcaggcctttcactttgggacagctcaaggagctgcttggccgcactgggacccttgtcgaagaagccttttggatcgataagatcaaaagtcactgcttcgtgacctacagcacagttgaagaagccgtcgctaccagaactgcgctgcatggggtgaaatggccacagtcaaatccaaaattcttgtgcgcggactatgctgagcaggatgagctagactatcatcgcggtctgctcgtggaccgtccttccgaaaccaaaaccgaggagcaaggcattcccaggccactgcatcccccacctcctcctccggtgcagcccccacagcatccccgtgccgagcaacgcgagcaggaaagggccgttcgtgagcagtgggcagaacgggagcgggagatggaaaggcgagagcggacaaggtcggagcgggagtgggatagagataaggtgcgcgaaggtcctaggtcaagatcacgatctcgcgatcggcggagaaaggagagagcaaagagcaaggagaaaaagtccgaaaaaaaggagaaagcacaggaggaaccccccgccaagctgctcgatgatctgttcaggaaaaccaaggcagctccttgcatctattggctcccattgacagattcccaaatcgtgcaaaaggaagccgagcgcgctgagcgtgccaaagaacgggagaaacgcaggaaggagcaagaggaagaagaacagaaggagagagagaaggaagcagagagagagagaaacagacaactcgagcgggagaagcgtagagaacattcccgagagcgtgatagagagcgagaaagagagagggaaagggacaggggcgatagggatagagacagagagagggatagggagagaggcagagagcgtgaccgacgagacactaaaaggcacagcagatcccggagccgctccactcccgttcgggaccgaggaggtcggcgctag

SEQ ID NO: 27160 - DNA, 1089 bp, synthetic construct
  source 1..1089: mol_type = other DNA; note = Synthetic coding sequence
atggcccacagcagcttcttccccgacgagtacttcacctgcagcagtctatgcctgtcttgtggagtggggtgtaaaaaatccatgaaccacgggaaagagggggtgccccatgaggccaagtcccgttgccgctatagccaccagtatgataacagggtctatacgtgcaaagcctgctacgaacggggtgaagaggtaagcgtggttcccaagactagcgcttcgaccgactcaccctggatgggactcgccaagtacgcctggagcgggtatgtgattgaatgccctaattgcggagtggtgtatagatcaagacagtactggttcgggaaccaggaccctgttgatactgtggtcaggacagagatcgtgcatgtctggcctgggaccgatggattccttaaggataacaataacgccgcccagcgcctactcgacggtatgaatttcatggctcagagtgtaagcgagctgagtctgggaccaactaaagcagtcacaagttggctcacagatcaaatcgcccccgcttactggaggcccaatagtcagattctatcctgcaacaaatgcgcaacctctttcaaggataacgacaccaaacatcactgcagggcttgtggcgagggcttctgcgacagttgctccagcaagactcggcccgtaccagaaaggggatggggaccagcccccgtgcgtgtgtgcgacaattgttatgaagctcggaacgtacaacttgccgtgaccgaggctcaggtcgacgacgaaggtggcacccttatcgccaggaaggtgggagaggcggtacagaacacactgggggctgtagtgaccgccattgacattcccttgggcctggtaaaagacgctgctcgaccagcttactgggtcccagaccatgagatcctgcactgccacaactgcaggaaggaattctctataaagttatctaaacaccactgccgagcttgcggccagggcttctgcgacgagtgtagccatgatcgccgggctgttccatctcggggatgggaccaccccgtgcgagtctgtttcaactgcaacaagaaacctggcgacctttag

SEQ ID NO: 27161 - DNA, 420 bp, synthetic construct
  source 1..420: mol_type = other DNA; note = Synthetic coding sequence
atggagaccgactgcaaccccatggagctgagcagcatgagcggctttgaggagggtagcgagctgaatggatttgaaggcactgatatgaaggatatgcgtctggaagccgaagcagttgtcaatgacgtcctgttcgcggtgaacaatatgtttgttagcaaatcactgaggtgcgcagacgatgttgcctacattaacgtggagacgaaggaacggaatcgttactgcttggagcttaccgaagcaggcttgaaggtcgtgggatacgcttttgaccaggtagacgatcacctccaaacgccgtaccacgagactgtctacagcctgctcgacacacttagtccagcatatcgagaagcctttgggaacgcccttttgcagagactggaggctctcaaacgggatggacagtcttag

SEQ ID NO: 27162 - DNA, 2256 bp, synthetic construct
  source 1..2256: mol_type = other DNA; note = Synthetic coding sequence
atgagcgaggaggagctgaccaaggccatggagggcctgggcatggatgaaggagacggtgagggcaacatacttcccattatgcaatctattatgcagaatttattgagtaaagatgtgttgtacccctctttaaaagagattacggaaaagtaccctgaatggcttcaatcacaccgcgagagcctcccacctgaacagttcgaaaagtatcaagagcaacactcggtgatgtgtaaaatatgtgagcaattcgaggccgaaacgccgaccgacagcgagaccacacaaaaggctcgctttgagatggttttagacctgatgcagcagctccaggacctggggcatccccccaaggagctggccggtgagatgctgacctggttgtttttctgcggaagtcaatgggtgtacggcccatggctgacctatgttggttggctgcagcagactagtttcaagatgtcctcgaagggcagcagtactgacgggcgcacagatcttgccaacggcagcctgtccagctctccagaagaaatgtccggggccgaggaaggccgagaaacatccagtggtatagaagttgaggctagtgacctgagcttaagtctcactggagacgatggaggccccaaccgcacttctacagagagcaggggcactgacacagaaagtagcggcgaggacaaagattctgattcaatggaggatacaggccactattctattaacgatgaaaacagagttcacgatcgtagtgaagaagaagaggaggaagaggaagaggaagaggaagaacagcccaggcgaagagttcaacgaaagagggctaatcgcgatcaggactcctcagatgatgagagggcccttgaggactgggtcagcagtgagacaagcgctctgcccaggccccgctggcaagcactgccggcgctgagagagagggagctgggcagcagtgccagattcgtgtatgaggcatgcggtgcgcgggtcttcgtgcaaaggttccgactgcaacacggactcgaggggcacacaggctgtgtcaacaccctgcatttcaatcaacggggtacctggctcgcatccggcagtgacgacctgaaagttgtcgtgtgggattgggttcgaaggcaaccagtattagattttgaatctgggcacaaatctaatgtgttccaagctaagtttttgccaaactctggggattcaaccctggcaatgtgtgcaagagacggacaggttcgcgtggcagagctatcagctacccagtgctgtaaaaacacgaaacgtgtcgcgcaacacaaaggtgcgtcccataaactagccttagaacctgactcaccttgcaccttcctgtctgcgggtgaggatgccgtcgtgtttacaatcgatctcaggcaggacaggcccgcaagcaagctagtagtcactaaggaaaaagagaaaaaggtgggcttatacacaatttatgtgaatcctgccaatacccatcagtttgcggtaggtggtcgagaccagtttgtccgaatctacgatcagcgaaaaatagacgaaaacgagaataatggagtactaaagaaattctgtccacatcacctggtgaacagcgagtccaaggctaacattacgtgcttggtgtactcacatgatggaactgagctgctggcctcttacaacgatgaagatatctacctgtttaattcctcacactccgacggggctcagtatgtaaagcgatacaaggggcaccgcaacaacgctaccgtgaaaggtgtaaacttttatggacctaagtctgagtttgtagtgtcgggctcagattgcggccatatttttctctgggagaagagttcctgtcagatcattcagtttatggagggagataaaggtggagtagtgaattgtctggaacctcaccctcacctgcccgtgctggcaacatcgggcttagaccatgacgtgaaaatttgggcacctactgccgaagcgtcaactgagctgactggtctgaaagatgtgatcaagaagaacaaacgagaacgggatgaggatagcctgcaccagactgacctgttcgactcgcatatgctgtggtttttgatgcaccacctgcgacaaagacggcaccacaggcgttggcgtgaacctggcgtaggtgccaccgacgccgactcagatgagagcccatctagctccgacacttccgatgaagaggaagggccagatcgcgtgcagtgtatgcctagttag

SEQ ID NO: 27163 - DNA, 1056 bp, synthetic construct
  source 1..1056: mol_type = other DNA; note = Synthetic coding sequence
atgatcgtgcagcgggtggtgctgaacagccggcccggcaagaacggcaatcctgtagcagagaattttcgcatggaggaagtgtacctcccagataacatcaacgaaggccaggttcaggtacgcacactatatctgtctgtggacccatacatgcggtgtaggatgaacgaggacactggtaccgattatataaccccctggcagctcagtcaggtggttgacgggggcggcattgggatcatcgaggaatccaaacacacgaaccttactaaaggtgatttcgtgacaagcttctattggccttggcaaacaaaggtgattctggacggaaatagtctggagaaggtggatccccaactggtcgacggccacctttcgtacttcctcggagcaatcgggatgcctggcctcacttcactcatcggaatccaggaaaagggacacataaccgctggatctaataagaccatggtggtgtccggagctgcgggcgcctgtggaagtgttgccggccagattggccatttcctcgggtgcagccgggtggttggaatctgcggcacccacgagaaatgtattctgctcacttcggaactcggcttcgatgctgcgatcaattacaaaaaagacaacgtcgccgaacaactaagagaatcctgccccgccggagttgacgtgtatttcgataacgtgggcgggaatataagcgataccgtgatctcccaaatgaatgagaattcccatattatcctttgtggccagatcagccagtataataaagatgtaccgtacccgccacccctgagtccagcaatagaggcaatccagaaagagcggaacataacccgggaaaggttccttgtgctgaactacaaagataaatttgagcccggcatcctgcagctttcccaatggtttaaggaaggcaagctcaagatcaaagagaccgtcataaacggactggagaacatgggcgcggcgtttcaatcaatgatgaccggtggcaatatcggaaaacagatcgtctgcatctctgaggaaatcagcctgtag

SEQ ID NO: 27164 - DNA, 588 bp, synthetic construct
  source 1..588: mol_type = other DNA; note = Synthetic coding sequence
atgcccctgcccttcggcctgaagctgaagcggacccggcggtacacagtgagtagcaaaagctgtctggtggcacgcattcagcttctgaataatgagtttgtagaattcacacttagtgttgaatccaccggtcaggaatccctggaagccgtcgcccagcggcttgaactgcgcgaagtgacatacttctccttgtggtactataacaaacagaaccagcgccggtgggtcgacctggagaaacctcttaaaaaacagctcgacaagtacgctttggaacctactgtttatttcggggtcgtgttttacgtacctagcgtgtcgcagttacagcaggagattactcgctaccagtactatcttcagctaaagaaagacattcttgagggctccattccatgcaccctggagcaggccattcaactggctggtctggcagtgcaggcagattttggtgacttcgaccagtacgagtcccaggacttcttgcagaaattcgcattgtttcccgtggggtggctccaagatgagaaggttctcgaggaggctacgcaaaaagtcgcacttctgcaccagaagtattag

SEQ ID NO: 27165 - DNA, 354 bp, synthetic construct
  source 1..354: mol_type = other DNA; note = Synthetic coding sequence
atgggcgacaagaagagccccacccggcccaagcggcagcccaagcctagcagcgatgaagggtactgggactgctcagtctgcacctttagaaattcggccgaggcttttaagtgcatgatgtgtgatgttcgcaagggaaccagcacacgggacagtaaggagggaggaaagctcgtgtcctattctacagcctcactgggcgttcgcgggacactgcgcaatcgggttgggggcggcagctctgaggagaagaagcaagctgaatatctagcaccaggcaggcgcagaaacattgttcatcgtggggtggggccaggacagaggtccggcccttctctgaaagaggcttag

SEQ ID NO: 27166 - DNA, 3285 bp, synthetic construct
  source 1..3285: mol_type = other DNA; note = Synthetic coding sequence
atggccgagagcagcagcgagagcgaccacttccggtgccgggaccgactgtccccctgggccgcccgatccacccaccggggcactcggagtctccctaccgtcgaagtaacagagaaggtgaacactatcacatctacactgcaggatactagtagaaaccttcgccaggttgatcagatgctagggcgctacagggagtactctaatggacaggccggcgccatcgagcaccttaaggagtcccttgagcaaagcatagaccagctgaggtctcaacgcttgttacggaactctggcgggagaagcatttcagtaacgtctctaagtgcttccgatctagacggaggcaccgggagtgagctacaccactttcccccaaccagccctctaaaagactacggagacccgcaggggatcaaacgaatgcgcagtagaacaggcgtgcgcttcgtgcaggagactgatgacatgacacagcttcacggtttccatcagtcgcttcgcgatttatcatccgagcagatccgcctcggggacgactttaaccgcgagctttcaagacggtctcgaagcgatgccgaaacaaaacgggccctggaagaactcaccgagaagttaaacgaagctcagaaacaggaggttgtgagcgaccgtgtagaaagaagattgcaggaattggagagggagatgcggactgaaagggaattggtcgagcgcaggcaggaccagttaggtttgatgtctctccagctccaggaggccctgaaaaaacaggaagccaaggctgatgagcacgaaggcgccattaagaataagttgagacaaaccgagaccgaaaagaatcaactggaacaggagctagaactttcccgacgacttctgaaccagtccgaggggtcccgagaaacacttctacaccaggtcgaggaactgcgaacacagctcaccaaagcagagggagatagaaaaggattacagcaccaggtgtctcagatttcgaaacagcagtctaactaccaggacgaacagggagaggactggagatttcggcgcggcgttgagcgcgagaagcaagacctggaaaagcagatgagtgatcttagggtccagctcaatttttctgccatggcttctgagcttgaagaagtcaagcgttgcatggagagaaaggacaaagaaaaggcccacttggcatcccaagtcgagaatcttacccgcgagcttgagaatggggagaaacaacagctccagatgctcgacaggctgaaagagatccagaatcattttgacacctgcgaagctgaaaggaagcacgccgatctccagatttccgagctaactagacacgccgaagacgctaccaagcaagcagaacgatatctgtccgagttgcagcagagtgaagcacttaaggaagaagctgaaaagcgaagggaggacttgaaacttaaggctcaggagagcattcgacaatggaaactgaagcataagaaacttgagagagctctggagaaacagagcgaaactgttgatgaattgacaggcaaaaataatcagatcctgaaagagaaagacgaactcaagacacagctctacgctgccctccagcagatagagaacctgcgcaaggaactgaatgacgtcctgaccaaacgcgctttacaggaggaagaactccatagcaaggaggagaagctgcgcgatatcaagagccatcaagctgatttggaactcgaagtgaaaaactcactggacaccattcatcgactggaaagcgagctgaaaaagcagtctaaaatccagtcacagatgaaggtggagaaggctcacctagaagaggaaatcgccgaactcaagaaatcccaggcccaggacaaggccaagctgttggagatgcaggagagcataaaggacctctcggctattcgcgccgatttggccaataagttagctgaagaagagcgcgctaaaaaagcagtgctaaaagatctgagtgacctcactgcgcaggcgaagtcgcgggatgaagaaaccgccactattattacacagcttaagctggagcgtgacgttcaccagcgcgaactgaaagacctgacctcctctctacaatctgtgaaaacaaaacacgagcagaatatccaggaattgatgaaacacttcaaaaaggaaaagagcgaggctgagaaccacattagaacactgaaagccgagtcactcgaggagaaaaacatggcaaaaatccatagaggccagctggagaaactgaagagtcagtgcgatcgcttaactgaggaactgacccagaatgagaacgagaacaaaaaactcaagcttaaatatcagtgtctcaaagaccaactcgaggaaagagagaagcatattagcatcgaagaggaacacctgagacgaatggaagaggcgcgcctgcaattaaaagatcagttactctgtttggaaaccgaacaggagtctatccttggcgtcataggtaaggagattgacgctgcttgtaaaactttcagtaaggatagtgtagagaagttaaaggtgttcagctccgggcctgacattcactatgatccacacaggtggttggcagaatcaaagacgaagctgcagtggctctgcgaggaactgaaagagagagagaaccgagagaagaacttaaggcatcagctgatgctgtgtcgccagcagttgcgaaacctgaccgagaataaagaaagcgagcttcagtgtttattccaacagatcgagcgacaagagcaactgcttgatgaaatccacagagagaaacgcgacttgctggaggaaacacagagaaaggatgaagagatgggaagcttgcaggaccgagttattgcccttgaaacaagcacccaggtggcgctcgaccaccttgaatcagtgccagagaagttgagcctccttgaggattttaaggacttcagagactcctgttccagcagcgagcgcactgatgggcgatatagtaaatacagggtgaggaggaattcccttcagcaccatcaagatgacaccaagtatcgtactaagagcttcaagggagacagaacctttttagaaggatcccacactaggggcttagatcactcaagctcgtggcaagaccattctaggttcctcagctcacctcggttttcttacgtcaatagctttacgaaaaggaccgttgcaccagattcagctagcaataaagaggacgccacaatgaatggtaccagcagccagccaaaaaaagaggaatacggctcttag

SEQ ID NO: 27167 - DNA, 1353 bp, synthetic construct
  source 1..1353: mol_type = other DNA; note = Synthetic coding sequence
atgcgggagatcgtgcacatccaggccggccagtgcggcaaccagataggtgcaaaattttgggaggtgatctcagatgaacacggcatagaccctagcggaaattacgtcggcgattccgacctgcagttggagcgcattagcgtttattacaatgaggcgtcatcacacaagtatgtgccccgcgccatcctggtggatctagaacctgggacaatggactccgtccggtctggcgcctttggtcacctgtttagacctgataatttcattttcggtcagtcaggggctggcaataattgggctaaggggcattacacagaaggggctgagttggtggactctgtattagatgtggtaaggaaggagtgcgagaattgcgattgccttcagggatttcagcttacacacagcctggggggcggcaccgggtctggcatgggcaccctgctcataagcaaggttagggaggaatacccggatcggattatgaataccttctccgttgtgccctcacctaaagtttcggatactgtggtggaaccgtataacgccacactctccatccaccaactcgtggaaaacacagacgaaacctattgcattgacaacgaggcgttgtacgacatttgcttccggaccctgaagctcgcaaccccaacctatggggaccttaatcacctcgtgagcgccacaatgagcggcgtaacaacatcgctgagatttcctggacagctaaacgctgatctcaggaaattagcggttaacatggtgccgttcccccggctgcactttttcatgcccggctttgccccactgaccgcgcgcgggagtcagcagtaccgtgcgctgacggtgcccgagttaacccagcagatgtttgacgctaagaatatgatggctgcctgtgacccgagacatggtcggtatttgaccgtggccactgtgtttcggggtaggatgtcaatgaaggaagtagatgaacagatgctggcaattcagtcaaaaaattcgtcatatttcgtggagtggattccaaacaatgtgaaagttgctgtttgtgatataccccctaggggacttaaaatgtcttctacgtttattggaaactccaccgcgattcaggaattatttaagaggatctcagagcaatttacagcaatgtttaggcggaaggcatttctgcactggtatacaggagaaggaatggacgagatggaatttaccgaagcggagtccaacatgaatgacttggtgagcgaatatcaacagtaccaggacgctactgcagaagaagaaggcgagatgtatgaggacgacgaggaagaaagtgaagcccaggggccgaaatag

SEQ ID NO: 27168 - DNA, 240 bp, synthetic construct
  source 1..240: mol_type = other DNA; note = Synthetic coding sequence
atgaacgagagcaagcccggcgacagccagaacctggcctgcgtgttttgtagaaagcatgacgattgtccaaataagtatggcgaaaaaaagacgaaagagaagtggaatcttactgttcactactattgcctgttgatgagtagcggaatctggcagcgcgggaaggaagaggagggcgtgtacggattcctaatcgaagatatacggaaggaggtcaaccgagcgagtaagctgtag

SEQ ID NO: 27169 - DNA, 1785 bp, synthetic construct
  source 1..1785: mol_type = other DNA; note = Synthetic coding sequence
atgaccgacacccggcggcgggtgaaggtgtacaccctgaacgaggataggcaatgggatgacaggggcaccggccacgtgtccagcgggtacgtagagaggttgaaaggcatgtctctgctcgtcagagcggagtctgatggaagtctgttgctggagtcgaagatcaaccctaataccgcataccaaaagcagcaagaggatgagaaattcttgactgatctgtttgcccagcttaccgacgaggctactgacgaggagaagcggcaggagctggtcaacttcctcaaggagttctgtgccttttcccagactctgcagccccaaaacagggatgcatttttcaagacactttctaatatggggattctgccagccctggaagtcattctcggcatggatgatacccaagtgaggtcagcggccacagacatttttagctacttggtggaatataaccccagcatggttcgcgagttcgtaatgcaggaagcgcagcagaatgacgacgtgagcaagaagctcaccgagcagaagattacctcaaaggacatcttgcttatcaatctgattattgagcatatgatttgcgataccgacccggagctcggaggagccgtccagcttatggggttgctgagaacgcttgtggatcccgagaatatgctggccaccgctaataagaccgagaaaaccgagttccttggatttttttacaagcattgtatgcacgtcctgaccgccccactgttggccaacacaactgaggacaaaccaagtaaggatgattttcaaaccgcacagcttctcgccctcgtgcttgaactgctaaccttttgcgtagagcatcatacataccatataaagaactacattattaacaaggatattcttcggcgggtcctcgtgctaatggcttccaagcacgccttcctggctctgtgtgctttgcggttcaaaagaaagatcatagggctcaaagatgagttttacaaccgctacattatgaaaagctttctgttcgaacctgtggtgaaagctttccttaataatggatctagatataatctaatgaactcagctatcattgagatgtttgagtttatccgggtggaggatattaaatcattaaccgctcacgtcattgaaaattattggaaggcactggaggacgtggactacgttcagacatttaagggcctgaagttgaggtttgagcagcagagggaaagacaggacaacccaaaattagactctatgaggagcatcctgcgcaaccacaggtaccgtcgagatgctaggacgctagaggacgaggaggagatgtggtttaatactgacgaggatgatatggaggacggtgaggctgtggtgtctcctagcgataagacaaaaaatgatgacgatattatggaccctatcagtaaattcatggaacgtaaaaagctgaaggagagtgaggaaaaggaggttctactgaagaccaacctgagtggccgacagagccctagttttaaactgagtctgtcctcaggaaccaagactaatctaacatcccaaagctccacgactaacctgccgggctcacccggcagccctggcagccccgggtcacccggatccccggggagtgttcctaagaacacttcacagaccgccgctataaccactaaaggaggtctggtgggcctcgtcgactacccggatgatgatgaggatgacgatgaggatgaggacaaggaggatacgctcccactgtcaaagaaggccaagttcgattcctag

SEQ ID NO: 27170 - DNA, 540 bp, synthetic construct
  source 1..540: mol_type = other DNA; note = Synthetic coding sequence
atggccgagagcagcagcgagagcgaccacttccggtgccgggacagactttccccatgggccgcccgatcaacccatagaggtacccggtctttgccgactgtcgaggtgactgagaaggtcaacaccattacaagcaccctccaggacacgtctaggaatctgcgccaggtcgaccagatgctcgggagatatagagagtattcgaatggacaggccggcgcgatagagcacctaaaagagtcattggagcagagcattgaccagcttcgatcacagagactgctgcgtaactccgggggccgctcaatttctgtgaccagcctctctgcatctgacttggacggtggtactggatctgagttacaccattttccacccacatctcctctgaaggactatggtgatcctcaggggatcaagagaatgcggtcaagaaccggggttagattcgtccaagagacagatgacatgactcagctgcacggcttccaccagtcactccgcgacctgtccagtgaacaaatcagattggggtag

SEQ ID NO: 27171 - DNA, 1056 bp, synthetic construct
  source 1..1056: mol_type = other DNA; note = Synthetic coding sequence
atgatcgtgcagcgggtggtgctgaacagccggcccggcaagaacggcaatccagtggctgagaacttccgaatggaggaggtctacctccccgacaacataaatgagggccaggttcaggtgcgtaccctgtacttgtctgtcgacccatatatgaggtgtcgtatgaatgaggatacagggactgactacataactccttggcagctcagccaggtggtcgacggaggtggcatcggcattattgaagagagcaaacacacaaatctgactaaaggcgattttgttacttcattctactggccatggcagactaaagtgatattagatgggaacagtttagaaaaggtggaccctcagctggttgatggtcatttgtcctatttcctaggggcgattgggatgcctgggctgacatcgctgatcggtatccaggaaaaaggtcacatcacagccggaagcaataaaacaatggtagtgagcggcgctgccggagcatgcggctccgtggctggacagattggccactttctgggctgttcaagagtggtcggaatctgtgggacacacgagaagtgcattctgttaacaagcgagttgggattcgatgctgccataaactacaaaaaggataatgtcgctgagcagcttcgcgagtcctgtcctgctggagtcgacgtctatttcgacaacgtgggcggcaatatctcggatacagttatctcacagatgaatgagaattcacacattatcctgtgcggccaaatttcccagtataataaagacgttccatacccccctcctctgagcccagctattgaagccatccagaaagaaagaaacatcacacgcgaacggtttttggttttgaattacaaagacaagtttgagccagggattctccagctgagccaatggtttaaggaagggaagttaaaaatcaaggagacagtcattaacggcttagaaaacatgggcgcagccttccagagtatgatgactggcgggaacatcgggaaacagatcgtgtgcatcagcgaggaaataagtctttag

SEQ ID NO: 27172 - DNA, 330 bp, synthetic construct
  source 1..330: mol_type = other DNA; note = Synthetic coding sequence
atggagaccgactgcaaccccatggagctgagcagcatgagcggcttcgaggagggttcggagctgaacggctttgaaggcacagacatgaaggacatgcgattagaagcggaagcggtcgtgaacgatgtgctctttgcggtaaataacatgttcgtaagtaaatcacttaggtgcgcagacgatgtggcatatattaatgtcgaaacgaaagagagaaatcgctattgtttggaactcaccgaagccggactcaaggtggttggatacgctttcgatcaagtagatgaccacctccaaaccccctatcatgaaactgtgtatagttag

SEQ ID NO: 27173 - DNA, 387 bp, synthetic construct
  source 1..387: mol_type = other DNA; note = Synthetic coding sequence
atggccgagagcagcagcgagagcgaccacttccggtgccgggaccgcctatctccttgggcagccaggtccacgcaccgagggacacgtagcctccccaccgttgaggtgaccgagaaagtcaacaccattacgagcaccctgcaagacacctctcggaacctgcgccaggtggaccagatgctggggcgttaccgcgaatactccaatgggcaggctggagctattgaacatctcaaggaatccctggagcagtccatagaccaacttagaagtcagcgtctcctgcgtaactctggcggtcggagtattagtgtaacgagcctttccgcctccgatctcgacggtggtactggatccgaattacatcatttcccccctacctag

SEQ ID NO: 27174 - DNA, 369 bp, synthetic construct
  source 1..369: mol_type = other DNA; note = Synthetic coding sequence
atgctgttcgccccctgctgccaccagtgcggcgagttcatcatcggcagggtaataaaagcgatgaataattcctggcaccctgagtgtttcaggtgcgacctctgtcaagaggtgctggccgacatcggatttgtgaagaacgcgggaaggcacttatgtagaccatgccacaaccgcgaaaaagccagaggattaggcaagtacatatgtcaaaagtgccacgctatcattgacgaacagcccctcatttttaaaaacgacccgtaccatcccgaccactttaactgtgcaaactgcggccaggaggggagcgactgccggtgcactggagccgaaaggggggccattttgccagccatgccatag

SEQ ID NO: 27175 - DNA, 420 bp, synthetic construct
  source 1..420: mol_type = other DNA; note = Synthetic coding sequence
atggagaccgactgcaaccccatggagctgagcagcatgagcggctttgaggagggctctgaacttaatggttttgagggcacagatatgaaagatatgcgtctagaagccgaggcagtggtaaacgacgtcctgttcgctgtaaacaacatgttcgtttcaaaatccctgcgatgcgcagacgacgtcgcctacatcaacgtggagactaaggaaaggaatcgctattgtttagaactgacggaggccgggcttaaggtagtcgggtacgcctttgaccaggttgatgatcatcttcagaccccctaccacgaaaccgtctactctctcctggatactctgagccccgcctatcgggaggcattcgggaacgccctgcttcagaggttagaagctcttaagagggacggacagtcctag

SEQ ID NO: 27176 - DNA, 4602 bp, synthetic construct
  source 1..4602: mol_type = other DNA; note = Synthetic coding sequence
atgcccgtgaagcggctgcgggaggtggtgagccagaaccacggcgaccacctggtcttactaaaggacgagctgccatgcgttccccctgccctgtctgctaataagcgcttgcccgttgggactggtacctctctgaacggcaccagcagggggtcatctgatctgacatcggcaaggaactgttaccagcctctattggaaaaccccatggtgtctgaatccgatttttctaaggatgttgccgtccaggttcttcctctcgataaaatcgaggagaacaacaagcagaaagcaaatgacatcttcatctcccagtataccatgggacagaaagacgctttgagaaccgtgctgaagcagaaggcacaatccatgcccgtgtttaaagaagtcaaagtgcacctactggaagacgcgggtatcgaaaaggacgctgtcacccaggaaacccgaatctccccctctggaattgattccgcgactaccgtcgcagccgctaccgccgcagccattgccaccgctgctcccttaattaaggttcagagcgacttagaggctaaagtcaactctgtcacggaacttcttagtaagctgcaggaaaccgacaagcacctacaacgcgtcaccgagcaacagacatcgattcaaagaaagcaggagaaactgcactgccacgaccatgagaaacagatgaatgtatttatggaacagcatatccgtcatttggaaaagttgcagcaacaacaaatcgatatacaaacacacttcatcagcgcagccctgaagacatcctcatttcagcccgtctccatgccatcatcccgggctgttgagaagtatagtgtaaaacccgagcatcctaatttgggcagctgtaatcctagcctttacaataccttcgcctctaaacaagcacccctcaaagaggtggaggacacatcgttcgacaaacagaaatccccccttgagactccagcaccccggagattcgctcccgtcccagtcagccgcgacgatgagttgtccaagagagagaacctcctggaggaaaaagagaatatggaggtgtcatgccatcggggcaatgtccgtctcctggaacaaattttaaataacaacgattctttgactagaaaatccgaaagtagcaacacaacttccctgacccggagcaaaattggctggaccccagagaagaccaaccggtttccatcatgcgaagagttggagaccacaaaggtaacgatgcagaaaagcgacgacgtacttcacgatttagggcagaaagagaaggagaccaattccatggttcagcccaaagagtccttgagtatgttaaaactgcctgacctgccacagaactccgtcaagcttcagactaccaacaccactcggagcgtgctgaaagatgccgaaaagatcctgcgcggagtgcagaataacaaaaaagtgctggaagagaacctagaagcaattataagagccaaagatggcgccgccatgtattctctgatcaatgccctgtcgacaaaccgcgaaatgtcggaaaaaattcgaatcagaaaaaccgttgacgagtggatcaagaccattagtgccgagattcaagacgagctctcccggaccgattacgagcaaaagaggttcgaccagaagaaccagagaaccaagaaaggccagaacatgaccaaagacatccgaacaaacacccaggataagactgttaataaatccgttatcccacgtaaacactcacaaaaacagatagaagagcacttccggaacttgcccatgcgggggatgcctgcctcttcacttcagaaagagaggaaagagggtttgctaaaagcaacaaccgttatccaagatgaagactatatgctccaggtatatggtaagccagtgtaccaaggacaccggagtactttaaagaagggaccatacctgagattcaacagcccaagtccgaaatcccgccctcaacgacccaaagtcatcgaacgcgtcaagggcaccaaggtgaagagcatcagaactcagacagacttttacgccactaaacccaagaagatggacagcaaaatgaaacactcagttcccgtgctgcctcatggggaccagcagtaccttttcagcccttccagagaaatgcccactttttccggcactctagaaggtcaccttattcctatggcaattcttctgggccagactcagtctaactccgacactatgcctcccgcaggggtgatagtgtctaagccccaccctgtgacagtcaccacaagcatccctccttcatctcgcaaggttgaaaccggggtgaagaagccgaacatcgccattgtggaaatgaagtccgagaagaaagatcctcctcaattgacggtccaggtcctcccatccgtggatatagatagtatttcaaattcatcggcagacgtcctctctcccctttccagccctaaggaagcgtctttgccacccgtccagacatggatcaagacgcccgaaataatgaaggttgacgaggaggaagttaagttccctggtacaaacttcgacgaaataatcgacgttattcaagaagaggagaaatgcgatgagatccccgattctgaacctattctagagtttaatcgctcggtgaaggcagacagcaccaaatataatgggcccccatttcccccagtagcatctaccttccaaccaaccgctgacattctggacaaagtcattgagagaaaggagacgctagagaactcactgatccagtgggtggaacaggagattatgtctcgaatcattagcggccttttccctgtgcagcagcagatagccccgtccatcagtgtctctgtcagtgaaacgtcggaacctctgacctctgacatcgtggaaggcacttcctccggtgcgttgcaactttttgtagatgcaggggtgccagtgaacagcaacgtgataaaacattttgttaacgaagcgcttgccgagacaattgccgtaatgctgggtgaccgcgaagccaagaaacagggcccggttgcgaccggggtctcaggggatgctagtacaaacgaaacgtaccttcctgccagagtctgtacccccttgccgactcctcagccaacaccaccatgttctccttcaagtcccgccaaggaatgcgttctggtcaaaacacccgactcttcaccttgtgattcagatcacgacatggcttttccagttaaggagatctgtgcagaaaagggtgacgacatgcctgcaattatgctcgtcaacacccccacagtaacgcctactaccactccgcctccagcggcggccgtgtttaccccaacactgtctgacattagcatcgataaactgaaagtgtcatccccggagctgcctaagccctggggggatggtgacctgcccctcgaagaggagaaccccaatagtccgcaggaggaactacacccacgcgcgatcgttatgagtgtagccaaagacgaggagcctgaatccatggatttcccagctcaaccacccccccccgaaccagtaccattcatgccgttcccggcaggcactaaggccccctccccgagccagatgcccggttcagacagctctacgctagaatccactctgtcagtcaccgtcactgaaacagaaacgctcgataagcccatatcggagggcgagatcttattcagctgcggacaaaagctcgcaccaaaaatcctggaagacatcggtttgtatttgacaaacttgaatgatagcctgagtagcaccctccacgacgccgtcgaaatggaggatgacccaccttctgagggccaggttatcaggatgtctcacaagaaatttcacgccgatgctatcctgagctttgctaaacagaaccaggaatcggctgtgtcgcaacaagctgtgtatcatagcgaggacctcgagaacagcgtgggtgaactgagtgaaggacagcgtccacagctcacggccgccgccgagaacattctcatgggccatagcctgtacatgcagccaccagtcacaaacactcaatccttggatcaacaatgtgaccccaagccccttagccgacagtttgatactgtgagcggatctatttacgaggatagttgcgcctctcacggcccaatgagcctcggcgagcttgagctggagcccaacagtaagctagtgttaccaacaacccttctaacagcccaggagaacgatgtgaatcttccggtggcggcagaagacttcagccagtaccagctgaaacagaaccaggacgtgaagcaagtggagcataaaccatcccagagctacctgagagtgcgcaataagagcgatattgctccaagccagcagcaggtctcacctggcgacatggaccgtacccagatcgaactgaacccctacctgacatgcgtgttctcaggtggtaaggcggtgccgctgtcggcatcacagatgccaccagccaagatgtccgtgatgctcccatctgtcaatctggaagactgcagtcagtctttatccttgtcaactatgcaagaggatatggagtctagtggagccgacacgttttag

SEQ ID NO: 27177 - DNA, 2334 bp, synthetic construct
  source 1..2334: mol_type = other DNA; note = Synthetic coding sequence
atgagcgcccagaccagccccgccgagaagggcctgaaccccggccttatgtgccaggaaagctatgcgtgttctggtaccgacgaggcgattttcgagtgtgatgaatgctgttccctccagtgcctgaggtgcgaagaggagctccataggcaagagcgactgcggaatcacgagcggatcaggctgaagccaggacatgttccctattgtgatctgtgtaaaggtttaagcgggcacctgcccggcgtccggcagcgtgcaatagtgagatgtcagacctgcaagattaatttgtgtctggaatgccagaaacggacacatagcggaggtaataaaaggcgacacccggtgacagtttacaacgtgtccaatcttcaggagtcattggaggctgaggagatggacgaggagactaaaagaaagaagatgaccgaaaaggtggtctcctttctcttagttgatgagaatgaagagatccaagtgaccaatgaagaggacttcatacggaaactggactgtaaacctgaccagcacctgaaggttgtttcaatatttggcaacactggcgatggcaagtctcacacactgaaccatacttttttttacggcagagaggtctttaaaacctctccaacacaggagagctgcactgtcggcgtctgggctgcctatgatcctgtccataaagttgccgtcatcgatacggaaggcctgctgggcgccaccgttaacctgtcacagcgtacacggctgttgcttaaagtgttggctatatccgatctcgtgatctatcggactcacgcagaccggctccataatgacctgtttaagttcctgggcgatgctagcgaggcttacttaaagcattttacaaaagaacttaaggccacaacagccagatgcggcctggacgttcctctctctaccctgggtcctgcggtgattatcttccacgagactgttcatacccaactcctggggtcagaccacccttccgaggttcccgaaaaactgattcaggaccggttcaggaagctgggccggttccccgaagcgttctcttccattcattacaagggcactagaacgtataaccctcccacggactttagcggactgagaagagctctggagcagctcttggagaataacacaacgagaagcccacgccatccaggcgtcattttcaaggcactcaaggctctgagtgaccgattctccggtgagattcctgatgatcagatggctcattcatcttttttccccgatgaatattttacttgctcgtccctgtgcctgtcctgcggcgttggatgtaagaaatccatgaaccatggcaaggagggagttcctcacgaagctaagtctaggtgtaggtactcccaccagtatgacaatcgcgtgtatacctgtaaggcatgttacgaaagaggtgaggaagtcagcgttgtccccaagacgtctgcctcaaccgacagcccatggatggggcttgcgaaatacgcctggtcgggctatgtgatagaatgtcccaattgtggcgtggtgtaccgctcacgccagtactggtttggaaatcaggacccagttgacacagtagtgcgcaccgagattgtgcatgtttggcctggcacagatggattcctgaaagacaacaacaacgctgcccagcgactgctcgatggcatgaactttatggctcagtctgtgtccgagctgtcactaggccccactaaggcagtgacttcttggctcaccgatcagatcgcccccgcctactggcgccctaacagtcagattctgtcctgtaataagtgtgccaccagcttcaaggacaacgataccaagcatcattgcagggcttgtggcgagggattctgcgatagttgctcctctaagactcgtccggttccagaacgcggttggggtcccgcccctgtcagagtgtgcgataattgttacgaggcgagaaacgttcagcttgccgttaccgaagcccaggtagacgacgaaggtggcacgttaatagcccgaaaggtgggggaggccgtgcaaaataccctaggggctgttgtcacagcgattgacattcctctgggcctggtgaaagacgccgcaagaccagcctattgggtcccagatcacgagattctgcattgccacaactgccggaaagagtttagtatcaagctctccaagcaccattgccgggcctgcgggcagggtttctgcgacgagtgctcccacgatagacgggccgtacctagtagagggtgggatcacccagtgagagtgtgttttaattgcaataaaaaaccaggtgatttgtag

SEQ ID NO: 27178 - DNA, 867 bp, synthetic construct
  source 1..867: mol_type = other DNA; note = Synthetic coding sequence
atggagaagctgagcgccctgcaggagcagaagggcgagctgcggaaaagactttcctatacaacccacaaactagaaaaactagagaccgagttcgactctactcgtcactacctcgaaatagaattaagaagagcccaagaagagcttgaaaaggttacagagaagctgaggagaattcagtctaattacatggccctacagcgtattaaccaagagttggaggataaattgtatcgtatgggtcagcactatgaggaggagaagcgggctttaagccacgagatcgtcgccttgaattcacacttgctggaagcgaaggtaacaatcgacaagctatcagaggataatgaactatatcggaaggattgcaatctggccgctcaactgctgcaatgtagtcaaacttatggcagagttcacaaggtctcagagttaccatccgattttcaggagcgggtgtccctgcacatggaaaagcacggatgctccctgccttccccactgtgtcacccggcctacgctgacagtgtgccaacctgtgtaatcgccaaagtgctggaaaaaccagaccccgcttctctcagttcccgtctctcagacgcatcagctcgggacctggccttttgtgatggcgtggaaaagcccggcccccgccctccttacaaaggtgacatttactgtagcgacaccgccctttactgtcccgaagaacggcggcgagatcgtcgtccttccgtggacgcaccggtaaccgacgttgggttcttacgagcacagaacagtacagatagcgcggccgaggaagaggaagaagcagaggcagcagcctttcctgctggctttcagcacgaagcgttcccttag

SEQ ID NO: 27179 - DNA, 1263 bp, synthetic construct
  source 1..1263: mol_type = other DNA; note = Synthetic coding sequence
tgaacccaggccatggccctggagacccccacccccggcccccccagagaaggacagtccccagccagccaggcaggcacccagcatccaccagcccaggcgacggcccattcccaaagcagccccgagttcaaaggttctctagctagtctgtcggatagtttaggcgtttccgtgatggccactgaccaggactcgtacagcactagctccacagaagaggagctggaacagtttagctctcccagcgtgaagaaaaaacccagcatgatcctcggaaaagcgcggcataggttgtcattcgcttcattctcctcgatgttccacgccttcctttccaataaccgaaagctgtataagaaggtggtcgagctcgctcaggacaagggctcctattttggaagcctggtgcaagattacaaggtgtactcactggaaatgatggcccgccaaacaagcagcaccgaaatgctgcaagaaatccggactatgatgacccagctcaagtcttacttattacaatctactgaactgaaagctttggtcgacccagccctgcactctgaagaagagctcgaagctattgttgagagtgccctttataagtgcgtgctcaagccgctcaaggaggctataaactcctgtctccaccaaatacactctaaggacgggagtctccagcaactgaaggagaaccagctggtcattctggctacaacaaccactgacctaggagtcaccacatcagtgccagaggtgccaatgatggagaaaatcttgcaaaagtttacatctatgcacaaggcgtactccccagaaaagaagatctctatcttgctgaagacctgtaagcttatctatgactccatggctctaggaaatccaggaaagccatacggcgctgatgatttcctgcccgtactcatgtatgtcctggctcgctctaatctcaccgaaatgctcctgaacgtggaatacatgatggagctgatggaccctgccctccaactgggtgaaggatcttactaccttacaacaacatacggtgcgctggagcacatcaaaagctacgacaagattacagtgacgcggcaactgtccgtggaggtgcaggactcgatccacagatgggagcgcagaaggaccctgaacaaggcaagggcttcaaggagctctgtgcaagtcagacccgagtctggcaggggtcccgtgggaccttgccctaggcaccatccatgttgtctcctggccaaagaaccttag

SEQ ID NO: 27180 - DNA, 2466 bp, synthetic construct
  source 1..2466: mol_type = other DNA; note = Synthetic coding sequence
atggccggcagcgacgccgagtgggtgaccatcgccaacaacctgctcttcaaatgccacattcatctgagaatacatgaattgcaggactgcgacgctaacgtcttcatcgccctgtaccagagcattctcggggaaaaagtccccgacctgatagtgatcccgcgatcacaggaggacgatgcacataacgtgcaggctgtgattgactcgctggccctggattatctccaagtgtctctgagccacatcaccggggagaatattgttaaaggagacaaggaaagcatcaagaatctcctggagattttcgacgggcttctggagtatctgaccgagaggatcagcgaaacatctcatgagaaaagcgaaactgagcaatacttcaaggaaagcgatcggggggagcgcctagaggaacccgaatccacaaaagagtccaagagctcatggaagagggtttcatttggaagatgcagcctgagcagcgaaatgctgggtcccagctgggatggagacgaagcggagtcaacgggggagatcattcggttgggcgatacggcccacacattttcactgcgctcaaatggcgcgcaatgtccgaatgagatgctctctaaaaaagcacttgcaagcccctcttccaagtcacatgaggacatgctgtatccgccctccgtgctatcaaagagtcggacgtctttcgtcgaggacacggaaacgctctctgttagtggaatcccaaatgcccgtaagctgggtgaacccatccgcgccgctataccccttcatcctccatatcacccatccgagccccgagctccctgtcccatcggcaaagagtacctgcactctagccattgctcaccggccgtaaactctacaggagagcatacagaatttagcggtgaccttgatgatggcctcttcctgatttcaaagctccctaaaggatccaagtgggaggtttacccagcccaggttcaaggtccccggacgcgcaagcccccgaaggggaagagaaatgagaaccgggcgacggcatcatcctgcaattcgccgtttccccagagaccaaggaaacgattaaccgagcaggaacttcacgacgtctccgagaagctttcacagcggctctccgagctggattggatgctgaagtccgcactaggggataggattaaagagaagacggatcacaaggaagagaataccgggaacgaagaggttgaggacgggacagaagaaaccttgagccaacattccgatggaatcgtggaatacgggcccaaaaagtccagacccggcctgagcatgcgccgaaagccaccataccggagccattcattaagccctagccccgtgaataaacacaaacagtttcatcttgagcgcaagcggcagagaaagcccagagagaccgacgtcagacagtttcaagctcaggctttcactgaggcctttgaaagagagctcagacgccataaagtgcaggaaaatatcgggccactccggatccacgagaaagaggaagagactgaaaagatctatcgcggagaagctgtcaggaaggggactccggagtgttctcagccatggaaaatttacagccgaaagaccaccactcaatcgctacggggcggcctgcccaaacctaacaaggcggtccccatgaaggtgagcgagcactccctcctgcccttgatgctggaacaattccccttcctgtatgtgtctgggcccaccctctctaaaatgtggaagcagcaaatagcacaggttgaacaacttaaaaaagaggcatgtagggagaataggtcaaagaaaaaattgcaggatgagatcgaggaagccttgcggcggcatgacctacttacaacactcgttaagaaagaatatgaacacaacaagcggctgcaggactttaaagactgcattcgacgccagaggctgacccagtccaaaatcaaggagaaccgtcagcagatcgtgcgggctagaaaatattatgacgattacagagtccaactctgcgctaaaatgatgaggatgaggacacgtgaagagatgatctttaagaagttgttcgaggagggtctcaacatccagaaacagcggctaagagacctgcgaaactacgccaaggaaaagagggatgagcagagaaggcgtcaccaagacgagctcgactcaatggaaaattactacaaggatcagtttagtctcctcgcagaagccatcagccaggagcaccaggaactgaaggcacgagagaagagtcaggcgcagacattgcataaggtcaagcgcgagctgagatcaaagatggagaaagaaatccagcaattacaagatatgataacacaaaacgatgacgacgtcttctttcgagagttggaggcggagcgattccgtagcaggctccagttggcaagctttcagtattctaaaagccccagcctctag

SEQ ID NO: 27181 - DNA, 4560 bp, synthetic construct
  source 1..4560: mol_type = other DNA; note = Synthetic coding sequence
atgcggatccccgaccagaagtacgtgaccctgaagctgaacgacgtaatccgattcgggtatgactcgaacatgtacgttctggagcgagtgcagcatagagtgcccgaagaagccctgaagcacgagaagtacaccagccagcttcaagtcagcgtgaagggccttgctcctaagcggagcgaggccctgcctgagcacacaccctactgcgaggccagtaatccaaggcctgaaaaaggcgaccggcgcccagggactgaagcagcaagttatagaactccgttatacgggcaaccatcttggtggggggaggacgatggctctaccctacctgacgcccaacgtcagggcgagccatatcccgaacggcctaaaggcccagtgcaacaggacggggaactgcacggttttcgggcccctgccgaacctcaggggtgctcttttagaagggaaccgtcctatttcgagattcccacgaaggagacgccccagcccagccagcctcctgaggtacctgctcatgaaatgcccacaaaggacgctgaggctggcgggggaggagctgctccagtggtccaaagtcatgcctcctttaccattgagtttgatgactgttccccaggaaaaatgaagatcaaggatcatataacaaagttctcgttgcggcagcggcgtccccccggcaaggaggccacacccggagagatggtctcagctgaaaccaaggttgccgactggctggtacagaatgacccttcacttctgcatcgggtgggacctggggacgatcggcatagcacgaagagtgacttacccgtccatacaaggaccttgaagggccataaacacgaggacgggacacagtccgacagtgaagacccgcttgctaaggcggcatctgctgctggagtgccgttagaggcctcaggcgagcaagtgaggttacaaagacagatcaagagagatccgcaggaacttctgcacaaccagcaggccttcgtaatagaattttttgatgaagacactccacgaaagaaacgatcccaaagctttacccatagcccaagcggagatcccaaagctgacaaaagacggggtcctacccccgccgatcgggacagacccagcgtaccggccccagttcaggccgggggtcgaagctccggtcctcagagggctggctctctgaaacgggagaagactgaagagagactaggctctccctctcctgcctcgcgtacgcctgcacgacccttcggaagcgtgggtcgcaggtctcgcctagcccaagatttcatggctcagtgtctccgagagtccagcccggcagctagaccgtctccagagaaggtgccacctgtgctgcctgcaccactgaccccgcatggcacctcccctgtcgggccacctacgcctccaccagccccgaccgatccgcagttgacgaaagcgagaaaacaagaagaggatgactccctctctgacgcaggaacgtacactatcgagacggaagctcaggatactgaggtggaagaggcccgtaagatgatcgatcaggtattcggggtgttggagtctccagaattgtctcgcgcctcttccgctacatttaggcctgtcatccggggggaccgagacgagtcggacgacggcggagtggcccagaggatggccctgctgcaggagtttgctagcagacccctgggagctgccccacaggctgaacatcagggtctgccagtgcctggttcccctggaggacaaaagtgggtgagccgatgggccagtctggctgactcctacagcgaccccgggctgacggaggacggcctcggcagacggggcggagagcctgaaggctcgctcccggtcagaatgcgtcgccggcttccccaactgccatccgaacgggcagacagtcccgccgggcctgaatcatcaaggaggtcagggcccggcccgcccgagctggattccgagcagcccagccgactgttcggccaggaagagctagacccagattcattgtcagatgctagcggcagtgatgggggacgcggtcctgagcccggggtggaaccgcaggatagtagaagaaggtcaccacaggagggacccacttggtctcgaggccgcaggagcccacgtgccccaggggaacccacacccgcatctttcttcattggcgaccagaatggggacgctgtcctgagccgcaagccgctggcagctccaggcgatggtgaaggcctgggacagacagcccagccctcccctccagctagagacggggtgtatgtgtcggccaacggcaggatggtgatccaacttcggcctggtcgaagtccagaacctgatggtccagcccctgcctttcttaggcaggagtctttcacaaaggaaccagctagtggcccacctgcaccggggaagcctccacacatatctagtcacccactgctacaggatctggccgcaaccagagccgccagaatggatttccattcccaagacacccatttgattctcaaagaaacagagaccgctttggccgccctggaggcgcgacttctgtccaacagtgtggacgctgagtgcgagggagggtcaacgccacgcccccctgaggatgccttatccggcgactctgatgtggacactgcctctacagtgagccttcgctctggcaagtcaggcccttcacccaccactccacagcctctgcgcgcccagaaagagatgtctccttcgcctcccgcagctcaagatcccggtggaacagccctggtctccgcgcgggaacagagtagcgagagacagcaccacccactaggtcccacggacatgggaagaggcgagccggtgaggcgaagtgctatccggaggggtcatcgtccccggggcagtctcgattggcccagcgaagagagagggcccgtcctggcgcaccttccgagttccgatgtgatggcctctaatcatgagaccccggaagcaacgggcgcagggcgccttggatctcggcgtaagcccgcagctcctccgccctcccccgctgcccgcgaggagcagagccgcagtagtgcctccagtcagaagggcccacaggcactgacaagaagcaattcactctctacccctaggccaactcgagccagcaggctgcggagggccagactgggtgatgcttcggatactgaagccgcagatggggagaggggcagtctcgggaaccctgaacctgtgggtaggcccgcagccgaacaggcaaaaaagttgtctaggctggacatactggcaatgccacgcaagcgggcagggagttttacaggcacaagcgacccagaagccgcccctgctagaaccagtttttcaggacgtagtgtagagctctgctgcgcaagcaggaaacccacaatggccgaggccagagccgtttctcgaaaggccgccaacaccgcaacaacaacaggcccaagacagcctttttcccgagctcgcagcgggagtgcgcgatacacctccaatacccggcgtcggcagcaaggctccgactatacgagcacatctgaagaggagtacgggagcaggcacggtagtccaaaacacacgcggagtcatacctccaccgccacacagacacctcgtgcaggatcatcctcaagagcacgtagccgggccccaggacctcgggataccgacgacgatgaagaggaaccggatccttacggctttatcgtgcaaaccgcagaaatcgcagaaattgcccggctgtcgcagacattagtcaaagatgttgccatcttggcacaagaaatccatgatgttgcaggagacggagatactctgggttcctccgaacccgcgcacagtgccagcctatccaacatgccctctacgcctgccagcacaattagcgcacgggaagagcttgtgcaaagaatccccgaagccagtctgaacttccagaaggttccacccggaagcctaaatagcagagactttgaccagaatatgaatgactcatgtgaggatgctttggcaaataagaccagaccgaggaatcgcgaagaggtgatatttgacaacttaatgttgaaccctgttagtcagttgtctcaggccatccgggagaacaccgagcatctggctgagaaaatgaagatcttgtttcagaatacaggaagagcgtgggaggacctagaggctcgcatcaacgctgaaaatgaagttccaatccttaagacctcaaacaaggaaatcagctccattctgaaggaactgaggagggttcagaaacagctggaggtgattaatgcgatagtggaccccagtggcagtcttgaccttctgaccggaaatagatctctggcttctagtgcacaacccggcctgggtaagggcagagtggccgctcagtcacccccatctccggcatccgctgaggcgctgctgcccgccttgcctctgaggaattttccgcaaagggcttcatgcggacctccaagcctcccagatccgaccttcttgccagatgccgagcgcttcctaatctag

SEQ ID NO: 27182 - DNA, 378 bp, synthetic construct
  source 1..378: mol_type = other DNA; note = Synthetic coding sequence
atgcccagcgagaagaccttcaagcagcggcggaccttcgagcagcgcgtagaagatgtgcgtttgataagagagcaacatccgacgaaaatccccgttatcattgaacgctacaagggagaaaagcaactccccgttctcgacaaaacaaagtttctggtgcccgaccacgtcaacatgtctgagttgattaagattattcgcaggaggctccaattgaatgccaatcaagcgtttttcctcttggtcaacggacactctatggtatctgtttcaacgcccatctctgaggtgtatgagagtgaaaaggacgaagatgggttcctatacatggtatgtgctagccaggagacgttcggaatgaagttgtccgtgtag

SEQ ID NO: 27183 - DNA, 3525 bp, synthetic construct
  source 1..3525: mol_type = other DNA; note = Synthetic coding sequence
atgcccctgcccttcggcctgaagctgaagcggacccggcggtacaccgtgagcagcaaaagttgcctcgtggcccgcatccagcttctcaataacgaattcgtggagttcactctatcagtcgaatctactggacaagagtcactggaggccgttgctcaaagactcgaactccgcgaagtaacctatttctctctatggtattacaataaacagaaccagcgtagatgggtggaccttgagaaacctctgaagaagcaactggacaaatatgcattagagcccaccgtttatttcggagtcgtgttttacgtgccctccgtgtcacagctccagcaggagatcacccgctaccagtactatctgcagctgaagaaagatatcctggagggttcaatcccttgcaccctcgagcaggctatccaactggccggactcgcggtacaggctgatttcggagatttcgatcaatatgaatcacaagactttctgcagaagttcgctctcttccctgttgggtggttgcaggatgagaaagtgcttgaagaagcaacgcagaaggtggccttgctgcaccagaagtacagaggcctcacagctccagatgcggaaatgttgtatatgcaggaagtcgagcgcatggacgggtatggggaagaatcctaccccgcaaaagactcccaaggaagtgatatcagtataggtgcctgtttggagggcatttttgtcaagcacaaaaatggccgacaccccgtggtctttcgctggcatgacatcgcaaacatgtcccacaacaaatcttttttcgcactcgaactggccaacaaagaggagaccattcaatttcagacagaagatatggaaaccgctaaatacatatggaggctctgcgtggcacgacataagttctatcgcctgaaccagtgcaatctgcagacacagaccgtcacagtgaatcctattaggcggagatcttcctctcgaatgagtctgcctaaaccccagccctacgttatgcccccacctccccagctccattacaacggacattatactgaaccatacgcttcttctcaggacaatctattcgttccaaatcaaaacggctattactgtcactctcagacgtctctggacagagcccagatcgaccttaatggacggattagaaacgggtccgtgtatagcgctcatagcaccaactctctgaacaacccgcagccttatttgcagcccagcccgatgtcatccaacccctccattacaggatctgacgtgatgcgcccggactacctgccctcacaccggcatagcgccgtaatccctcctagctatcgccctacaccagactacgaaaccgtgatgaagcaattgaatcgcgggctcgtgcatgctgagcgacagtcccattccctcaggaatctcaacatcggaagctcgtatgcttactccagacccgcagccctggtctattctcagcccgagatccgagagcacgctcagctgccttcgcccgccgccgcccattgcccattcagcctgtcctactcctttcactccccatccccctacccatacccagctgagcgcagacctgtcgtgggggcagtctctgtgccagagctcacaaatgcccaacttcaggcccaggattacccatcgccaaatattatgagaacccaagtataccgtccccctcctccctatcccccacctcggccagccaactcaactccagacctcagtaggcacctgtatatttcaagtagcaatccagatctgattacccgtcgcgtacatcacagtgttcagaccttccaggaggacagcctccccgtggctcacagtctgcaggaggtctcagagcctctaactgctgcacgtcatgcacagctgcacaagcggaactccatcgaggttgcaggattaagccatggcctggaaggtctgcggctaaaggaaaggaccctgagtgcttctgcagctgaagtcgctcccagggccgtgtctgtgggatcccagcctagtgttttcactgagcgtacccaacgcgagggccccgaagaggccgaggggctgagatacggccacaagaagagtctatcagatgcgactatgctgatccactcatcagaagaggaggaggatgaagattttgaggaggagtcaggagcccgcgcccctccggcccgggctcgcgagccccggccgggcctcgcccaagatccaccgggatgccccagggtgctcctggctggtcctctgcatatcctggagcccaaagcacatgtgcccgacgctgagaagagaatgatggatagttcacccgtccgcacgaccgccgaagcccagcgaccatggcgcgatggactgctgatgccatcaatgagcgaaagtgatcttaccacctccggccggtacagagcccggcgggatagcctaaagaaaagacccgtctccgacctgctgagcgggaagaaaaacatcgttgaggggctgccaccactgggagggatgaagaaaacccgtgtggatgcaaaaaagatcgggccactgaagctcgccgccctgaatggactttccctctccagggtgccactgcctgacgaggggaaggaggtggctacacgtgcaaccaatgatgagcgctgtaagatcctggaacagcgcctggaacaaggtatggtgtttacagaatatgagaggatattgaagaaacgcctggtggacggagagtgcagtacagcccggcttccagaaaatgctgagcgtaatcggttccaggacgtgctcccttacgatgacgtgcgtgtggaacttgtcccaacgaaggaaaacaacaccgggtacatcaatgcaagtcacattaaagtttcagtttccggcattgaatgggactatatcgcaacccaaggcccactgcaaaacacctgccaggacttctggcagatggtctgggagcagggaatagcgatcattgcaatggtcaccgccgaggaggagggtggacgggaaaaatcctttcgatattggccccgcctcgggagccgccataacaccgttacctatgggcggttcaaaatcaccacgcgatttcgtacagacagtgggtgttatgcgaccacagggttaaagatgaaacatcttcttactgggcaagaaagaactgtgtggcacctgcagtacacagattggcccgagcatgggtgccccgaagacttaaaaggttttctgtcatacctagaggagatccagtccgtgcggcggcatacaaactctacttccgacccccagagccccaacccccctctcctagtgcactgtagcgccggggtcggacgcactggggtcgttattctctctgagattatgattgcttgtttggagcacaatgaggtgctagatatccctagagtgctcgatatgctgagacaacagcgaatgatgctggtacagacgctctgtcagtacaccttcgtgtatcgtgttcttattcagtttctgaagtctagccgtctaatttag

SEQ ID NO: 27184 - DNA, 1245 bp, synthetic construct
  source 1..1245: mol_type = other DNA; note = Synthetic coding sequence
atgcagaccttcctgaagggcaagcgggtgggctactggctgagcgaaaaaaaaattaagaagctgaacttccaggcattcgctgaactttgtcgtaaacgggggatggaggtcgtgcagcttaacctgtctcggcctattgaggaacaaggtccactcgacgtgattattcataagctaaccgacgtaattcttgaggcagatcaaaacgattcacaatctctggaacttgtccacagatttcaggagtatatagatgcacacccagaaactatcgtcctcgatccactgcccgcgataagaacgctcctggaccggagcaaatcttatgagctgataaggaagatcgaggcatacatggaggatgaccgcatctgcagtcccccttttatggaacttacctcactttgtggtgacgacactatgcgtctcttggaaaagaacggccttacgtttccattcatctgcaagacccgcgtggctcatgggaccaactcccacgagatggcaatcgtgtttaatcaggaaggattaaatgcaatacagcccccatgtgtggtacagaacttcattaatcacaatgccgtactatacaaggttttcgttgttggcgagagctatactgttgttcaacgcccctcgctgaaaaactttagcgctggaaccagtgatagagagtctatattctttaactctcataatgtgtctaagcctgagtcgagcagtgtgttaaccgagttggacaagatcgagggggtgtttgagaggcctagcgacgaggttatccgtgaattaagtagggcccttagacaggcccttggcgtaagcttgtttggcattgatattataatcaacaaccagaccggacagcacgcagtaattgatataaacgcattccccggctatgaaggcgtcagcgagttcttcactgacctgctgaaccatatcgcaaccgtcttgcaagggcagtctacagccatggccgccactggagacgtggcactgctgcgccattctaaattgctagcagagcccgccggcggactggtgggggaaagaacctgttctgcctccccgggctgctgtggaagcatgatgggccaggacgcaccctggaaagccgaggcagacgccggaggcacggcgaaactaccccatcagcgactcggatgcaacgctggcgtcagtcctagcttccaacagcactgtgtggccagcctggccacaaaagcctcttcgcaatag

SEQ ID NO: 27185 - DNA, 2256 bp, synthetic construct
  source 1..2256: mol_type = other DNA; note = Synthetic coding sequence
atgagcgaggaggagctgaccaaggccatggagggcctgggcatggacgaaggagatggtgagggtaacatcctcccaatcatgcagtccataatgcaaaatctattaagtaaagatgtgttataccccagcttaaaggaaataactgagaaatacccagagtggcttcagtcacaccgggaatccctcccaccagagcagtttgaaaaataccaagagcagcatagcgttatgtgtaaaatatgcgagcaatttgaggcagagacccctaccgactccgagacgacacagaaagcaaggttcgagatggtccttgacctaatgcagcagctgcaagatcttggacaccctcctaaagaattagcaggagagatgctcacgtggttgtttttctgcgggagccagtgggtttatgggccgtggctgacttacgtgggttggcttcagcaaaccagtttcaagatgagtagtaagggtagctcaaccgacggacgcaccgatctggcaaatggatccttgtccagctctcctgaagaaatgtcgggggccgaggaaggtcgcgaaacctcttctgggatcgaggttgaagcatcagatttgagtctcagcctgacaggcgacgacggagggccaaatcggacgtctactgaatcacgtggaaccgataccgagagctcaggagaggacaaagactcagattccatggaagatacaggccattattcgattaatgacgagaaccgagtccatgatcgcagcgaagaagaagaagaagaggaggaggaggaagaggaggagcagcctaggagaagagtccaacgtaaacgtgctaatcgggaccaggacagtagtgacgatgagcgagccttagaggattgggtgtcctctgagacctcagcactacctcgcccacgctggcaggcgctgcccgcgctgcgggagcgcgaactgggatcttcagcaaggtttgtatatgaggcttgtggcgcgcgcgtcttcgtccagaggtttaggctgcaacatggactggaaggacacacgggttgcgtcaatactttacacttcaaccagagagggacatggttggcaagcgggtcagatgatctgaaggtcgttgtgtgggactgggtgagaagacagcccgtcttggattttgagtccggacataaaagcaatgtgttccaagctaagttcttaccaaattcaggggattctaccctagcaatgtgcgcccgagacggccaagttcgggtggcagaacttagcgccacgcagtgctgtaagaacactaaacgcgtggctcaacacaaaggtgcctcgcataaactggctttagagcctgattccccgtgtacattcttgagcgctggagaagatgcagttgttttcacaatcgacttgcggcaggacaggcctgccagcaagctagttgtgaccaaggaaaaggaaaaaaaggtcggactttacaccatttatgtgaaccctgccaacactcaccagttcgcggtgggaggacgggatcagttcgtgcgtatctatgaccaaaggaaaatcgacgaaaatgagaacaatggggttctgaaaaagttttgtcctcatcacctagttaacagtgaatctaaagctaacatcacatgcctcgtctattcccatgacgggactgagctgcttgccagctacaacgatgaggacatctatctgttcaattcatcccacagcgacggcgcgcaatacgtgaagaggtacaaaggccaccggaataacgctacagtcaagggggtgaatttctacgggcctaaatccgaattcgtggtgtctggttcagactgtggacacatatttttatgggagaagagtagctgtcaaattatccagtttatggagggggacaagggtggcgtagtgaattgtctggagccacatccacacttgcctgttctcgccactagcggcctggaccatgatgttaaaatctgggccccaaccgctgaggcatccacagagctcactgggctgaaggatgtcattaagaagaataagagagaaagggatgaggactcactccatcagactgatctgtttgacagtcacatgctttggttccttatgcaccatctgcgacagcgccgccaccaccgccggtggcgtgagcccggcgtgggagccacagacgcagattccgatgagtcaccctccagttccgacacctcagatgaggaagagggccccgaccgggtgcagtgcatgccgagttag

SEQ ID NO: 27186 - DNA, 1056 bp, synthetic construct
  source 1..1056: mol_type = other DNA; note = Synthetic coding sequence
atgaccctgcggctgctggaggactggtgccggggcatggacatgaacccgcggaaagccttgttaatagctggaatcagccaaagctgcagtgtggcagagatcgaggaagccctgcaggctggactcgcccctctgggcgaatacaggctgctgggcaggatgttccgaagggacgaaaataggaaagtggctttggtggggttgacagctgagacgagtcatgctctggtgccaaaagagatccccggaaaaggaggcatatggagagtgatttttaagcctcccgatcccgataatacctttttgtcacgccttaacgagtttttagccggagaggggatgacagtaggggaactctctagagcattgggccacgagaacgggtccctcgatccagaacagggtatgattccagaaatgtgggctcccatgctggcccaggctctcgaagcactgcagcccgccctgcagtgcctgaaatacaaaaagttaagggtattttcaggccgagaaagcccagaacccggagaagaggagtttggtcgatggatgttccataccacccagatgatcaaagcctggcaagtccccgatgtggagaaacgaaggaggttgctagaaagtttaaggggacctgccctggatgttattagggtgctaaagatcaacaacccactgatcacggtggatgagtgtctgcaggcgcttgaagaggtgtttggcgttaccgacaacccgcgcgaactacaggtgaaatatctcacaacataccagaaggatgaagaaaagctctctgcgtacgtcctgaggctggagccactgctgcagaagctcgtgcagcgcggggctatcgagagagacgcggtaaaccaagcgcgattggaccaggtcatcgcaggagccgttcacaagaccatcagacgggagctcaatctccctgaggacggccccgctcccggattcctccagcttctagtgttgattaaggactatgaagctgccgaggaagaggaagctctgctccaagctatcctcgaaggcaactttacgtag

SEQ ID NO: 27187 - DNA, 2394 bp, synthetic construct
  source 1..2394: mol_type = other DNA; note = Synthetic coding sequence
atggccgtgcagggcagccagcggcggctgctgggcagcctgaacagcaccccaacagcaattccgcagctgggtctcgctgccaaccagactggtgcccggtgcctggaagttagtatctccgatggactcttcctctcattgggtctggtgagtctcgtggagaacgccctggtggtggctaccattgctaaaaaccgtaatctgcacagcccaatgtactgcttcatttgctgtctggcactttccgacttgctggttagcggctcgaacgtgctggaaacagcagtcatcctactgctggaggctggggccctcgtggcgcgcgccgcagtgctgcagcagctggataacgtcattgacgtcataacctgttccagtatgttatcttcactttgctttctgggtgctatcgctgtcgatcgctacatcagcatattctatgccttgcgctaccattcaatagtgacgctgcctcgcgcccgaagagcagtcgccgcaatctgggtagcttctgttgtgttttcaaccctgtttattgcttactacgatcacgtggcggttctgttatgtctggtcgtgttttttctggcgatgctggttcttatggccgtgctgtacgtgcatatgttagccagggcctgccaacacgctcagggaatcgcgcgactccacaagagacaaaggcctgtgcaccaggggttcggactgaagggtgccgtcactctgaccattcttctcggcatttttttcctgtgctggggccccttctttctgcatttgacactcatagttctatgccctgaacatcccacatgtgggtgcatctttaagaactttaatctctttctggcgttgataatctgcaatgcaatcattgaccccttgatctacgccttccactcccaagagctccggcgcactcttaaagaggtgctgacttgtagctgcagtcaggatagggccctcgtctcctgggatgtgaagagcttgggtggaagcgtttgccaggagttgttgccacaacagccccaggagaaaggactgtgtgaccaaaaggcatcgagcaccgccctgcaacgccttttacagaaggaattttgggaggttataagcgatgagcatggcatcgacccctctggcaattacgttggggacagcgatctccagctagagcggatctctgtgtattacaacgaggccagcagccataagtatgtcccccgtgcaatcctggtggacctggagcctggaaccatggatagcgtgaggagcggtgctttcggccacctgttcagaccagataatttcatctttggacaaagcggtgccggaaacaattgggctaagggacattacacagaaggggcagagttggttgattcggtgcttgatgtggtaagaaaagagtgcgaaaactgtgactgtctgcaaggttttcagctgacacatagcctgggaggaggaactggaagcggaatggggacccttctgatctcaaaggtgcgagaagaatacccagacaggatcatgaacactttcagtgtggtccccagcccaaaggtctctgacaccgttgtggagccttataatgccacactctctatccaccagctggtcgagaatacagacgagacctattgcattgataatgaggcactatacgacatctgttttcgcactttgaaactggcaacaccgacctacggtgatctcaaccacttggtgagtgctacgatgagcggcgtgacaacttctttacggtttcccggacaactaaacgctgacctgaggaagcttgccgttaacatggttccatttccccggctgcacttttttatgcccggattcgcccccctgacagctcgcggctcacagcaatacagggctcttacagtgccggagctgacacagcaaatgttcgacgcaaagaacatgatggccgcctgtgacccgcgtcacggtaggtaccttactgtggccaccgtatttaggggtagaatgagcatgaaagaggtggatgaacaaatgctggctatccagtcaaaaaattcctcttacttcgtcgagtggatccccaacaacgtcaaggtagccgtgtgtgacattcccccgagaggtctcaaaatgtcatctacattcataggcaattcaactgctatccaggagttatttaagcggatttccgagcaatttactgctatgtttcgcagaaaggcgttccttcactggtataccggagaagggatggacgagatggaattcaccgaggccgagtccaacatgaacgacctcgtgagcgagtatcagcagtaccaagatgccacagccgaagaggaaggtgaaatgtatgaggatgatgaagaagagtcagaagcacaggggcccaagtag

SEQ ID NO: 27188 - DNA, 99 bp, synthetic construct
  source 1..99: mol_type = other DNA; note = Synthetic coding sequence
atggccgagagcagcagcgagagcgaccacttccggtgccgggaccgactgtcaccctgggccgcaaggagtacgcataggggcaccaggagtctgtag

SEQ ID NO: 27189 - DNA, 453 bp, synthetic construct
  source 1..453: mol_type = other DNA; note = Synthetic coding sequence
atgaccgacacccggcggcgggtgaaggtgtacaccctgaacgaggacagacagtgggatgatcgggggactggccacgtgtcgagcggctacgtggagcgactcaagggcatgtcactgctcgtccgcgctgagtcagatgggtctctgctgctggagtctaaaatcaatcccaacaccgcttaccagaagcaacaggacacactgatcgtctggagtgaggctgagaattacgatctagcgctgagcttccaggaaaaagccggctgcgatgaaatctgggagaagatctgccaggttcagggcaaagacccatcagtggacattacgcaggacctggtcgatgaatccgaggaggaacggtttgacgatatgtcatcaccgggcctcgaactgccttcatgcgagctcagccgtttggaggagatcgctgagctcgtggcaagcagctag

SEQ ID NO: 27190 - DNA, 504 bp, synthetic construct
  source 1..504: mol_type = other DNA; note = Synthetic coding sequence
atggactggaaggaggtgctgcggcggcggctggccacccccaacacttgcccgaataagaaaaaaagtgagcaggaactcaaagacgaggagatggatctgttcacaaagtactactctgagtggaaggggggtcggaagaacacaaacgaattttataaaacgatcccaagattctactataggcttccagctgaggacgaggtattgctccagaagctgagggaagaatcacgtgcggtttttctgcaaaggaagtcccgagagctcctagacaatgaagagctgcaaaacctatggttcctgctagataagcaccaaacacccccaatgattggagaggaggctatgattaattacgaaaatttccttaaagtgggcgagaaagccggcgccaagtgtaagcaattttttactgccaaagtgttcgcaaagctccttcataccgattcatatggccgaatttcaattatgcagttcttcaactacgtgatgcgaaaatag

SEQ ID NO: 27191 - DNA, 507 bp, synthetic construct
  source 1..507: mol_type = other DNA; note = Synthetic coding sequence
atgcagaccttcctgaagggcaagcgggtgggctactggctgagcgagaagaagatcaagaagcttaatttccaggccttcgcagaactgtgcagaaaacgtggcatggaagtggtacagcttaatctcagtcggcccatcgaggagcagggacccctcgacgttattatccacaaactgactgacgtcatccttgaggcagaccagaatgattcccagtcacttgagctggttcatcgctttcaggaatatattgatgcacacccagaaactatagtgttggatcctctccctgctatcaggaccctgctggaccggtccaagtcctacgagctgattaggaaaattgaagcctatatggaggatgataggatctgtagtccaccctttatggagcttacatccctgtgtggcgatgatacgatgcgcctgctggagaagaatgggcttaccttccccttcatttgtaaaacccgggtggctcatggtaccaactctcacgagtag

SEQ ID NO: 27192 - DNA, 822 bp, synthetic construct
  source 1..822: mol_type = other DNA; note = Synthetic coding sequence
atgcccggcctgagctgccggttctaccagcacaagttccccgaggtggaggacgttgtgatggtgaatgtgcggtcaattgcagagatgggcgcatatgtgtcgctcctggaatataacaacatagaggggatgattcttttgtcagagttaagtcggaggcggatacgaagcatcaacaaacttatcaggatcgggaggaatgaatgtgtggtagtgatccgagtagacaaagagaaaggttacatcgatctctctaaacgccgcgtaagcccggaggaggctattaagtgcgaagataagtttactaagagtaaaacagtctacagcattttacggcatgtggctgaggtgctggagtacaccaaggacgaacagctggagtcccttttccagaggacggcatgggtatttgatgacaaatataaaaggccagggtacggggcgtatgatgcctttaaacacgcagtgtccgacccgtctatcctggactctctcgatttaaatgaggacgagcgggaagtcctcattaataacattaaccgcagactcacacctcaggcagtcaaaatccgggcagatattgaagtagcatgctacgggtacgaaggcatagacgcagtgaaggaggctctgcgcgccgggctcaattgtagcacagaaaacatgcccatcaagatcaatcttatcgccccacctcgatacgtgatgactactactacactggaaaggacagaaggcttgtcagttctctcccaggccatggctgtgataaaggagaagatcgaggagaagagaggagtgtttaacgtgcagatgtag

SEQ ID NO: 27193 - DNA, 2757 bp, synthetic construct
  source 1..2757: mol_type = other DNA; note = Synthetic coding sequence
tgacggaccaacagccggttcgtgaaggtggtgctgatgagcgccactatttcatgtaaggagtttgcagactacttcgcggttcctgtccagaacaagatgaacccagcttacatttttgaggtggaggggaaacctcactcagttgaggagtactatttgaatgatctcgaacatatccaccattctaagctgtcaccgcacctgcttgaggaaccggtcataacaaaggatatctatgaggtggcagtgagcctgattcagatgtttgatgacttggacatgaaggagtcagggaacaaagcatggtccggggcccagtttgttctggaacggtcctctgtgcttgtcttcttgcctggcctcggagaaattaattacatgcatgaactgctgacttcactcgtgcacaaacggctacaggtgtatcccctccacagctccgtggccctggaggaacagaataatgtgtttctctctcccgtgcctgggtacaggaaaatcatcctgtctacaaacatcgcagaatcctctgtgacagtgccagatgtgaaatatgttatcgacttttgcttgactcgcacgctcgtctgtgatgaagatacaaattatcagtcactgaggctgtcatgggcgtccaagacttcttgcaatcaacggaagggtcgagccgggcgagtctcccggggatactgttacaggcttgttcacaaagatttctgggataactccatccctgatcacgtggtccccgaaatgttacgttgccctctcggcagcaccatcctcaaggtaaaactcctggatatgggggaaccgcgtgctctgctagctacagctctgagtccacctgggctctctgacatcgaacggactatattgcttcttaaagaagtgggtgcattggctgtttccggccagcgggaagacgagaatccacacgatggcgaactgacttttcttggacgcgtgcttgctcagctacctgtgaatcaacagctcggcaagctgatagtcttaggccacgtcttcggatgcttggacgaatgtctcattatcgcggccgcgctcagtttgaagaatttttttgcgatgccctttaggcagcacctggacggttatagaaacaaggtgaacttctccggctcatcaaaatccgattgcatcgccctggtagaggcctttaagacttggaaggcttgcaggcagaccggcgaactccgttatcccaaagatgaactcaattggggcagactgaactatatacaaataaagagaatacgggaagtcgccgagctatacgaggaactgaaaactaggatttcccagttcaacatgcacgtggacagtcggagacctgtgatggaccaagagtacatctacaagcagcgttttatcttacaggtcgttctggccggtgcattctatcctaactacttcacctttggccagcccgacgaagaaatggctgtccgggagctcgccggaaaggacccgaagaccactgtagtcttgaagcatatccctccatacggattcctgtactataagcagctgcagtctctcttccgtcagtgcggtcaggtgaaaagtatcgtctttgacggtgccaaggcctttgtggaattctctcgcaaccccaccgaaaggttcaagacgctgcccgcggtatatatggccataaaaatgtcccagctgaaagtttccctagaactcagtgttcactcagctgaggagatcgaagggaaggttcaaggcatgaatgtgagtaaacttcgcaacacacgcgtcaacgtggacttccaaaagcagaccgtcgaccctatgcaggttagcttcaacaccagtgaccgaagccagactgtgactgatctgcttctgaccattgacgtcaccgaggtggtcgaggtcggacatttctgggggtaccgaatagacgaaaacaactcagagattctcaaaaaactgacggctgaaatcaaccagttaacgctggtgcccctgcctacccatccgcatcctgatctggtgtgtctggcccccttcgctgactttgacaagcagagatatttcagagcccaggtcctttatgtgagcggaaacagcgccgaggtgttttttgtggattatgggaacaaatcccatgtggacctgcaccttctgatggaaattccatgtcaatttttggagctgcctttccaggccttggagtttaaaatatgtaagatgaggcccagcgccaagtccctggtatgcggaaagcactggagtgacggggcgtctcagtggttcgcttccctagtcagtggatgtacactgttagtgaaggtctttagtgtggtccactccgttctgcacgtggacgtgtaccagtacagcggcgtgcaggatgcaatcaacattagggatgtattgattcagcaaggctacgcggaattgaccgaggaaagctatgaaagcaaagtcaatattctaagagccgccataaataagctcgtctgtgacgggccaaacggatgtaaatgtctgggcccggaacgcgtggctcagttgcaagacatcgcacgccaaaagctgctggggctgttctgccagagcaaaccaagagaaaagatcgtccctaaatggcatgagaagccatacgagtggaatcaggttgatcctaagctagtcatggagcaggccgacagggagtcatcgcggggaaagaatacctttctataccagttacacaaattagtagtcttggggacgtag

SEQ ID NO: 27194 - DNA, 507 bp, synthetic construct
  source 1..507: mol_type = other DNA; note = Synthetic coding sequence
atggagaagctgagcgccctgcaggagcagaagggcgagctgcggaaacgcctaagttatacaacgcacaaattggaaaagctagaaaccgagttcgactctacacgccattacctggaaatcgagctcagacgggcgcaggaagagctggagaaagtgactgagaagttaagacgtatccaatcaaattacatggcactacaacgaataaatcaggagctagaggataaactgtatcgaatgggccaacattatgaagaagaaaagcgcgccctgtcccatgagattgtagctctcaactcacacctgctcgaagctaaggttactatagacaagctgtcagaggataacgagctgtatcgtaaagattgcaacttggccgcgcagctgctgcagtgtagccagacatatggaagagtacacaaggttagtgaattaccctccgatttccaggagagggtcagcctgcatatggagaaacacggctgctccttgcccagcccctag

SEQ ID NO: 27195 - DNA, 636 bp, synthetic construct
  source 1..636: mol_type = other DNA; note = Synthetic coding sequence
atggacatgggcaaccagcaccccagcatcagccggctgcaggagatccagaaggaggtgaaaagcgtcgagcagcaggtgattggtttcagcggcctttcagacgataaaaactataagaagctggaaagaatacttacgaaacagctatttgaaattgatagtgtcgacacagagggaaagggagatatccagcaggccaggaaacgcgctgctcaggagaccgaaaggctcttaaaggaactggagcagaatgccaatcatcctcacaggattgaaatccagaatatctttgaggaggctcagagcctggtacgggaaaaaatagttcctttttacaacggagggaattgcgtcactgacgagttcgaggaaggcatccaggacatcatattaaggcttacgcacgtgaagacaggcggcaagattagcctacgcaaggccaggtaccacaccctgacaaaaatctgcgcagttcaagagattattgaggattgcatgaagaaacagccgagcctgccattgtccgaagatgcccatccctccgtcgcaaagataaattttgtgatgtgtgaggtaaacaaggctcgcggagtgctcattgccctgttgatgggagtgaacaataatgaatag

SEQ ID NO: 27196 - DNA, 2985 bp, synthetic construct
  source 1..2985: mol_type = other DNA; note = Synthetic coding sequence
atgagccagtggacccccgagtacaacgagctgtacaccctgaaggtggacatgaagagcgaaatcccatccgatgccccaaaaacccaagaatcgcttaagggaatcctgttgcaccccgagcccatcggcgccgcaaaatcatttccggctggcgttgaaatgattaatagcaaggtaggaaacgagttcagccacctttgcgacgactcacaaaaacaggagaaagagatgaacggaaatcagcaagagcaggagaaaagtctcgtagtcagaaagaaaaggaagtctcaacaggcaggcccgtcttatgttcagaactgcgtgaaggaaaaccaaggcattctggggttgagacagcatctcgggacaccctccgatgaggacaatgactctagtttctcagactgcctgtcgtcacccagctcatccctccacttcggagatagcgatacggttacgtctgatgaagataaggaagtgtccgtacggcactctcagaccatcctgaacgccaagagcagaagccactctgccagaagccacaagtggcccaggactgaaactgaaagcgtttccggtttactgatgaagcgtccgtgcctgcatgggtcctccctgcggagactgccctgtaggaagagattcgtgaagaacaacagcagtcaacggacacaaaaacagaaagagcgtatcttaatgcagcgcaagaaacgcgaagtcttggctcgccgcaaatatgcactgcttccatcttcatcatcatctagcgaaaacgaccttagcagcgagtcttcgagctcatcaagtaccgaaggtgaagaagatctgttcgtatccgcttccgaaaaccaccagaacaacccagctgtaccttcaggctccattgacgaggacgtggtagtgatcgaggcatcttctacaccccaggtgacagcgaatgaggagattaatgtgacctccacggactcagaggttgaaatcgttacagtgggcgagtcttatcggtcgcggagcaccctggggcacagtagatcacactggtctcagggctccagtagccatgcaagccgtcctcaggaacctcgaaaccgctctcgaatttctaccgtcatccagcccttacgacagaatgcagcagaggtggtggaccttacagtcgacgaggatgaaccaacagttgtgcctaccacttccgctaggatggaatcccaggccacctctgcatctattaacaattccaacccttctacaagcgaacaggcttctgacaccgcaagcgccgtaacctcttcgcaaccaagcacagtttcggagacctccgctactctgacgtctaattccactacagggacaagcatcggggacgactcacgacgaaccacttcctccgccgttacggagaccgggcccccagcaatgcccaggttgccttcttgttgcccacaacacagtccatgtggagggtcttcacagaaccaccacgcccttggccatccccacacaagttgtttccagcagcacggacaccatttccagcaccaccatcaccatcaccatacgcctcaccccgccgttcctgtgagcccttcattttccgatccggcctgtccagtggagagaccacctcaggttcaggcaccctgcggcgcaaacagctccagcgggacttcataccatgaacagcaggctttaccggtagatctcagcaatagcgggattcggtctcacggttccgggagttttcacggcgctagcgcctttgacccatgttgcccagtgtcaagcagtcgggctgctatctttggacaccaggctgcagctgctgccccaagtcagcctctatcctcaatcgatggatatggaagtagcatggtggctcaacctcagccccagccacctccccagcccagcctgtctagttgtcggcattacatgccaccaccatacgcttctctcacccgcccactccaccatcaggcctctgcctgtccacactcccatggaaatccaccacctcaaacacagcccccccctcaggtggactacgttattcctcatcctgtgcacgcatttcactcccagatctcgagccacgcaacctcacatccagtggccccacctccccccacccatctggcttctacagcggccccaattccacagcacctgccccccactcatcaacctatttcccatcacatccctgccactgccccacccgcacagagattgcacccccacgaagtcatgcagcggatggaagtgcagcggcggcgtatgatgcagcatcccacaagggcccatgagagacctcctccacacccacaccgcatgcatcccaactatggacacggacaccacattcatgtgcctcagaccatgtcatcccacccacgacaggcccctgaaaggtcggcttgggagttgggtatcgaagctggtgtgacggctgcaacctacacacccggggccctgcacccccatttggctcactatcatgctccccctagactgcaccacctgcagctgggagctctgccactgatggtgcccgacatggctggctacccccatatccggtatatcagctccggcctggatgggacatccttcaggggtccctttcgtggcaactttgaggagctgatccacctggaggaaaggttagggaatgtaaacagaggggcttcgcagggtactatcgaacgatgcacgtacccacacaaatataagaaagtcactaccgactggttttcccagcgtaaactccactgcaagcaagacggtgaggaagggactgaagaggacacagaggaaaagtgcacaatctgcctgagtatcctcgaggagggcgaggacgtccgccgcttaccttgtatgcacctattccaccaggtttgcgtggatcagtggctcattaccaacaaaaaatgcccgatctgccgcgtcgacatcgaggcacagctgccttctgagtcatag

SEQ ID NO: 27197 - DNA, 1158 bp, synthetic construct
  source 1..1158: mol_type = other DNA; note = Synthetic coding sequence
atggccctgccccacgacagcaacgagaccagctacctgctgccccctaataacgaggactggggacgtcagaccatacccgacttcgtgtacgggcagaaagacctgatggcagagggaattcagtggcctagaaacgcacctggcatccccgatgctctgcctcaaagcccgttcgatgcggccctgtgttcagcctggaagcagcgcgtcgagctggggctcttccggtataggttgagagagctccagacccagatattgccaggggcggttgggttcgtcgcgcagctgaatgttgaacgcggagtgcagaggcggcctccccagactatcaaatccgtccgccaagcctttgaccctgtgcagtttaacttcaacaagatccgaccgggtgaggtattgttccgtttgcatagagaacccgacctgccagggacattgctgcaggaagatatcctggttgtgattaatgttagtcccctcgaatggggccatgtgctgctggtccctgaacccgctcgtcaattgccccagcggctgttacccggagctctcagggcaggtatagaagccgttctgttatcccttcatcccggatttagagtgggtttcaattctctcggtggacttgcttctgtgaaccacttgcacttacatggatattacttggcccataggttgcccgttgaacaagctccgtctgagccactagaccctggggggcacctgcacttacttcaagacctacctgcgcccggttttctattctacacgcgtgggccaggaccagatctggagagcctaatttcccgggtgtgccgagctactgattacctgacagaccatgagatcgcgcataacctgttcgtgacacgtggcgccccccctggcaaaacctccccttcctccgcacttaccggtgttagggtcatcctttgggctagaaaaagttccttcggtattaaggacggggaggctttcaacgtggccctctgcgagctcgccggtcatctacctgtgaagaccagccaggattttagctctctgacagaagcagccgccgtggccctgatccaggattgcaggctgcctccttcacaggccgaagatgttcaagctgccttggtggctctgatgtctcaggaggagcagtag

SEQ ID NO: 27198 - DNA, 7464 bp, synthetic construct
  source 1..7464: mol_type = other DNA; note = Synthetic coding sequence
tgagaggaggaggaggacgacgacgacgaggaggaggaggtgagcgaggtggagagttttattcttgaccaagatgacctggagaaccctatgctggagacggcctctaaactgctgctttctggcacagccgacggggcggatttgagaacagtcgatccagagacccaggccagactagaagcactgctcgaagccgcagggatcggaaagctttcaacagctgatggtaaggctttcgcagaccccgaggtgctcaggcggttaacttcttctgtgagctgtgcactggatgaggccgctgcagcactgacccggatgagggctgaatcaacagccaacgctggccagagcgataataggtccctggccgaggcatgtagtgagggggatgtgaacgctgtcagaaagctgctaatcgaaggtcgtagtgtgaatgagcacaccgaggaaggcgaatccctgctctgccttgcatgctctgccgggtattacgagctcgcgcaggtattactagcaatgcacgccaatgttgaagaccggggtatcaagggcgacatcaccccattaatggccgcagcaaatggcgggcatgtcaagatcgtgaagttactgttggctcacaaggccgatgtcaatgcccagagcagcaccggtaacaccgcacttacctatgcctgcgccggaggctacgtggacgtggttaaggtgcttctggaatcgggcgcctctatcgaggatcataacgaaaacggccacacccctcttatggaggctgggagtgctggccacgtcgaggttgcccggctgctgctggaaaatggcgccgggatcaacacccactcaaacgagtttaaggaaagcgctttgactctagcatgttacaagggacatctcgaaatggtgaggtttttgctcgaagccggcgccgaccaggaacataagacagatgagatgcacaccgcccttatggaggcctgcatggatggccacgtagaggttgcccgcctgctccttgactcaggcgcccaagtgaacatgcctgctgactcgttcgaaagtccactgacgcttgctgcttgcggaggacacgtggaacttgccgcactgttgatcgagagaggtgcctctctcgaagaggtgaatgacgaagggtataccccacttatggaagcggcccgggaaggccacgaggaaatggttgccctcctgctggggcaaggcgcaaacattaacgcccaaactgaagagacacaggaaaccgctcttaccttagcatgctgtggggggttcctggaggtggccgatttcctaataaaagccggagctgatattgagctagggtgtagcacacctctaatggaagctgcgcaggaaggtcacctggaactggtcaagtatctgctggctgcaggcgccaacgtgcatgccactaccgctactggcgacactgccctcacctacgcctgcgagaacgggcacaccgacgtcgccgacgtcctccttcaggccggagccgatctggagcatgaaagcgaaggggggcgaacaccactcatgaaggccgccagagccgggcatgtgtgcaccgtgcagttcctgataagcaaaggcgccaatgtcaataggactacagctaataatgaccacactgtcctatcgttggcttgcgccgggggccatctagctgtggtcgagctgctgctggcacacggggcagaccctactcacagattaaaggacggctccacaatgctcattgaggccgctaaaggagggcacacttcagtcgtttgttacctgctggactatccaaacaatctcctatccgcaccacctcctgacgtcacccaactgacccctccttcgcatgatctcaacagagcacctcgagtacccgtgcaggccctccccatggtggtgccgcctcaagaaccagacaaacctcccgcgaacgttgcaacaaccctacccatccgaaataaggccgcaagtaaacaaaagagcagctcacacttaccagctaatagccaagatgtacagggatatatcacgaatcaatcccccgaaagcatagtggaggaggcacaaggcaagctgaccgaactggagcagaggataaaggaggcaattgaaaaaaatgcccagctgcagtcacttgaactagcccatgccgaccaattgactaaggaaaaaatcgaagagctcaacaaaacaagggaagaacaaattcagaagaagcaaaagattcttgaagaactgcagaaagttgagcgtgagctccagctgaaaacccagcaacagttgaaaaaacagtatttggaggtgaaggcccagcgcattcaattgcaacaacagcagcagcagtcctgccagcatttaggacttctgacacccgtgggcgtgggagaacagctgagtgagggcgactatgctagactgcagcaagtagaccccgtgctgctaaaagatgagccccagcagacagcggcccagatggggtttgcgcctattcaacctctcgccatgccccaagccttgccgttggccgcaggaccccttccgcctggctccattgctaatcttacagagctacaaggggttatcgtggggcagccggtcctgggacaggctcaacttgctgggctgggacagggcattttaactgaaacacagcagggactgatggtggctagcccagcccagactttgaatgataccctggatgatattatggctgtatcaggaagggccagcgccatgtcaaacacccccacccattctatcgcagccagcatttcccagcctcagacaccgaccccatctccaatcataagtccttctgccatgctacccatctacccggccatcgatatagacgctcaaacagagagcaaccacgatacagctcttacactggcttgcgctggtggacacgaagagctggttcagaccctcttggaacgaggcgcgtcgattgagcatcgcgataaaaaggggttcacaccacttatcctggccgctacggccggacatgtaggagtcgtggaaatattacttgataacggggcagatatcgaggcgcagagcgaacgtacgaaagatacacccctcagcctggcatgctctggggggcgacaggaggtggtcgagctcctacttgctcgaggagcgaataaggaacataggaatgtcagtgattacaccccactttcactcgccgcctcaggaggatatgtaaacattattaaaatactccttaatgccggcgccgaaatcaattctcggaccggaagcaaattgggtattagtcccctcatgctagctgctatgaacggccataccgcagcggtgaagcttcttctcgatatgggcagcgacatcaatgctcagattgagacaaaccgcaatactgcactcaccctcgcatgttttcagggaagaacagaggttgtgtcactcctgttggacaggaaagcgaacgtggaacatagagccaagactggcctgacccctttgatggaggccgcgagcggagggtacgcggaggtgggccgagtcctgctggataaaggcgcggatgtgaatgcgcctcctgtcccctctagcagagatacagccctcacaatagcagcagacaagggccactataaattttgcgaactcctcatcggaaggggagcgcatattgacgtgcgcaacaaaaaaggaaacacacccctttggctggctgccaacgggggccatctcgatgtggtgcagttactggtacaagcgggcgcagacgtagatgcagccgacaacaggaaaatcacaccactcatggcagccttcaggaaaggccacgttaaagttgtccgctatctagtgaaagaggtcaatcagttcccatcagactctgaatgcatgcggtatatcgctaccattaccgataaggaaatgcttaagaaatgtcacctttgtatggaatccatcgtacaggccaaagatagacaggctgcggaggcaaacaaaaatgcttctatcttgctggaggaattggatcttgaaaagctgagagaagaatcccgcagactggctctggccgccaagcgggagaagcggaaagaaaagagacgcaaaaaaaaagaagagcagagaagaaaactggaggaaatcgaagcgaaaaataaggaaaatttcgaactgcaggcagctcaggaaaaagagaagctcaaggtggaagacgaacccgaggtgctcacagaaccaccaagtgctactaccaccaccactataggcatatccgccacctggaccacactggctgggtcacacggaaagcgcaataacaccattacaaccactagttccaagaggaagaaccggaagaacaaaatcaccccagagaacgttcagattatattcgatgacccacttccaatctcctatagccagcccgaaaaggttaacggggagtccaagagttcatcgaccagtgagtccggggattccgataatatgcggatctccagctgttccgatgagtcgtcgaactctaacagtagccgcaaatctgataatcattcccctgccgtggtaacgactacagtgagttcgaaaaaacaacccagcgtcctagtgactttccctaaggaggagcggaagtctgtgtctggaaaggcctcaatcaagctgtctgagactatttccgaaggaacttcaaacagcctttctacatgcacaaagagcggaccaagtccgttgagcagccccaacggaaaactcactgtcgcatcacccaagaggggccagaaaagggaggagggatggaaagaagtggtgaggcggtctaaaaaagtgtctgtgccatccaccgtaatcagtagagtgattggtagaggcggctgcaacattaacgctatcagggaatttacaggcgcccacatcgacatagataagcagaaagataagactggtgaccggatcattaccatcaggggtgggactgaaagtaccagacaagcaacgcagctcatcaacgccctgattaaggatccagataaggagatcgacgagctcatccctaaaaaccgtcttaagtcttcctctgcgaattccaaaattggcagttctgccccaactactacagctgctaataccagcctgatggggatcaagatgacaaccgtggccctctcttcaacatcccagaccgccactgctctgacggtccctgctatttcaagcgcgtcgactcataaaacgattaagaatcccgtgaacaacgtgcgcccaggtttccccgtttcccttcctcttgcttatccgccaccacagtttgcacacgcactcctagccgcccagacgttccagcaaatacgacccccaagactacctatgacccattttggtggtacgtttcctccagcgcagtctacatgggggcctttccctgtcaggcccctgagtccagcaagggcgaccaattcccctaaaccacacatggtgccacggcatagcaatcagaatagttccgggtcccaggtgaactccgcggggagtctgacctcgtccccaacaacaaccacatcttccagcgctagcacggtgcccgggacaagcacgaacggcagccccagttcaccaagcgtccgtcgtcagctgttcgtcaccgtggttaagacttcgaacgccactaccactaccgtgaccacaaccgcaagcaataataataccgcccccacaaatgcgacttaccccatgccaactgcaaaggagcattaccccgtgtcatctcctagctctccatcaccacctgcccagcccggcggagtctcccggaactcaccactcgattgcggaagcgcgagcccaaataaagtagccagcagctctgagcaagaggccggcagtccacctgttgtggaaaccactaacacacgaccccccaattcctcttcgtcatctgggtcaagtagcgcacattccaatcagcaacagcctccagggagcgtctcccaggaacccaggcctcctctgcagcaaagccaggttcctcctccggaagtgagaatgaccgtcccacctctcgctacaagttccgctccagtcgctgtaccgtctactgctccggtaacctacccaatgcctcagacccctatgggttgccctcagcccacacctaagatggaaacccctgccattagaccacccccccatggtaccaccgcccctcataagaatagcgccagcgtgcaaaactcctcggtcgctgtcctgtcagtaaatcatatcaagcgacctcacagcgtaccgagcagcgtccagctaccctctactctctccacacagtctgcttgccaaaatagcgtccatccagccaacaaacctattgcacccaacttttccgccccactgcctttcgggcccttcagtaccctcttcgaaaattcacctaccagcgcccacgctttttggggtggatctgtggtgagcagtcagagtacccccgagtcaatgcttagcgggaaatctagttaccttcccaattccgaccccctgcatcagagtgacacaagtaaggcccctggctttcgacctccccttcagcgtcccgctccatcccccagtggcattgtcaatatggactcaccatacgggtccgtgacccctagctctacacacttgggcaactttgcctcgaatatcagcggcgggcagatgtatggtccgggtgcgcctctggggggcgcacccgccgctgcgaattttaataggcagcacttttcacctctttctctgttgactccctgcagctccgccagtaatgacagctcagctcagtcggtttcatcaggtgtacgagccccatctccagcaccttctagtgtgccactgggcagcgagaaacctagtaatgtaagccaggataggaaggtgccagtgccaatcggcacagaaagatctgcccgaatacggcagaccggaacgagcgcgccctctgttatcggcagcaacctgagtacctcagttgggcactcaggcatctggagcttcgagggaatcgggggcaaccaagataaagtcgactggtgtaaccccggtatgggtaatccaatgatccatcgccctatgagcgatcctggtgtgttcagtcagcatcaggctatggaacgtgattctacaggcatagtgactccatccggcacattccaccagcatgtgccggcaggctacatggatttcccaaaagtaggcgggatgcccttttcagtttacggaaacgccatgatccccccagtggctccaatccccgacggcgcaggtggcccgatcttcaacgggcctcacgccgccgatccgtcttggaattccctgataaaaatggtaagtagctctacggaaaacaacgggccccagactgtctggacaggcccttgggcccctcatatgaattccgttcacatgaaccagctcggctag

SEQ ID NO: 27199 - DNA, 33 bp, synthetic construct; identical to SEQ ID NO: 13651
  source 1..33: mol_type = other DNA; note = Synthetic coding sequence

SEQ ID NO: 27200 - DNA, 462 bp, synthetic construct
  source 1..462: mol_type = other DNA; note = Synthetic coding sequence
atggccaccatgatcccccccgtgaagctgaagtggctggagcacctcaattcatcttggattacagaggattctgagagcattgccaccagagagggcgtcgctgtgctttacagcaagttggtgtctaacaaggaggtggtgcctctcccccagcaggtgctttgtctgaaaggccctcagctacctgattttgaacgcgagtctctgtctagcgatgagcaagaccactatttggacgccctgctctctagtcaactagccctcgccaagatggtgtgttcagacagcccctttgctggtgccctgcggaaaagacttctcgttttgcagcgggtgttttacgctctgtccaataaatatcatgacaaggggaaggtgaagcagcagcaacattcccccgagtcttcgtctgggagcgcagacgtgcatagtgttagcgagcgacctaggtcaagctag

SEQ ID NO: 27201 - DNA, 111 bp, synthetic construct
  source 1..111: mol_type = other DNA; note = Synthetic coding sequence
atgctgccccccaagcacctgagcgccaccaagcccaagaagagctgggcaccaaatctttacgagctcgacagtgatctaactaaagagccggacgtgatcattggctag

SEQ ID NO: 27202 - DNA, 315 bp, synthetic construct
  source 1..315: mol_type = other DNA; note = Synthetic coding sequence
atggcccagagcggcggcgaggcccggcccggccccaagaccgccgttcagatcagggtggcaattcaagaggctgaggatgtggacgagctcgaggacgaagaagagggcgccgaaacccggggagcaggggatcctgcccgctatctgagtcctggctggggctccgcttctgaggaggaaccatcccgaggacatagaacggcccagctcccgtggttggaaagccagcaggtgttctctttgaagcctttcctgctgccgacgggaatcgagttgacacccgagaatccctgggggagcagtgtctcctag

SEQ ID NO: 27203 - DNA, 645 bp, synthetic construct
  source 1..645: mol_type = other DNA; note = Synthetic coding sequence
atggccctgccccacgacagcaacgagaccagctacctgctgcccccaaacaacgaagactgggggagacagacgatccccgactttgtttatgggcagaaggacctcatggcagagggaattcagtggccacgcaatgcccccggtattcccgacgcccttccgcagtctcctttcgacgctgcactttgttcagcttggaagcagagagtcgagctgggactgtttcgatacagattgcgggaactccagacccagatccttccaggcgccgttggcttcgttgctcagctgaatgtagaacggggggtgcagagacgaccgccccagaccataaagtctgtacgccaggctttcgacccggtccagttcaacttcaataaaatcagaccgggagaggttctgttcaggctgcatcgcgaacctgatctgcccggaaccctgttacaggaggacatacttgtggtaattaatgtgagccctttggagtgggggcacgtgctgctcgtgcccgagccagctcggcagctaccacagcgtctgctgcctggagctttgcgagccggcatcgaagcagtcttattatctctgcacccaggcttccgggtgggatttaacagtctgggaggtctcgcctcagtgtag

SEQ ID NO: 27204 - DNA, 2988 bp, synthetic construct
  source 1..2988: mol_type = other DNA; note = Synthetic coding sequence
atgagccagtggacccccgagtacaacgagctgtacaccctgaaggtggatatgaagtctgagataccttccgatgctcccaagacccaggaatctcttaaaggcatcctgttacaccctgaaccaataggggccgctaagtcctttccagccggagtagaaatgatcaattccaaagtgggtaacgagttctctcatctttgtgacgactcacagaagcaggagaaggaaatgaatggtaatcagcaagagcaggaaaagagcttagtggtgaggaaaaaaaggaaaagtcagcaggcaggtccttcttatgtacagaactgcgtaaaggagaatcagggaatcctcggtctacgccaacacctcgggacaccgtcggatgaggacaacgactctagcttctcggactgcctatcttcaccatccagtagtctgcactttggggactcagatacagttaccagcgatgaggataaagaggtgagcgtacgtcactcccagactatactgaacgccaagtccaggtcacactctgcgcgctctcacaagtggcccaggactgagactgagtctgtctctggcctgttaatgaagcggccctgtctgcacgggtcatcattgagacgcttgccgtgtaggaagaggtttgtgaaaaacaacagctctcagagaacgcagaagcagaaagagcgaatcctgatgcagcgcaagaagcgagaggtgctggccaggagaaaatacgctctgctgccttctagttcctcctcgagtgagaatgatctgtcttccgagtctagttcgagctcaagcaccgagggtgaagaagatttgttcgtgtctgcatccgaaaaccatcagaataaccctgctgtgccctctggttccatagatgaggacgtggtggttattgaggctagttcaaccccacaggtgaccgctaacgaagaaataaatgtaactagcaccgacagcgaggtggaaattgtaacggtgggcgagtcatataggtccaggtcaaccctaggccattctagaagccactggtctcagggcagctcctctcacgcctcaaggccacaggaaccacgcaatagatcaaggatttcgacagtcatccagccactgagacagaacgctgccgaagtagtggatctgaccgtggacgaggacgagcctacagttgtgccaacaacctccgccaggatggaaagccaggccacatctgcatctatcaataattcaaatcccagcaccagcgaacaggcctcagatactgccagtgccgtgacctcaagccagcccagcaccgtttcagaaacatctgccacgttgaccagcaacagtactaccggcaccagtattggcgacgacagcagaaggaccacctccagtgccgtgacggaaacaggtcctcctgcgatgcctcggctcccctcctgttgtccacaacattctccgtgcggcggttcttcacagaaccaccacgcactaggccacccccacaccagctgtttccagcagcatggacaccactttcagcaccaccaccatcaccaccacactcctcaccctgcagtgccagtctcgccttcgttttcggaccccgcctgtcccgtcgaacggcctccccaggtgcaagccccttgcggtgcaaattcatccagtggaacctcctatcatgagcagcaggccttgcctgtggacctatccaactctggcattcgttcccacggcagcggctcttttcacggagcttctgcattcgacccttgctgcccagtctcaagctctcgagccgccatctttgggcaccaggcggcagctgccgctccatcccaacccctgtcctccatagacggatacgggtcaagcatggtagcccaaccccagcctcagccccctcctcagccgtcgctgagcagctgtaggcattacatgccacctccatatgcttcccttaccaggccacttcaccatcaggcctcggcatgcccccactcccacggcaacccgcctcctcaaacgcaaccaccaccccaagttgattatgtcattccccacccggttcacgccttccactcacagatctcttcacatgcgacaagccatccggtcgccccgcctccgcccactcatcttgcttccaccgcagcccccattcctcagcacctcccccctacgcatcaaccaattagccaccacatcccggccaccgctccccctgcgcagcggcttcatcctcacgaagtaatgcagcggatggaagtgcagagacgaaggatgatgcagcacccaactggtctgttcgtgttttgtgtgagtcggagggcgcatgaacgtcccccgccacacccccatcggatgcaccctaattacggccacgggcaccacatccacgttccacagaccatgtcgtcgcatccccggcaagctcctgagagatcagcatgggaattgggtattgaggctggcgtaaccgcagctacatacaccccaggcgccctccatccgcatctcgcacattatcacgcgcccccccgcctccaccaccttcagttgggcgcattgcccctgatggtcccggatatggccggatacccgcatatccgctacatctcaagtggcctcgacggcacctcctttcgcggccctttccgcggtaatttcgaggagctgatccatctggaggagagacttggtaatgtgaacaggggcgcaagccagggcaccatcgaacgctgtacatatcctcacaagtacaagaagagaaaactccactgtaagcaggatggggaggaaggaacagaggaggacacggaggaaaagtgcacaatttgcctgtcaatcctcgaagagggagaggatgtgagaaggctgccttgcatgcacctcttccaccaagtttgtgtcgaccagtggctaattacaaacaaaaagtgccctatatgtagagttgacatcgaagctcagcttccaagcgaatcatag

SEQ ID NO: 27205 - DNA, 1851 bp, synthetic construct
  source 1..1851: mol_type = other DNA; note = Synthetic coding sequence
atggccggcggccggggcgcccccggccggggccgggacgagccccccgaaagttacccacagcggcaggatcacgagcttcaggccctggaagctatctatggtgccgacttccaggacctgaggcccgacgcatgtggccctgtgaaggaacccccagagatcaacctcgtgttgtatcctcagggtttgactggtgaggaggtgtatgtcaaggtggatctgcgcgtcaaatgtccaccaacttacccagatgtggttcccgaaattgaacttaagaacgccaagggattaagtaacgaatctgtgaatcttctaaaatccagactagaagaattagcgaaaaaacactgtggtgaagtgatgatcttcgaacttgcgtatcatgtgcagagctttctgagcgagcataataaaccccctccaaagtcattccacgaagagatgctagagagacgcgcccaagaggagcagcagcgcctgcttgaggccaagcgcaaggaagaacaagaacaaagggaaatcctccatgaaatccagagaaggaaggaggagattaaggaggagaagaaacgaaaggaaatggctaagcaggaaaggctggaaattgcttccctatctaaccaggatcatacctctaagaaagaccccggcggacatcggacagccgcaatcctgcacgggggcagcccagatttcgttggcaatgggaagcatcgagcgaatagctccgggcgaagcagacgcgaaaggcagtacagcgtgtgcaatagcgaggatagccctggttcatgtgagattctttacttcaatatgggaagccccgatcaacttatggtgcataagggaaagtgtatcggatcagacgagcagctgggaaaactggtgtacaatgccctggagacggcaaccggcgggttcgtcctcctttatgaatgggtgctccagtggcagaagaagatgggccctttcctgaccagtcaggagaaggaaaagatagataagtgtaagaaacagatccagggcacagaaaccgaattcaatagcctggtaaagctcagccatcccaacgttgtccgctatctggctatgaacttaaaagagcaggacgatagcatagtagtggatatacttgttgaacacatatcaggggtgtcactggctgctcatctgtcacattcaggcccaattcctgtacatcaattaagacggtacacagcccagctgttatctggtttggattatctgcactccaattccgtggtgcacaaggtgctgagcgcaagcaatgtcctcgtcgatgcggaggggaccgttaaaatcacagactattccatctctaagcggcttgccgacatctgcaaggaggacgtctttgagcaaactcgagttagattctctgataatgctttgccatataagacaggtaagaagggggacgtttggcgcctggggctattactgctcagcctcagccaaggccaggagtgtggggagtaccctgtaactatcccttctgacctgcctgccgactttcaggacttcctgaagaagtgcgtctgcctagatgataaggagcggtggagtcctcaacagttgctgaaacactcatttatcaacccccagcccaagatgcccctcgtagagcaaagtcccgaagattctgagggtcaggactacgtcgagacggttatacccagtaatcggctcccatccgccgctttcttttctgaaactcagcggcagttctctcggtacttcatcgagttcgaagagctacaactgctcggaaaaggtgcctttggcgcagttatcaaggtgtggtaccgggtgatccccagccccttgtag

SEQ ID NO: 27206 - DNA, 396 bp, synthetic construct
  source 1..396: mol_type = other DNA; note = Synthetic coding sequence
atgagccagtggacccccgagtacaacgagctgtacaccctgaaggtcgacatgaaatccgaaatcccttcagatgctccaaagacccaggaaagtctgaagggaatactgctccaccctgagccgatcggggctgccaagagctttcccgcaggcgtagagatgattaatagcaaggtgggtaatgaattctcgcacctgtgcgatgactcacaaaagcaggagaaagagatgaacggtaatcagcaggaacaggagaaatctctggtagttaggaagaaaagaaaaagccagcaagcaggaccgagctacgtgcagaattgtgtgaaggagaaccagggcatcctgggcttgcgccagcaccttggcaccccctcagacgaggataatgactag

SEQ ID NO: 27207 - DNA, 1863 bp, synthetic construct
  source 1..1863: mol_type = other DNA; note = Synthetic coding sequence
atggcccccgacagcgaccccttccccgagggccccctgctgaagctgctgcctttggacgctagagatcggggtacccagcggtgtcgactgggaccagctgcattgcacgcactcggcgcaagactcggctcggctgtaaagattagtctgcccgacggcgggtcgtgtctgtgtacagcgtggccaagacgggacggagccgatggatttgtccagctggaccccctctgcgcctccccaggggccgccgtgggggccagtcggtcccgaagaagcctttccctgaatcgccttctcttagtgccctgccccccacttaggcgcgtagcagtgtggcccgttttaagggaaagagctggagcacccggcgctagaaatacagccgctgtgctggaggccgcccaggagctcttacgcaatcgccccataagcctcggtcacgtcgtcgtggcacctccaggcgcacccgggctcgttgctgcactgcacatcgttggcggcacaccttccccagaccctgcaggtctggtcactccaagaactagagtgtcactcggtggagaacctccgtccgaagcacagccacagccagaagtgcctcttggaggactctcagaagctgccgactctctgcgggaacttctcagactccctctgcgttatccgagagccttgacggctctgggcttggcggtcccccgaggcgttctgcttgccggccccccgggggtggggaagacccaacttgtgagggctgtcgccagagaggccggggctgagctgttggcagtgagcgctcccgcgctgcaaggatcacgcccaggggagaccgaagaaaacgtgaggcgagtttttcaacgggccagagagctcgccagccgcggacctagccttctatttttggatgaaatggatgctctctgtccccagcggggcagtcgcgccccagaatcacgcgttgtcgcccaagtgctgacactgctggatggtgccagcggggaccgtgaggtggtggtggtgggggctactaatagacctgacgccctcgatccggcacttaggcgacccggacggtttgatcgcgaggtagtcattggcaccccaaccttgaagcagaggaaagagattctccaggtcattacatctaagatgcccatcagctcgcatgtagatctgggcctgcttgcggagatgacagtggggtatgttggcgctgatctgaccgctctgtgcagagaagctgctatgcacgcccttctccattcagaaaagaatcaggataatcctgtcatcgatgaaattgacttcctcgaggctttcaaaaatatacaaccttcatcgttccggtcagtcatcggccttatggatatcaaacctgtggattgggaggaaatcggggggttggaggatgtgaaattaaaactgaagcagtcaattgagtggccgctgaaattcccatgggaattcgtgcgtatgggcttgacacagccaaaaggggtgctgctgtatggacccccgggctgcgcaaaaacaacccttgtgagagcgctggccactagctgccactgttccttcgtttctgtttcaggagcagacctgttttcaccgtttgtgggggattctgagaaagttcttagccagatatttcgccaagcgagggcatccacacccgcaatcctgttcctagacgagatcgactcaatcctgggagcacgaagcgccagcaagaccgggtgcgatgtgcaggaacgcgtcctctctgtcctgctcaatgaactggacggagttggactgaagactatcgaacgaagaggctctaaaagcagtcaacagggtaagtataaggagctcaaaaagtag

SEQ ID NO: 27208 - DNA, 4767 bp, synthetic construct
  source 1..4767: mol_type = other DNA; note = Synthetic coding sequence
atgctgccccccaagcacctgagcgccaccaagcccaagaagagctgggccccgaatctttacgagctggattctgatttgaccaaggaaccggacgtgatcatcggcgaggggcccacggactcagagtttttccatcagcgtttccgcaacctgatctacgtagaattcgtgggcccccgtaaaacattgattaaacttcggaatctgtgcctggattggcttcagcccgagacccgcaccaaagaggagatcattgaactgctggtgctggagcagtatctgacgatcatacccgaaaaattgaagccttgggtgagagctaagaaacccgagaactgtgagaaactggtcactttgctagagaattataaggaaatgtatcaaccagaagatgacaacaacagtgacgttaccagtgatgatgacatgacccgcaacagacgagaatctagtcctcctcactccgtgcattcgttttccgatagggactgggaccggagagggagaagcagagatatggaaccccgcgacaggtggtcccatacaagaaaccctaggagtcggatgccccccagggatctctccctccccgtagtggcaaagacatccttcgagatggacagagaagatgaccgcgattcacgtgcgtacgagtccaggtcgcaggacgctgagtcctatcaaaacgtggtcgacctcgctgaagatagaaaacctcacaataccatccaggataacatggagaactaccggaaactcctgtctttggtgcaactcgcggaagacgacgggcactcccacatgactcagggacacagctcccgttctaaacgcagcgcttatccgagcacctctaggggcctaaaaacaatgccagaggccaagaaatctacgcacagaagaggaatttgcgaagatgagagcagccatggcgtgattatggaaaagtttataaaggacgtgtctaggagctctaaatccggtcgggcccgcgagtcatctgacaggtcccaaaggtttccccggatgtctgacgataattggaaggatatttcccttaacaagagggaatctgtgattcagcagcgagtgtacgaggggaacgcttttcgcgggggctttcggttcaactccacactggtgtctcgcaaaagagtgctagagagaaagaggcggtatcattttgacaccgatggcaaggggagtattcacgatcagaagggttgtcctagaaagaagcccttcgagtgcgggtcggagatgcggaaagccatgagcgtctccagcctaagtagcctgtcaagtccgtctttcactgagtcacagcctattgattttggcgccatgccatacgtttgcgacgaatgtggacgatctttctcagtgataagcgaattcgtcgaacaccagattatgcacacgagagagaacttgtatgagtacggagagtcgttcatacattcagtggccgtgtccgaggtacagaagtcccaagtaggaggcaaacggttcgaatgcaaagactgtggggagacattcaacaagtctgccgcactggccgagcatcggaaaatccatgctcggggttacctcgtggagtgcaagaatcaagagtgtgaggaagcgtttatgccaagccctacattttccgaactgcagaagatatacggcaaggacaagttttacgagtgtagagtctgtaaagagacattcctgcactcatcggctctcattgaacatcaaaaaatccacttcggtgatgacaaggataacgaacgggagcacgagagagagcgggaacgagaacgcggtgaaacatttaggcccagcccagcgctgaacgagttccagaaaatgtatggaaaagagaagatgtatgagtgcaaggtctgtggtgagacattcctgcattcctcatccctgaaggagcaccagaaaattcatacacgaggaaatcccttcgaaaataaagggaaagtgtgtgaggaaacctttattcctggccagagccttaagagaaggcagaagacttacaacaaggagaagctgtgcgactttaccgacggtcgagatgcgttcatgcagtctagcgaactcagtgaacatcagaaaatccatagcaggaaaaacctgttcgaaggcaggggatatgagaagtcagtcatccattccggccctttcacagagtcgcaaaagtcccacaccatcaccaggccactagagtctgacgaggatgagaaagcgttcaccatctccagcaacccctatgaaaaccagaaaatacccaccaaggaaaatgtgtacgaggcaaagagctatgaaaggtccgtgatacattcactggcctcagttgaagcacaaaaaagtcatagcgttgccggaccaagtaaacccaaagtgatggctgaatcgactatccagtcttttgacgcgatcaatcaccagagagtgcgggctggtgggaatacgagcgaaggaagagagtactcccgaagcgttattcactccctcgtggcttcaaaacccccccgcagccataatggaaatgaactagttgagtctaatgagaagggagaaagcagtatatacatcagtgatctgaacgacaagagacagaagatcccagccagggaaaacccctgtgaaggaggttcaaagaaccggaattatgaagattctgtcatccagagcgtttttagggctaaaccgcaaaagagcgttcccggtgagggttctggcgagttcaagaaggacggggaattcagtgtcccttctagcaacgtacgcgaataccagaaggcgcgagctaaaaaaaaatatatcgagcatagatcgaacgaaacttcagttatacacagcctgcctttcggggaacaaaccttccggcctagagggatgctctatgaatgccaggaatgcggagagtgctttgcgcacagcagtgacctgacggagcatcagaagatccatgatcgagaaaagccttcaggaagtcgcaactacgagtggtccgttattagaagtctcgcccctaccgaccctcagaccagctacgcccaggaacaatatgcaaaagagcaggcacgcaacaaatgcaaagactttaggcaatttttcgctacctctgaagatctgaatacaaatcagaagatctacgatcaagagaagtcccatggggaggagtctcagggagagaacaccgacggggaagagactcacagtgaggagacccacggacaggagactattgaggatcctgtcatccagggatcagatatggaggacccccagaaggacgatccagatgacaaaatttacgagtgtgaagactgcggtctgggttttgtggatctgacagacctgacagatcaccagaaggtgcacagtagaaagtgtctggtcgacagccgggagtatacacactccgtcatccacacccactcaatttctgaataccagagagattacaccggggagcagttatacgagtgtcccaagtgtggcgaaagctttattcacagctcatttttatttgagcaccagcgtatacatgaacaggaccagctgtatagtatgaaggggtgtgatgacggattcatcgctctcctgccaatgaaaccacggaggaatagggcggcagaaagaaatccggctttagccggaagcgccattcggtgtctgctttgtggacagggcttcatacattcaagtgcactgaacgagcatatgagactacaccgggaggatgatctcttagagcagagccaaatggcggaggaagccatcatccctgggttggccctgactgagttccagcgttcccagaccgaggaacggctgtttgagtgcgccgtatgtggcgagtctttcgtcaaccctgccgagcttgcggaccatgtcacagttcataaaaatgaaccctatgagtatggctcctcctacacacatactagcttcctgaccgaaccgctgaagggggccataccattttacgaatgcaaagattgcgggaaaagcttcatccattccacggtgctaactaagcataaagaactccaccttgaggaagaggaagaagacgaagcagctgccgctgctgccgcggcagcccaggaggtggaggccaatgttcatgtgccacaggtcgttctcaggatccagggcctgaacgtggaggccgcagagcctgaggtggaggctgccgagcccgaagtagaggctgctgaacctgaggtggaagcagctgaacctaacggcgaagctgaaggcccagacggggaggccgccgagccgattggagaggctggtcagccgaacggtgaggcggagcaacctaatggagacgctgacgagcctgatggcgcgggaatcgaggaccccgaggagcgcgcagaggagcccgaaggcaaagctgaggagccagagggtgacgccgatgagcccgatggtgtaggtattgaggatcccgaggagggggaggatcaagagatccaagtcgaggaaccctactacgactgccacgagtgtaccgaaacatttacatcatcaacagcattttctgaacatctcaagacacacgccagcatgattattttcgagcctgctaacgcattcggggaatgcagtggatacatagagagagcctcaacatctactgggggggcaaaccaagcagacgagaagtacttcaagtgcgacgtgtgtggccagctgttcaatgacaggctctctctcgcccgacaccagaatacccatactggctag

SEQ ID NO: 27209 - DNA, 63 bp, synthetic construct
  source 1..63: mol_type = other DNA; note = Synthetic coding sequence
atggccaccatgatcccccccgtgaagctgaagtggctggagcaccttaattcttcttggtag

SEQ ID NO: 27210 - DNA, 4389 bp, synthetic construct
  source 1..4389: mol_type = other DNA; note = Synthetic coding sequence
atgtaccagcccgaggacgacaacaacagcgacgtgaccagcgacgacgatatgacgcgcaacagacgcgagtcatcacctccacacagcgtgcacagtttctctgacagagactgggatcgccgcggtcgatcccgggatatggagccgcgcgaccgttggagccatacgcggaacccgcgctcgcgaatgccacctagggacctgtctttgcccgtggtcgccaaaacctccttcgagatggatagggaggacgatcgagactcccgagcctacgaaagtaggagccaggacgctgaaagttatcagaatgtggtggacctcgcagaagaccgaaagcctcataatacaatccaagataacatggagaactacagaaagctgctcagtctggttcaactggcagaagacgacggacatagccacatgactcaggggcactctagtagaagtaaaaggtccgcatacccatccacctcccgcggcctgaaaacaatgccggaggccaagaagagcactcacaggagaggtatctgtgaggatgaatcaagccatggcgtgataatggaaaaatttataaaagacgtatcccgcagttctaaatccggaagagctcgtgagagttccgatcgcagtcagcggtttccaagaatgtctgacgataattggaaggatatatctttgaataagcgcgaatctgtcatccagcagagggtttatgagggaaatgcattcaggggcggtttccggtttaatagcacattagtgtcacgaaagcgcgtgctggagcgaaagcggcggtaccacttcgacaccgacgggaaaggctccattcacgaccagaaaggttgcccccggaagaagccgttcgagtgcggtagtgaaatgaggaaagctatgagtgtctcatcgctttctagcctgtcgtctccttcattcacggaatcccagcccatcgatttcggggctatgccctacgtgtgcgatgagtgtggcaggtctttttctgtgattagcgaatttgtggaacaccagattatgcacacgcgagaaaacctgtatgaatacggcgaatctttcatacattcagtggcagtttcagaggtccaaaaatctcaggtgggtgggaaaagatttgaatgcaaagattgcggtgagacatttaacaagtccgcagctcttgccgaacacagaaaaattcacgcccgaggctacttagtcgagtgtaaaaaccaggagtgcgaagaagccttcatgccttcacctacattcagcgagcttcagaagatttacggtaaagataagttttacgagtgcagggtgtgcaaagagacgttccttcacagtagcgccctgattgaacatcagaagatccactttggtgacgataaggataatgaacgggaacatgaaagagagcgagagagagagcgcggggaaacctttcggcctagtcctgccttgaatgagtttcaaaaaatgtatggaaaggagaaaatgtacgaatgtaaggtttgcggtgaaaccttcctgcacagttctagcttgaaggagcatcaaaaaatccatacccgcggtaaccccttcgagaataagggaaaggtttgcgaggaaactttcatccccggtcaatcactcaaaaggcgccagaaaacatacaataaagaaaagctctgcgactttactgatggccgagacgcgttcatgcagagttctgagttatccgagcatcagaaaatccattcgaggaaaaatctgttcgaggggaggggctacgagaagagcgttatccactccggtccttttactgagagccagaagagtcatacaatcaccagacctctggaaagcgatgaggatgagaaagcgtttaccatttcttccaacccgtacgagaatcagaagatacccacaaaagaaaatgtgtatgaggccaaatcctatgagcggagcgtgatccatagcctggcatctgtggaagcgcagaaaagccacagtgtggctggtccctctaaacctaaggtcatggcggagtccacaatacagtctttcgatgccattaatcaccagagggtccgggccggaggtaacacctccgagggtcgagagtatagccgctcggtgatccatagcctcgtggcatctaaacctcccagaagccacaacggcaacgaactagtagaaagcaacgagaaaggagaatccagcatctacatctccgatctgaatgataaaaggcagaagatccccgcccgcgagaacccttgtgagggaggttcaaaaaatagaaattatgaggattccgttatccagtcagtatttagggccaagccacagaagagtgtacccggtgagggttccggtgaatttaagaaggatggcgagtttagcgtaccaagttcaaatgtcagggaatatcagaaggcccgtgccaaaaaaaaatatatcgaacacagaagcaacgagacaagcgtgattcacagtctgccattcggcgaacagaccttccgcccccgtggaatgttgtatgagtgtcaagaatgcggcgagtgtttcgctcactctagtgatttaactgaacatcagaagatccacgaccgcgagaaaccttccggcagtagaaattacgaatggagcgtgatacgcagcctggctccaacagatccccagacttcttacgcgcaagagcagtatgcaaaggagcaagcgcggaacaagtgtaaggactttcgccaattttttgcgacatccgaggacctgaatacaaaccagaagatatacgaccaggaaaagagccacggagaggagtcccagggtgaaaatacggatggggaggagacacactccgaagagacccatggccaggaaacaattgaagatccggtgatccaaggatccgacatggaagatccccaaaaggacgatccagatgataaaatttatgaatgcgaagactgcggcctggggtttgtggatctcaccgatctgaccgatcaccagaaggtgcactcaagaaaatgcctggtcgatagccgagaatacacccattcggtcatccatacacactccatcagcgaatatcagcgggattacactggagagcagctctacgagtgccctaagtgtggcgaaagttttatccatagtagtttcctgtttgagcatcaaagaatccatgagcaggaccagctttatagtatgaaaggttgtgacgatgggtttattgccctgctgccgatgaaacctcgcaggaatagggcagccgagcgaaacccagcactggcagggagcgccatcagatgcctcctgtgtggccaagggttcattcacagcagcgcactgaacgaacatatgcggttgcaccgagaggatgacctacttgaacaatcacagatggcagaggaggccataatacctggcctggccctgaccgagttccagaggagccagacagaggagcgcctgtttgagtgcgccgtgtgcggggagtccttcgttaatcctgccgaattagcggaccacgtcaccgtgcataaaaatgaaccttacgaatacggaagctcctatacgcacacaagtttcctcactgagcccctcaagggcgcaattccgttttacgaatgcaaggattgcggtaagtcattcattcacagcaccgtcttaactaagcataaggagttacatctggaagaggaggaggaagatgaagccgcagccgccgctgctgctgccgcccaggaggtcgaagccaacgtccacgtgccccaagtggtgctgcgcatccaaggcctcaatgtcgaggcagccgagccagaagtcgaggcagctgagcccgaagtggaagccgctgagccagaggtggaggccgctgaacccaacggcgaggccgagggccctgatggcgaggctgccgagccgattggcgaagcaggccagccgaatggcgaggccgagcagcccaacggggacgctgacgagccagatggggcgggcatcgaggacccggaggaacgcgccgaggagcctgaaggcaaggcagaagaaccagagggtgatgcagatgaaccggatggcgtaggaatcgaagatcctgaagagggggaggaccaggagatccaggttgaggagccttactacgattgtcatgaatgcaccgaaacgttcacctcctcaaccgcattcagcgagcatttgaaaacgcatgcaagtatgataatattcgagccagcaaatgctttcggcgagtgctccggatacatcgagagagcttccacatccaccggaggggcaaaccaggctgacgaaaaatatttcaaatgcgatgtgtgtgggcagttattcaatgataggctatcattggcgcgccaccaaaacacccacaccggctag

SEQ ID NO: 27211 - DNA, 438 bp, synthetic construct
  source 1..438: mol_type = other DNA; note = Synthetic coding sequence
atggccaccatgatcccccccgtgaagctgaagtggctggagcacttgaacagttcctggattaccgaggactccgagtcgattgctacaagggagggcgtggccgtgctgtactcaaagttagtgtctaacaaagaagtggttcccctcccccaacaagtactctgcctcaaagggccacaactacctgatttcgaacgagagtccttgtcttctgatgaacaggatcactacctggatgctctgttgtcaagtcagcttgcacttgccaagatggtgtgtagcgatagcccttttgcaggtgccctgagaaaacggctcctcgttctgcaacgtgtattctatgctttgtctaacaaataccatgacaagggaaaggtgaagcaacagcagcattctcccgaaagctctagtggatccgccgatgtgcacagttag

SEQ ID NO: 27212 - DNA, 4284 bp, synthetic construct
  source 1..4284: mol_type = other DNA; note = Synthetic coding sequence
tgagccaagcaggagcggctggagatcgccagcctgagcaaccaggaccacacatctaagaaggaccctgggggtcaccggaccgccgctatcctgcacgggggctcacccgacttcgtcggaaatggtaagcatagagctaattcctctggaaggtcccgacgagaacgccagtattccgtatgcaatagtgaggacagccctggttcatgcgagatactgtatttcaacatggggtcaccagatcagctcatggtgcataaaggaaaatgcatcggatctgatgaacagcttggcaaactcgtgtacaacgccctcgagacagccacaggtggcttcgtgctcctgtatgagtgggtgctgcagtggcagaaaaaaatgggtccattccttacttctcaggaaaaggaaaagattgataagtgtaaaaaacagatccagggtaccgaaactgaatttaatagcctagttaagctgtctcaccctaacgtggtgagatatctggccatgaacctgaaggagcaggacgatagcattgttgtcgatatcctagtggagcatatcagtggggtttctctcgccgcccatctgtctcactcggggccaattcctgtgcaccaactgaggcgatacacagcgcagctgctgtccgggctggactatctgcattcaaatagcgtggttcacaaggtgttgtctgctagcaacgtcctagttgatgcggagggcactgtgaagattacggactactccataagcaaaagactggccgacatatgtaaggaagacgtgttcgagcaaaccagggtaagattttctgacaatgccctaccgtacaaaactggcaagaaaggcgacgtttggaggctggggcttctgctactctctctctcccaaggccaggaatgcggagagtatcccgttacaataccctccgatctccccgctgacttccaggactttttgaagaaatgtgtctgcctggatgacaaagaaagatggagccctcagcagctgctgaaacattcttttatcaacccacagcccaagatgccactcgtagagcagagcccggaagatagcgagggacaagactacgttgaaacagtcattccttcaaaccgcttgccttctgccgcgttcttctcggaaacccagcgccagttctccagatattttattgaattcgaggaactgcagctcttgggtaaaggcgccttcggcgcggtgatcaaagtgcaaaataagctcgacggctgctgttatgctgttaagaggattcccatcaatcctgcttcccgccagtttcgccgcattaaaggcgaagtgaccttgctcagccgcctgcaccacgagaacattgtgcggtactacaatgcatggattgagagacatgagcggcccgccggacctggaacaccgccaccagattccggcccactcgccaaagatgaccgcgcggccagaggccagccggcctctgacaccgacggactggatagtgttgaagccgctgctcctccccccatcctgagctcatccgtagagtggagcaccagtggcgaaaggtctgctagcgcccggtttccggcaaccggaccaggctcctctgacgacgaagatgatgacgaagatgagcacgggggagtgttctcccagagctttctgcctgcctctgattctgagagcgatattatcttcgataacgaggatgagaattccaaaagccagaatcagatggagtactgcgaaaagtctactctgagggacactattgaccaaggcctgtatcgggacacggtgcgcttatggagactcttcagggaaatccttgacgggctcgcctacatacacgaaaaaggcatgatacaccgggaccttaagccggtaaatattttcttggatagtgacgaccacgtgaaaattggcgactttggtctggcaaccgaccacctggccttcagtgccgacagcaaacaagacgaccaaacaggcgatctcattaagtccgaccccagtggccatttaaccggcatggtcggtaccgcactttacgttagccctgaggtgcaggggagtacaaagtcagcctacaaccagaaagtggatttattctccctcgggatcatcttctttgaaatgagctatcaccccatggtgacggcctccgaacggatctttgtgttgaatcagctgcgagacccaacttctccaaaattccctgaagacttcgacgatggggaacacgccaaacagaaatctgtgatcagttggctgctgaatcacgacccagccaagaggcccacagcaaccgagttactgaagtccgagctgttgccacctccccaaatggaggaatctgagctgcacgaggttcttcatcacacgctgacgaacgtggatggcaaggcttatcgaaccatgatggcccagatcttctctcagaggatcagcccggctatcgactatacatatgattccgatatccttaaaggaaacttctctatcagaaccgccaaaatgcaacagcacgtatgcgaaaccatcattcggattttcaagcgccacggcgccgttcagctctgtactcccctactcttgcctaggaatcggcaaatctacgaacacaatgaggcggccctctttatggatcattccgggatgctagtgatgttaccttttgacctgcgaattcccttcgcccgatacgtagctcgcaacaacatcttaaatctcaaacggtactgtatcgaaagggtgtttaggccccggaaactggataggttccatccaaaggagttgctggaatgcgcattcgatattgttactagcacaaccaactctttccttccaaccgccgaaatcatctatacgatttatgagattattcaggagttccccgctcttcaggagcgcaactatagcatctaccttaaccatacaatgctgctgaaggctatactcttgcactgtggaatccctgaggacaagttgtcacaagtatacatcatcctgtatgatgccgttactgaaaaacttaccaggcgggaagtggaagctaaattctgtaacctctctttgtcgagtaactctctttgcaggttgtataagttcatagaacaaaaaggggatctgcaggatctaatgccaaccattaacagtttgataaagcaaaagaccggcatagcacagcttgtcaaatacggcctgaaggacttggaggaagtggtggggctgctaaaaaagctcggcataaagttacaagtcttgatcaatctcgggcttgtctacaaagtgcaacagcacaatgggattatttttcaattcgttgctttcatcaaacggcgccagcgcgccgtccctgagatcttggcagcaggaggtaggtatgacctcctcattccacagttcaggggccctcaggccctaggccccgtgcccactgctattggggtgtcaatcgccattgacaagatctccgctgcagttctcaacatggaagagtcagtgacgatcagctcatgcgatctactggtcgtctcagttggtcagatgtccatgtctcgcgctattaatctcactcaaaagctctggaccgctggcatcaccgccgaaattatgtatgactggagccagtcccaggaggaactgcaggaatattgccggcatcatgagatcacatacgtagctctggtgtccgataaggaaggttcacatgttaaggtcaagtccttcgaaaaggagaggcaaacagaaaagagggtactcgaaacagaactcgtggaccatgtgcttcagaagctacgtaccaaggtgacagatgagaggaatggccgcgaggcaagtgataacctcgcggttcagaatctcaagggaagctttagtaacgctagtggtctcttcgaaattcacggggcaactgtagtacccatcgtatccgtgttagctcctgaaaagcttagcgcctcaacccgccgacgatatgagactcaagtgcagactaggctgcagacaagcctcgcaaatttacaccagaagtcaagcgagatcgagatcctcgcagtggatttacccaaggagaccatcctgcaattcctgagcctcgaatgggacgctgacgaacaagcctttaacacaactgtgaaacagctgctgagtcggctacctaaacaacggtatttaaaactggtctgtgacgaaatttataacataaaggttgaaaaaaaggtgagtgttctgttcctgtattcatatcgcgacgactactaccggattctgttctag

SEQ ID NO: 27213 - DNA, 4767 bp, synthetic construct
  source 1..4767: mol_type = other DNA; note = Synthetic coding sequence
atgctgccccccaagcacctgagcgccaccaagcccaagaagagctgggctccaaacctatatgagctcgatagcgacctgacgaaggaaccagatgtgatcattggagagggtcccactgatagtgagttttttcaccaaaggtttagaaatctgatctatgtggagttcgtgggaccccgcaaaactctcataaaattgcggaatctgtgtttggattggcttcagcccgagactcgcacaaaggaggaaatcatagagctgctggtgctggagcaatatcttacaattatcccggaaaagttgaaaccttgggtgcgtgcgaaaaagccagaaaactgtgagaaactggtgaccctattggaaaattacaaggagatgtatcagccagaagacgacaataatagcgacgtgacctctgatgatgatatgacccgcaacagacgagagtcttccccaccacatagcgtccactccttttcagatcgggattgggaccggagaggtcggtcgagggatatggagcctcgggatagatggagccatacgaggaatccccgaagcagaatgcctcctagagatctgagcctgccggttgtggcgaagaccagctttgaaatggatcgggaagatgaccgggatagcagggcctacgaatctcgaagtcaggatgctgaatcctaccagaacgtggtcgacctcgctgaggatagaaagccacacaatactattcaggacaatatggaaaattataggaagttgctgtctctagtgcaactcgcagaagatgacgggcactcccacatgacccagggtcattcatccaggtcgaaacgctcagcttacccttcgacaagccgtggccttaagaccatgccagaggctaaaaagtccacccacaggcgaggaatttgcgaggatgaatcgtctcacggcgtgatcatggagaagttcattaaagacgtatctagatccagtaagagcgggcgcgctagggagagcagtgacagatctcaacgctttccccgtatgagcgatgataactggaaagatatcagtttaaataagcgtgagagcgtgattcagcagagagtatatgaaggtaacgcttttcggggcgggtttaggttcaattccaccctggtgagcagaaagagggtcctggaacggaaacggcggtaccatttcgatacagatgggaagggatcaattcatgaccaaaaaggctgcccacggaagaagccctttgagtgtggcagcgaaatgcggaaagctatgagtgtgagctctctctcttctttgagctctccaagtttcacagaatcccagcccatcgactttggcgctatgccgtacgtgtgcgatgagtgcgggcggagcttcagcgttatttctgaattcgtcgagcaccagattatgcatactcgggagaatttgtatgagtacggagaatcattcatccatagcgtggctgtatctgaagtgcaaaagtcccaggttggcgggaaaaggtttgaatgcaaagactgtggcgaaacgttcaacaaaagcgccgccctggctgagcacaggaaaattcacgccagaggatatctggtggagtgcaaaaaccaggagtgtgaggaggccttcatgcccagccctaccttctctgaactgcagaaaatctacggcaaggacaagttttacgagtgcagagtgtgcaaggagacctttcttcatagtagtgccctgattgaacatcaaaagattcacttcggcgacgataaagacaacgagcgggaacatgaacgtgagcgcgagcgtgagagaggtgagaccttccggccgtctcctgcactgaatgaatttcagaagatgtacgggaaggaaaagatgtatgagtgcaaagtgtgtggtgaaactttccttcatagctcctcccttaaggagcaccagaaaatccacacacgaggaaacccctttgagaataagggaaaggtttgcgaggaaacctttatccctggacaatctttgaaacggaggcagaaaacctacaataaggaaaaactttgcgatttcaccgatggcagagatgcattcatgcagtcttctgaactgtctgagcaccagaagatccacagcagaaagaacctcttcgagggccggggatacgagaagagcgttatccactcaggcccctttaccgagtcacagaagtcccatactataacacggcccctagagtctgacgaggacgaaaaagctttcactatttcctccaatccttacgagaatcaaaaaattcctacgaaagagaacgtgtatgaggcaaaatcttacgagcggtcagtaatccactctctggcaagtgtggaggcacagaaatctcacagcgttgccggccccagcaagcccaaggtgatggcggagagtactattcagtcttttgatgccatcaatcaccagcgggtcagagctggaggtaatacatcagaaggtagggaatattctcgaagcgtaatccattccctggtggcctccaaaccgccacgcagtcacaacggaaatgagttagtcgaatctaatgaaaagggagagtcttctatctacatctccgacttgaacgataaacgtcaaaagatccccgctcgtgagaatccttgcgagggaggttctaaaaatagaaactacgaggacagtgtcatccagtcagtgtttcgagccaagccacagaagagcgtgcccggcgaaggcagcggagaatttaaaaaggacggcgagttctccgtacctagcagtaatgtaagagaataccagaaggctcgcgctaagaagaagtatattgagcacaggtctaatgaaacgagcgtcatccatagcctcccttttggggagcagaccttcagaccccgcggcatgctgtacgagtgtcaggagtgtggagaatgctttgcccatagcagtgacctgacagagcaccagaaaattcacgaccgcgaaaaaccttccggctccagaaattatgagtggagcgtgattcgttcactggccccaaccgatccccaaacctcctacgcacaagagcagtacgctaaggagcaggctaggaacaaatgcaaagatttcagacagttcttcgcaacctccgaggacctgaacaccaatcagaaaatttatgaccaggaaaaaagccacggagaggagtctcagggcgaaaatactgacggtgaagaaactcatagtgaagaaactcatgggcaggagaccatcgaagatcctgtcattcaggggagtgacatggaagatccccaaaaggacgaccctgacgacaagatatatgagtgcgaggattgcggacttggatttgtggatctaaccgatctgacagaccatcagaaggtgcatagccgtaagtgcctggtggattcgcgcgaatatacacacagcgtgattcatacgcacagcatcagcgagtatcagcgcgattacactggcgagcagctgtacgaatgtcctaagtgtggtgagtcctttatacattcaagcttccttttcgagcaccagagaattcacgaacaggatcagttatactctatgaagggatgtgacgatggcttcattgctctactccctatgaagcccaggcggaatagagcggccgagaggaatccagccctggcgggaagcgcaatcagatgcctgctgtgtggacaaggcttcatccatagtagtgctctgaatgagcatatgcgactccatcgtgaggacgacctgctggagcaaagtcaaatggcagaagaggccatcattcccggcttggctctcacggaattccagagatctcagaccgaggagcggttgtttgagtgtgccgtctgcggcgagtcattcgttaacccagcagaattggcagaccacgtcaccgtccacaaaaacgagccatatgaatacgggagcagctatacccatacttcgttcttgacggaaccgctgaaaggcgccattcccttttatgagtgcaaggattgcggcaagagctttatccacagcacagtcctcacaaaacataaggaattacatcttgaggaagaggaggaggacgaggctgcggccgcagcagctgcagccgctcaggaagtcgaagcaaatgtccacgttcctcaagtcgtgctgcggatacagggactcaatgtggaggccgcagaacctgaggttgaggccgccgagccggaagtggaagctgctgaacctgaggtcgaagcggcagagcctaatggcgaggctgagggtcccgacggagaggccgctgaacccattggagaagcagggcaacctaatggtgaggctgagcagccaaacggtgacgccgatgagcccgatggcgccggcatcgaggacccagaggagcgcgcagaggagcccgagggcaaggccgaagagccagagggcgacgctgacgaacctgacggcgttgggatagaggatcccgaagaaggagaggaccaagagatccaggtggaggagccatattacgactgtcacgagtgcactgaaaccttcaccagcagtaccgcattcagcgaacacttgaaaacccacgcttccatgattatcttcgaacctgccaatgccttcggcgaatgtagcgggtacatagagagagccagcacttccacaggtggcgccaatcaagcagacgaaaagtatttcaaatgcgacgtctgcggccaactcttcaatgatcggctaagcctggctcgtcatcagaacacacacacggggtag

SEQ ID NO: 27214 - DNA, 3012 bp, synthetic construct
  source 1..3012: mol_type = other DNA; note = Synthetic coding sequence
atgagccagtggacccccgagtacaacgagctgtacaccctgaaggtagatatgaagtcagagataccttcagacgctcccaagactcaggagagtttaaaaggcatcctgctgcatccagaacccatcggggcagcgaaatcttttccagctggagtggagatgataaactctaaggtgggcaacgagtttagccatctgtgtgacgattcccagaagcaggaaaaggagatgaatggcaaccagcaagagcaggagaagagccttgtcgttaggaagaaaagaaagtcccagcaggccggaccatcctacgtacaaaactgtgtgaaggagaaccagggcattctaggcctgcggcagcaccttggcaccccttccgacgaggacaatgattccagttttagtgactgcctgtcttcacccagctccagcctgcactttggcgactccgacactgtgaccagcgatgaagacaaggaagtatcagtccgccattcacagaccatcctcaacgcaaagtcacggtcacatagcgctcgctcccacaagtggcctagaaccgagacagagtccgtgtccgggctgctgatgaaacggccatgtctgcatggatcaagtctgcgacgcctgccatgcagaaaacggttcgtcaagaacaatagctcccagaggacccagaaacagaaagagaggattctgatgcagcggaagaaacgtgaggttctggcacggagaaaatacgcattactcccatctagttcatccagttctgagaatgacctgagctcagagtcgtcttcatccagcagcaccgaaggtgaggaagatctttttgttagcgcctccgaaaatcatcaaaataatccggcagtgcccagcggcagcatagatgaggatgtggtcgtgattgaagccagctcgactcctcaggtgacggctaatgaggagatcaatgttacttcgacagacagcgaagtagagattgtaacagtaggcgagagttataggtcgaggtctactcttggccacagccggtcacactggtcccaaggatcgtcttcccatgcgagccgccctcaggagccaaggaacaggtcgcgaatcagtacggtgatccagccattgcggcagaatgccgctgaagtcgtcgacttgactgtagacgaggacgagccaacagttgttccgaccaccagcgcaaggatggaaagccaggccacttctgcgagcatcaacaactcaaacccatcaacaagtgagcaggcctctgataccgccagtgcggttactagctctcagccttccactgtctccgaaacaagcgcaaccctgacatcaaactcaacgactgggacatccatcggcgatgattccaggcgcacgacctcatcagcagtaactgagaccggcccccccgctatgccccgactgccttcttgttgtcctcagcattccccctgcggaggtagttcacaaaaccaccatgcattgggacatcctcacacttcgtgtttccaacagcatggacatcacttccagcaccatcatcatcatcatcatacgccacaccccgctgtacctgtttcgccttctttttccgatcccgcatgtcctgtcgagagacctccccaggtgcaggcgccatgcggcgcgaacagttcatcaggcacaagctaccacgaacagcaagcactgccagtggatctctccaattcaggtatccgatcacacggctccggtagcttccatggcgcttcagccttcgatccatgttgtccagtttcatctagtagggccgcaatcttcggacatcaagcagccgctgccgccccatcacagccactgtcttctatcgacggctatgggtcgagtatggtggctcagccccaacctcagcccccccctcaaccgagcttatcttcttgcagacactacatgcctcctccctatgccagcctgacacggcctctccatcaccaggcttctgcttgcccccactctcatggcaaccctccccctcagactcagcctcccccccaagttgactacgttattccgcatcccgtccacgccttccattcacagattagctcgcatgccacaagccaccccgtcgctccgccgccgccaacgcatctcgcatccaccgccgcccccattcctcagcacctgccgccaactcaccaacccatatcgcaccatatacccgcaactgcacccccggctcaacgcctgcatcctcacgaggtcatgcaacgaatggaggtacagcgacggcgaatgatgcagcaccccacaggcctgttcgtattttgcgtgagcagaagagctcacgagcgtccccccccgcatccccaccgcatgcatcccaattatgggcatggccaccatatacatgtgccccagaccatgagctcccaccctcgccaagcccctgagagatctgcgtgggagctgggtatagaagctggagtgaccgccgctacatacacgcctggtgctctgcacccccacctagcccactaccacgcaccaccccgcttgcaccacttgcagttgggcgccctgcctctcatggtcccagacatggccgggtatcctcacatccggtacattagttctgggttggatggaacatcattcagaggacccttccggggaaattttgaagagctcatccacttagaggaacgactgggcaacgtgaatcgtggagcttctcaaggcacaatcgagcgttgcacctatccacataagtataagaaggtgacaacagactggttctcacaacggaagctgcattgtaaacaggatggcgaggagggaactgaggaggatacggaggagaaatgtaccatttgtctgagtatcctggaggagggggaagacgttaggcgcctcccatgcatgcatctgttccaccaagtctgtgtggatcagtggctcatcacaaacaagaaatgtcctatctgtagggtcgacatagaagcacagctcccatccgaatcctag

SEQ ID NO: 27215 - DNA, 150 bp, synthetic construct
  source 1..150: mol_type = other DNA; note = Synthetic coding sequence
atggccctgccccacgacagcaacgagaccagctacctgctgccccctaataatgaggactgggggcgccaaaccatccccgactttgtgtatggccagaaagacctgatggccgagggaatacagtggcccaggaacgcccccggctag

SEQ ID NO: 27216 - DNA, 375 bp, synthetic construct
  source 1..375: mol_type = other DNA; note = Synthetic coding sequence
atgcgggccagcccctgcatcagccagcccgccgccagctggcaccctagacccagcgctttgcggccaacggccggatccggcccagacacccgcacccctggaaccgtcgaggacggcagcgcgccctgcccggccttccgcagcccagctgtatctccatgtggggaagaaccatgctgtttccaaattagtcccgcagaggagactctcgagctgggccgtctggttagccccggcaactgcgatactctaagtcctagggcagccgggttctacgcctgtcacgtgcgctcattgatcccatgtagatccaccaaagggagatggcctcttaccgccagtgcggcgggcttatcatcttttagcggatag

SEQ ID NO: 27217 - DNA, 93 bp, synthetic construct
  source 1..93: mol_type = other DNA; note = Synthetic coding sequence
atggccaccgacagctgggccctggccgtggacgagcaggaggccgccgctgaatcacgcaccgagcttccctccccctattctacttcctag

SEQ ID NO: 27218 - DNA, 804 bp, synthetic construct
  source 1..804: mol_type = other DNA; note = Synthetic coding sequence
atgtgggaccagcggctggtgaagctggccctgctgcagcacctgcgggcgttctatggtattaaggtcaagggggtgagagggcagtgtgatcggaggcggcacgaaactgccgcgacagagataggcgggaagattttcggagtgccattcaatgcattaccacactctgctgttccggaatatggacacattccgtcatttctggtcgacgcctgcacgtctttggaggagcatattcacacagaaggcctgttccggaagtccggctccgtgattcgcttgaaagctctgaaaaataaagtcgaccatggagaggggtgcctgtcgagcgctcccccttgtgacatcgccgggctgcttaaacaatttttccgtgaactgccagagccaatcttacccgctgatcttcacgaggctctgttgaaagctcagcagctgggaactgaggagaagaataaggcgatactcctcttgtcttgcctgcttgctgaccacacggtgcacgtgctgcggtatttcttcaattttctgcgtaatgtttctttaagaagcagcgaaaataaaatggattccagcaacttggccgttatcttcgcgccaaacctgctgcaaactagcgaagggcacgagaagatgagctcaaacgctgagaaaaaaggagtctaccagacgctgagttggaagaggtaccagccttgctgggtgctgatggtcagcgttctgctgcaccattggaaggccctgaaaaaggtcaatatgaagttactggtgaatatcagggaaagggaggacaacgtgtag

SEQ ID NO: 27219 - DNA, 1113 bp, synthetic construct
  source 1..1113: mol_type = other DNA; note = Synthetic coding sequence
atgggcttcaaccggcccagcaagatccaggagaacgccctgccccttatgcttgccgaaccaccccagaacctgatcgcccagtctcagagcggcaccggaaagacagctgccttcgtcctcgctatgttgagccaggtcgagcctgccaataaatacccacagtgtctctgcctgagccctacctacgagcttgcccttcaaactggcaaagtgatcgaacagatggggaagttttaccctgaattgaagcttgcttacgcggtgagaggtaataaattggagagaggtcaaaagatcagcgagcagatcgtgatcggcacccctgggacagtgcttgattggtgctccaaattaaaatttattgatcccaagaaaattaaagtattcgtgctggatgaagcagatgtgatgatcgctacacaaggacaccaggaccagtcaatcagaatacagcggatgctaccaagaaattgtcaaatgctcctgttttccgcgaccttcgaggattctgtatggaaatttgctcagaaagttgtgccagaccccaatgtgattaagctgaagcgcgaagaagagacactcgacacaatcaaacagtactacgtgctttgtagcagccgggatgagaagttccaagccctctgtaatctttacggggccatcactatcgcacaagcgatgattttctgtcatacaagaaagaccgcctcgtggctggcagccgaactgtcaaaagaaggtcaccaggtggccctcctgtctggggagatgatggtggaacagagagccgccgtcattgagcgctttagggagggcaaggaaaaagttctggtgaccactaacgtttgcgcacgggggattgatgtagaacaagtgagcgtggtgattaacttcgacctccccgtggacaaggacggtaatcctgacaatgagacttatctgcatcgaattgggcggaccggacgatttgggaagcgcggcctagccgtgaacatggtagactccaaacattcaatgaatattttgaaccgtatccaagagcacttcaataagaaaattgagagactggataccgacgatcttgatgagatcgaaaaaattgctaattag

SEQ ID NO: 27220 - DNA, 2712 bp, synthetic construct
  source 1..2712: mol_type = other DNA; note = Synthetic coding sequence
atggccaccagcgccgacagccccagcagccccctgggcgccgaggaccttcttagtgacagttcagagcctccgggcctcaaccaggtctcttctgaagtcacgtctcaactctacgcgtctctgagattgtcacggcaggccgaagccacggcaagagcccagttgtacctgccctctacgtcccccccccacgagggcttagatgggttcgctcaggagctgtccaggtccctgtcagtgggcctggagaagaacctgaagaagaaagacggctctaagcatatcttcgagatggagtcagtcagaggacagcttcaaaccatgctacaaacaagcagagacacggcttatagagatcccctcatacctggcgctgggagtgagagacgggaagaggactcattcgacagtgacagtaccgccaccctgcttaataccaggccactccaggatctgtcaccgagtagctcagctcaggccttggaggagctatttcctagatacacctccctcagacccggcccacctctgaatccccccgattttcaaggactacgcgatgcgttggattcagaacatacccggcggaagcactgtgaaaggcatatccagagtctccaaacaagggtgctggagctgcagcagcagctggctgttgccgtggcagctgaccggaagaaggataccatgatcgagcagctcgataagacattggcgcgggtggtggagggttggaaccggcacgaggctgaaaggacagaggtattgcgcgggctccaggaggagcaccaggccgctgagcttactcgatcaaaacagcaggaaactgttactagactcgagcagagtctcagcgaagccatggaggcgttgaatcgcgagcaggaatctgctcgtttacaacagcgggagagagagaccctggaggaagaacgtcaggctctgacacttaggctggaagctgaacagcagcggtgttgcgtactacaagaggagagagatgccgcacgggccgggcagctgagcgaacaccgcgaactcgagaccctgcgggccgcactcgaggaagagcggcagacttgggctcagcaagagcaccagctgaaagagcattaccaagccctgcaggaggagtctcaggcacagctcgagcgggagaaggagaaatcccagcgtgaagcccaggccgcatgggagactcagcaccaactcgctttagttcaatcagaggtccggagactggagggtgaactagatactgctcgtagagaaagggatgccctccagctagagatgagcttggtgcaggccaggtacgaatctcagagaatacagctggagtccgagcttgctgtccaactagagcagcgcgtgaccgagaggcttgcacaggcacaggagtcctccctgcgtcaggctgcaagcctgagggagcaccacaggaaacagctgcaggatctgagcgggcagcaccaacaagaactggccagccagctggcccagttcaaggtcgagatggccgaacgtgaggaaaggcagcagcaagtggcagaagattatgagttaagattagcccgggaacaagcgagagtgtgtgagctgcaaagcggtaaccagcagttggaagagcagcgtgttgagctcgtggagcgtctccaagccatgctgcaagcccactgggacgaggctaatcagcttctctcaaccacactgcccccgcccaaccctcccgccccacctgcaggtcctagcagcccaggcccccaggaacccgagaaagaagagaggagagtgtggaccatgccccccatggccgtggcactgaaacccgtcctccagcagtccagagaagcacgcgacgagctgcccggcgctccgcccgttctgtgtagcagttcttctgaccttagtctgcttctcgggccatcctttcagagtcaacactcatttcaaccactggaacccaaaccagatctgactagctctactgcaggggcattttccgcacttggcgccttccaccccgatcatcgggctgagaggccctttccagaggaggaccctgggccggacggagaaggcctcctgaaacaaggacttcctccggcccagctcgaagggcttaagaactttcttcatcagctgctcgaaacagtgccgcagaacaatgaaaatccctcagtggacctgctgccccccaaaagtggtccattaaccgtcccgagttgggaagaggcgccacaggtgccaaggattcccccgccagtgcacaaaacgaaagtgcccttagccatggctagctctctcttccgggtgcccgagccccctagcagtcactcacagggatcaggtccaagctctgggtcccccgaaagaggaggcgacggactcacattccctcggcagctgatggaagtgagtcagctgctgcgcttgtaccaggccagaggctggggtgccttgcccgccgaagatctgcttctgtatctgaagcggttggagcattctggcaccgatggaagaggcgataatgtgccacggcgcaacactgatagtaggttaggtgaaattccacgcaaagaaattccctctcaagccgtacctaggcggctcgctacagctcccaagacagagaaaccccccgcgaggaaaaagtccggccatcctgcaccatctagcatgaggagcaggggaggcgtgtggcggtag

SEQ ID NO: 27221 - DNA, 138 bp, synthetic construct
  source 1..138: mol_type = other DNA; note = Synthetic coding sequence
atgcccctgctggtggagggccggcgggtgcggctgccccagagcgcgggggacctggtgcgggcccaccccccactggaggccccaagcccattttgggtgctgatgatgcccttgttggttactctctggagctag

SEQ ID NO: 27222 - DNA, 1083 bp, synthetic construct
  source 1..1083: mol_type = other DNA; note = Synthetic coding sequence
atggaggagctgagccaggccctggccagcagcttcagcgtgagccaggacctgaacagtacggcagccccgcatccccggctttctcagtacaagtcaaagtactcttcgctggagcaatcagagagacggcgcaggctgctggagctccagaagtccaagaggctcgactacgtaaaccatgccagacggctggccgaggacgattggaccggcatggaatccgaggaagaaaataaaaaggacgacgaggaaatggatattgatacagtgaagaagctcccaaagcattacgctaaccagctgatgctgagcgaatggctgatcgatgttccttccgacctggggcaagaatggatagtggttgtctgcccggtcggaaaaagagccctgattgttgcgagtagggggagcacatctgcctacactaaatcgggctactgcgtgaacaggttctcttccctgttgcctggcggaaacaggagaaactccacagccaaggactatacaatactggattgcatctataatgaggtgaatcagacgtactatgtactagacgtgatgtgctggcgaggacaccctttttatgattgccaaacagattttaggttttactggatgcactcaaaattgcccgaggaagaaggactgggcgaaaaaaccaaactgaatccatttaaattcgtaggtcttaagaatttcccttgtacacccgaatcactttgtgatgtgctgtctatggacttccccttcgaggtggacgggcttctgttctatcacaagcagacgcactatagtcccggatctacccccctggtaggctggttaagaccatacatggtgagcgacgttcttggtgttgccgtccccgcgggcccgctcacgacaaagcccgactatgccggccaccagctgcagcagatcatggagcacaagaagtctcagaaggaaggcatgaaagaaaagcttactcacaaagcctcagagaatggacactatgagttagagcacctctccacacctaagctgaagggctcatcccatagtcctgaccaccctggatgtctcatggagaactag

SEQ ID NO: 27223 - DNA, 1353 bp, synthetic construct
  source 1..1353: mol_type = other DNA; note = Synthetic coding sequence
atggtgcccctggtggccgtggtgagcggcccccgggcccagctgtttgcctgcctgctacgtctgggtacccagcaggtgggccctctccaactgcatacgggcgcctcccacgcggccagaaaccattacgaagtgctggtcttagggggcgggtcgggcggcattactatggccgcccgcatgaaacgaaaagttggagctgaaaatgtcgccattgtggagcccagcgaacgccatttctatcagcccatttggacccttgtgggggccggtgccaaacaactgtcaagcagcggtcggccgaccgcgagcgttattccgagcggggtcgaatggattaaggcgagagtaacggaactcaatccagacaagaattgcatccatactgatgacgacgagaaaatcagttacaggtacctgatcattgccttgggaatccaactcgactatgagaaaattaaggggcttcctgagggctttgcacacccgaagatcggatcaaactattccgtcaagaccgtcgagaaaacttggaaggctcttcaagacttcaaagagggtaacgccatattcaccttccccaataccccagttaagtgcgctggcgccccacagaaaataatgtatctttcggaagcctattttaggaaaaccgggaagcggtctaaggctaacataatctttaataccagtctcggagctatctttggcgtgaaaaaatatgctgacgccctacaggagatcatacaggaaaggaatctgaccgttaattacaagaagaacctgattgaagtgcgggcagacaagcaagaagccgtcttcgaaaatctagataagcctggtgaaacccaggtgatttcgtacgaaatgttgcatgtgactccccccatgtctccccctgatgtcctcaaaacctcccctgtggctgacgccgcaggatgggtggacgtggacaaggaaactctgcagcacagacgctatcctaacgtatttggtattggcgactgcacaaacctgcctaccagcaaaaccgccgccgccgttgcagcacagtctggtatactcgaccgcaccatctcagtaatcatgaagaatcagacacctactaaaaaatacgatgggtatacctcgtgtcccttggttaccggctacaacagagtgattctggccgaattcgattacaaggctgaacctctggaaacgtttccgttcgatcagtccaaggagaggctgtccatgtacctgatgaaggccgacttaatgccctttctgtactggaatatgatgttaagagggtactggggaggccccgcatttctgagaaagctgtttcatttgggtatgagttag

SEQ ID NO: 27224 - DNA, 1113 bp, synthetic construct
  source 1..1113: mol_type = other DNA; note = Synthetic coding sequence
atgggcttcaaccggcccagcaagatccaggagaacgccctgcccctcatgctggcagagccaccgcagaacctgatcgcccaaagccaatccggcacaggaaaaacggccgccttcgttctggcgatgttgtcacaggtcgagccggcaaacaaatacccacagtgcctctgcctgtcgcccacatatgagctagctcttcaaacggggaaggtgatcgagcaaatgggaaagttttatccggagttaaagctggcgtacgctgttaggggaaataagctagagagggggcagaaaatttcagaacaaatcgtgatcgggacccctggaactgtcctggactggtgttccaagctaaaatttatagatcctaaaaagattaaggtgttcgtgctggacgaggccgatgtgatgatagcaacacaggggcaccaggatcaatccattaggatccagcgcatgttacctagaaattgtcaaatgctgttgttctcagcaactttcgaggatagcgtgtggaaattcgcccagaaagtggtccctgaccccaacgtgatcaagctgaagcgagaggaggagaccctggatactatcaagcagtattatgtgctgtgctcttcacgggacgagaaatttcaagcattgtgcaatttgtatggcgcgatcacgattgcgcaggcaatgatcttctgccacactaggaaaactgcttcgtggttggccgccgaactgagcaaagagggccatcaggtcgcattgcttagcggcgaaatgatggtcgaacagagggctgccgtcattgagagatttagggagggcaaagagaaagtgctggtgacaacaaacgtctgcgctcgggggattgacgtggagcaagtttctgtagttatcaactttgacttgccagtggataaggatgggaatccggataacgagacttatctccatagaatcgggaggacaggtcgatttgggaagcgcggcctcgccgtgaatatggtcgattctaagcacagcatgaatatccttaacaggatccaggaacactttaacaagaagattgagaggcttgacacggatgacttggacgagatcgagaagatcgcgaactag

SEQ ID NO: 27225 - DNA, 738 bp, synthetic construct
  source 1..738: mol_type = other DNA; note = Synthetic coding sequence
atgggcggcggctacgacctgaacctgttcgccagcccccccgacagtaactttgtttgctcagtgtgtcacggggtgctgaaacggcctgcacgcctcccctgtagtcacatattctgcaagaaatgtatcttgcgatggctggctaggcagaagacctgcccatgctgtagaaaagaggtgaaacggaaaaaagtcgtgcacatgaacaaattaaggaagaccattggccggctcgaggtgaagtgtaagaacgctgacgcgggttgtatcgttacctgcccactggcacataggaagggtcatcaggattcatgtcctttcgaattaactgcatgtcctaacgaggggtgcacaagccaggtcccacgcggcacactagcagaacaccggcagcactgccagcaaggcagccagcagcgttgccctctgggctgtggcgcaaccctcgatcctgccgagagagctaggcacaattgctatcgggagcttcacaatgcatggagtgtgcgtcaggaaagacggcgtcccctgctgctatccctgctgaggagggtgcgctggctggaccaggccacgagcgtagttagacgagaactagctgagctgtctaacttcttagaggaggatacagcactgctcgagggcgctccacaggaggaagcggaggcagcccccgaaggcaatgtgggtgctgaggtggtgggcgagccacgcgccaacattccttgcaagtag

SEQ ID NO: 27226 - DNA, 309 bp, synthetic construct
  source 1..309: mol_type = other DNA; note = Synthetic coding sequence
atgcgggccagcccctgcatcagccagcccgccgccagctggcacccacggccatctgctttgcggcccactgctgggagcggtccagataccagaacccctggtaccgtcgaggacgggtcagccccctgtcctgcattccgatctcctgctgtgtcaccctgcggagaggaaccgtgctgctttcagatttcacccgctgaggaaactctcgagctgggcagactggtgtcacccggttgtcataagtcctcagctccccaggagagaaggttggatccgcgagccaggtgtgtggttcacatctag

SEQ ID NO: 27227 - DNA, 1473 bp, synthetic construct
  source 1..1473: mol_type = other DNA; note = Synthetic coding sequence
atggaggacagcgccagcgccagcctgagcagcgccgccgccaccggcacttcaacatcaacacctgcagccccaaccgcacgaaaacagttggacaaggagcaggtacgcaaggctgttgacgctctcctgacccactgcaagagcaggaaaaacaactacgggctgttgctaaacgaaaatgaaagtctcttcctcatggtggttctgtggaagattcccagtaaggagcttcgagtacgactgactcttccccacagtatccggtccgattccgaagacatttgtctatttaccaaagacgagccaaactcaacccctgagaaaaccgagcaattttatcgaaagctgcttaacaagcacggaattaagaccgtgagtcagatcatatctctccagacacttaagaaggaatataaatcttacgaggctaaacttcggctgttgtcctcttttgatttcttcctcaccgacgcccggatccggaggctgctcccctcactcattggccgacatttttaccagcgcaaaaaggtgccagtttctgtgaatttactttccaagaacctcagccgggagatcaacgactgtatcggtgggacagttctgaatatctctaaatcaggaagttgcagcgcgatcaggatcggccatgttggaatgcaaatcgagcacataatcgagaacatcgtcgctgtgaccaagggactgtccgagaaactgccagagaaatgggaatcggtcaagttactgttcgtgaagacagaaaaatctgcagccctgcccatcttcagctcttttgtctctaactgggacgaagccactaagagatctctattgaataaaaaaaagaaagaggctcggcgcaaaagacgcgagagaaatttcgagaagcagaaagagcgaaaaaagaaacgacagcaggcacgcaaaacagcgagcgtcctctccaaggacgatgtcgcgcctgagtctggcgacaccactgtcaaaaaaccggagtctaagaaggagcaaaccccagaacacggaaagaagaaacgcggcagaggaaaagcgcaggtgaaggctacaaacgagagcgaagatgagatcccacagctagtaccgatcggaaaaaaaactccagcgaacgagaaagtcgaaatacagaagcatgcaacggggaagaagtcccctgcaaagtcccctaacccatctactccaagaggcaagaaaagaaaggcactgccagcctccgaaaccccgaaagcagctgagtcggagaccccaggaaagagtccagagaagaagccaaagattaaggaggaggccgtcaaagagaagtctccatctctgggcaagaaagatgcccgacagacccctaaaaagcctgaggcgaagtttttcactacgcctagtaaatctgtgaggaaagcttcgcacacgccgaagaaatggcctaagaaacctaaagtgccccagtccacctag

SEQ ID NO: 27228 - DNA, 1809 bp, synthetic construct
  source 1..1809: mol_type = other DNA; note = Synthetic coding sequence
atggccgagttccgggtgcgggtgagcaccggcgaggccttcggcgctggcacgtgggataaagtctctgtcagcatcgtcggaactcggggcgagagtccgccccttcccctggacaatttagggaaggagttcactgcgggcgccgaagaggacttccaagtgaccctccctgaagatgtggggagagttctgctgctgagggtccacaaggccccacccgtgctgcctctgcttggaccgctcgcccccgatgcatggttctgcaggtggttccaactgactccaccaagagggggccatcttttattcccctgttatcagtggctggaaggtgctggcacactggtgcttcaggaggggacagccaaggtgagctgggctgatcaccaccctgttcttcagcaacagcgacaagaagagcttcaggcacgacaggagatgtaccaatggaaagcttacaacccgggatggcctcattgcctggacgagaagaccgtggaggacctggagttaaacattaaatatagtacagccaagaacgccaacttttacctgcaggcagggagcgctttcgccgaaatgaaaattaagggactcttagatagaaagggtctttggaggtcgctgaacgaaatgaaacgtatttttaacttcagacggacccccgcagccgagcacgccttcgagcattggcaagaagatgccttctttgccagccaattcttgaacggcctgaaccccgtactcatccgccggtgtcactatttgcctaagaattttcctgtcactgacgctatggtggcatccgtgctggggcccggtacctccctgcaagccgagctggaaaaagggagcctgttcttggtcgaccacggtatactgtctggtattcagacaaatgtcattaacggaaagccacagttctctgccgcccccatgacgcttctgtatcagagccctggctgcggcccactgcttccgctggccatacagttaagccagacccccggcccgaattctccgattttccttcccactgatgacaagtgggattggctattagccaaaacctgggtgaggaatgccgaattcagcttccatgaggcattaactcacctattacatagccatctcctcccagaagtctttaccctggccaccctgaggcagctgccacattgtcaccctctgttcaagtctaccggaatagggattgagggatttagtgaactgattcaacgcaacatgaaacagctgaattactccctgctgtgcctacccgaggacatcagaacaagaggtgtggaagatattcccgggtattattatcgcgatgacgggatgcagatctgggggataccgagttcgttggagactcgggaggccttggtgcagtacgtgaccatggtgatctttacctgttcagccaaacacgcagcagttagcgctggccagttcgactcctgcgcatggatgccgaacttacctccctcaatgcagctccccccacccaccagcaaaggcctcgccacttgtgagggctttattgcaacgctgccacccgtcaacgcgacatgcgatgtgatccttgcactgtggcttttgagtaaagagcccggggatcagagacctcttggaacctatccagatgaacacttcaccgaggaggcaccaaggcgtagcattgctacctttcagagcagactcgcgcagataagcaggggaatccaggagagaaatcaaggactggtgcttccctatacatacctcgacccacccttgatcgagaactcagtttccatctag

SEQ ID NO: 27229 - DNA, 618 bp, synthetic construct
  source 1..618: mol_type = other DNA; note = Synthetic coding sequence
atgagcgtggaccccatgacctacgaggcccagttcttcggcttcacacctcaaacctgcatgctgcggatttatatcgcgttccaggattacctttttgaggtgatgcaggccgttgagcaagtgatcttgaagaagttggatggcattcccgactgcgatatctcacccgtgcagatacgtaagtgcacggaaaaattcctgtgcttcatgaaaggccatttcgataatttattcagcaaaatggagcagttgttcctgcagctgattttgcgtattcccagcaacatcctgctgcctgaggataagtgtaaagaaaccccttacagcgaggaggactttcagcacctacaaaaggaaatcgagcaactccaggaaaaatacaaaactgagctgtgcacaaagcaagctctgctcgccgagcttgaggaacaaaagatcgtgcaggcaaagttgaagcagactctgacctttttcgatgagctgcataacgttggaagagaccatggcacgagcgacttccgggagtctttggtctctctcgtacagaattctcgcaaattgcagaatattcgggacaatgtcgagaaagagtctaaaaggctcaaaataagttag

SEQ ID NO: 27230 - DNA, 360 bp, synthetic construct
  source 1..360: mol_type = other DNA; note = Synthetic coding sequence
atgatcctgcagcagcccctgcagcggggcccccagggcggcgcccagcgactgccaagggctgcactgggtgtcacttgggggctcgacgccagggagcctttacgcaaacagtttctgagcgaagagaatatggccacccattttagccagctgtctttacacaacgaccacccatattgtagtccgccgatgacattttccccagccctccctccattgcggagcccatgcagtgagctactcctgtggcgctaccctgggagtctgattccggaggctcttcgcttgctgagactcggcgacacccctagcccgccttacccagccactccagcgggagatatcatggaactgtag

SEQ ID NO: 27231 - DNA, 1473 bp, synthetic construct
  source 1..1473: mol_type = other DNA; note = Synthetic coding sequence
atgcccatgcccaccgagggcacccccccccccctgagcggcacccctatccccgttccggcatactttcgtcatgcggagccagggttctccctaaagagaccacggggtctgtccaggtccctcccccctccaccccctgccaagggtagtatacctatttcacgtctatttccgcccagaacgcccggctggcatcaacttcaacccagacgtgtatccttcaggggtgaggcttccgagacactccagtctcctgggtatgacccgtccagaccggaaagcttcttccagcaaagttttcagcgcctgtccagattgggacacggctcttatggtgaggtgttcaaggttaggtccaaagaagatggaagactgtacgccgtgaagcggagcatgtccccattccgtggcccaaaggatcgagcccggaaactcgcggaggtggggagccacgagaaggtggggcaacatccatgctgtgtgcgcctggagcaggcttgggaggagggcggcatcctctatctgcagactgaactgtgtggaccctcacttcagcagcattgtgaggcttggggagctagtcttcccgaggcccaagtctggggctatctcagagacactctgcttgcgctcgcccacctccactcccaggggctcgtgcatttggacgttaagcctgccaacatctttcttggccctcgaggcagatgtaagctgggggacttcggcctgctcgtagagctaggaacagctggcgcaggagaggttcaggagggagaccccaggtacatggcacctgaactgctccagggatcgtacggcactgcggcggacgtattttctctgggactcaccatcctggaggtggcctgtaacatggagttgccacacggaggcgaaggatggcaacagctgaggcaaggttatctaccccctgagtttaccgccggattgtcttcagaactgagatccgttctcgttatgatgctggaacccgatcccaagctccgtgccacagcagaagctctgttagccctgccagtactgcgtcagcccagggcatggggagttctctggtgtatggccgcagaagcgctttcccgaggctgggcactttggcaggctctgctggccctattatgttggttatggcacgggcttgctcatccagcaagctggctgcagccgctgggcccccctgcaacccctcccggcagtcccccttgctctcttctgctcgacagttccctgtccagcaactgggacgacgactctttgggccccagcctgagtccagaggctgtgctggctcggactgtcggaagcacaagtacaccacggtccagatgtactcctagggacgcccttgatctgagtgacattaatagcgagccccccagaggctccttcccctccttcgaaccacggaatctcctgtctctgtttgaggatacactggaccccacgtag

SEQ ID NO: 27232 - DNA, 1293 bp, synthetic construct
  source 1..1293: mol_type = other DNA; note = Synthetic coding sequence
atgctggagcggtggcaccagctgcagccccggcgggtgagcttcagaggagaggccagcgagaccctgcagtcacccgggtacgacccctcccggcctgagtccttctttcaacagtcctttcaaagactctcgagacttggccatggcagctacggcgaggtgttcaaggtgcggtccaaggaggacggcagactttatgccgtcaaaagatccatgtccccctttagaggacctaaggacagggccagaaagcttgccgaggtgggctcacatgagaaggttggacagcatccctgctgcgtcaggctggagcaggcttgggaggaaggcggcatcctgtacctccagactgagctctgtgggcccagccttcagcagcactgcgaagcatggggagcttctctgccggaggcccaggtatggggatatcttcgcgacaccctgttggccctcgcacacctgcattcacaggggttggttcacctagatgttaaacctgcaaatattttccttggtcccagagggcgttgcaagctaggggacttcggcttgctcgtggaactgggcactgccggtgctggcgaagtgcaggaaggtgaccccagatacatggcccctgagctcctgcaggggtcgtacggcaccgctgcagatgtgttctctctggggctaaccattcttgaggtggcgtgcaatatggaacttccacatgggggcgagggatggcagcaattgcgtcagggatatcttccccccgagttcacagccggcctgagcagtgaattacggtccgtcctagtgatgatgctggagcctgatcctaagctgagggccactgctgaagcattgttggccctgcccgtgctaagacagccgcgggcctggggagtgctctggtgcatggccgccgaagctctgagccgcggctgggcactctggcaagcccttttagccctgctgtgctggctttggcacggtctggcccatcccgcatcctggctgcagcctcttggtccccccgccactccacccggcagcccgccgtgtagcctattgctcgacagtagtctgtctagcaattgggatgatgatagtctgggaccatctttatcgccagaggctgtgctggcaaggacagtcggctccacgtccactccccgatcccgatgcacgcccagagacgcactcgatctttcggacatcaacagcgagccacccaggggcagctttcccagctttgagccccgcaatctcttatctctgtttgaagacaccctcgaccccacatag

SEQ ID NO: 27233 - DNA, 666 bp, synthetic construct
  source 1..666: mol_type = other DNA; note = Synthetic coding sequence
atgcaggtgcaggacgacggcgtgaacctgatccccttcgccaagtgctctcgtgttgtgagcagatcccccccaccccgcctcccttcacaaagtttgcgtcctatgcctcagagatacggagacgtgttctggaagaatttgaatcagagacccacaccaacctggttggaagaacagcatatcccacccatgctgctgccccctccggagatgttatggaggaggaagaagagacgcccttgcctggagggcatgcagcaacagggtctggggggagtgccagctcgcgtcagggctgtgacttatcatctggaagatctgaggaggaggcaatctatcatcaatgaactcaagaaagctcagtgggggagctctggggcggcctctgagcctgtagtgctgggggaagagggctgcggattccctagtacgaatgagtacccggatttagaggaggaacgcgctacatatccccaagaagaggatcggtttctcaccccaggacgggcccagctgctttggtccccctggtcacccctcgatcaggaagaagcatgtgcaagccgccagctgcattcattagcctcctttagtaccgtgactgccaggaggaatccactccacaacccatggggcatggagctggctgcctcggaagagtag

SEQ ID NO: 27234 - DNA, 2232 bp, synthetic construct
  source 1..2232: mol_type = other DNA; note = Synthetic coding sequence
atggaggccgccgccgtgaccgtgacccggagcgccacccggcggcgtcgcagacagcttcaggggttagcagcaccagaggctggcacccaggaggagcaggaggaccaggaaccgagacccagacggaggcgccccggcaggtccatcaaggacgaagaggaagaaacagtattccgggaggtcgtaagtttctcgcctgaccccctgccagtgcggtactatgataaagacaccactaaacctatcagcttttatctctccagtttggaggagctcttagcttggaagccacggctggaggacggattcaacgtcgccctcgagccactagcgtgccgccagccacccttgtcttcacagcgacctcgcaccctcctgtgtcatgacatgatgggtggataccttgatgatcgattcattcagggatctgttgtgcagacgccgtatgccttttaccattggcaatgcattgacgtgtttgtttacttttcgcaccatacagtgaccattccccccgtggggtggactaatactgcacaccggcatggcgtgtgtgtgctggggacattcatcaccgaatggaacgagggcggaagactatgtgaggcctttctggccggagatgagcgcagttatcaggccgtcgcagaccgtcttgttcagattacacagttctttcggttcgacggctggctcatcaacattgagaattccctttctctggctgctgtcggcaatatgccgccgtttctgagatatctcaccacccaactgcatagacaggtacccggcgggttggttctctggtatgactctgtggtacaaagcggacaactgaaatggcaggatgagctgaaccaacacaacagagtcttttttgatagttgtgacggtttcttcactaactacaactggagagaagagcatcttgagcgaatgcttggccaggccggcgagagaagggcagatgtgtatgttggggtcgacgtgtttgcgagaggcaacgttgtgggaggaaggttcgataccgataaatctctggagctcataaggaaacatggcttcagtgtcgcactcttcgctcctggttgggtttacgaatgcctggaaaagaaagattttttccagaatcaagacaagttctggggccgactggagcggtaccttccaacccattcaatttgctcgctccccttcgtgacatcattttgtctgggcatgggtgcgcgacgggtgtgctatggacaagaggaggccgtgggcccatggtaccatttaagtgcccaggaaattcagcccctcttcggggagcatcgactgggcggagacggacgtggttgggttagaacccattgttgcctcgaggacgcttggcacggcggatcttctctgttggtcaggggagtaatccccccagaagtagggaacgtagcagtccggttattcagcttacaagctcctgtaccccctaaaatctacctgtctatggtgtataaacttgaagggcccaccgacgtgaccgtggctctcgagctgaccacgggcgacgccggatcatgtcatatcggcggtatatccgtgctgaatgcagaaacgtcttcacgacactcactacgcccacttcgggtgccacccaccaaactggctcgatgggtcggcaggtgcggaagacaactgagcggcggatgggttcagcactgctacgaagtaagcctccgtggctgtttgctcctggatcttttagtttgtttttccagaccacccgggtccagggaagaagaatcattcacgtgccgactgggggaaattcaagtggtggacgctgccagcctgcttgcccccctccctcaggtgcaggcggtcactatcagccacatccgatggcaaccatcggcctctgaacgagaaggcccgcctgccctactgcagctctcgtgcacactccactggtcgttcttgctctcccaagtgaggtgctttcgcattcactgctgggggggaatgtctgatgacagtccagggagggagctgccacggcccgagatgcccatgttcttaggcctcgcattcgctacacagtacagaatcgtggatttattggtggaagccgcagggcctggtcaggatagacgcatggagttcttggtcgagcctgtccctaaggagggattcagggtgcctcaggctgagtggggtcgggctgtgttgctgtactcagcgccagcttag

SEQ ID NO: 27235 - DNA, 579 bp, synthetic construct
  source 1..579: mol_type = other DNA; note = Synthetic coding sequence
atgagcaccgccgccgtgcccgagctgaagcagatcagccgggtggaggccatgagactcgggccaggctggtctcacagctgccacgctatgctatacgctgccaaccccggacagctgtttggccggattccaatgaggttctccgtgctcatgcagatgcgcttcgacggcctactggggtttccagggggtttcgtcgaccgccggttttggagcctggaggatggattgaaccgcgtgttgggcctaggtctggggtgcttaagactaacggaggcggactacctgagctctcacctcacagaaggacctcaccgggtcgtagctcacctgtacgcaagacagctcacgctggagcagctgcacgctgtggaaatcagcgcggtccacagccgtgaccacggcctagaggtggggccgcctcctggaccaagacctccgccaagggggctagctttggccccatggaaagccccgatgggggccggcccccgagcagggcccgccgtgcaccccgaggggccctccaggcgcctcccgcagcttcctgaacagcgcctacgagaacatggatag

SEQ ID NO: 27236 - DNA, 2553 bp, synthetic construct
  source 1..2553: mol_type = other DNA; note = Synthetic coding sequence
atgctggagcggcgggccctgctgtggcagcgggaggccggccccggttggggagatagggctcgcgctgggactgggggggcaggcgggggctgcggaggggctatggcagaaagaggaccagcgttctgtggactgtacgatacttcctcactgcttcgatattgtaatgatgacaatctgagcggtactagcgggatggaggtggacgatcgcgttagcgccttggagcaaaggctccagcttcaggaagatgaacttgccgtgcttaaagccgccctggccgatgctcttagacgcctgcgcgcttgcgaagaacagggcgccgccctcagagctcgcgggacgccgaaaggacgggccccccctcgtttgggcactacggccagtgtttgccagctcctgaagggactgccaactagaacaccgcttaacggctctgggccccccagaagagtgggtgggtacgccacttccccaagttcgccgaaaaaagaggccaccagcggacggagttccgtccgacggtacttgtcccccgaaagactcgccagcgttcgcagagaagacccaagaagccgtactacatcttccagctccaattgttcagcgaagaaagagggaaaaacgaaagaggttattttctccgtagaagacgggagcgtaaagatgttccttcgtggcagacctgtgccaatgatgattcctgacgagctcgcccccacctatagtctggacacacggtccgaattaccatcctgtcgactaaagctggaatgggtctatgggtaccgcggcagagattgccgagctaacctgtatctgctgcctaccggcgagattgtgtattttgtggcctccgtcgccgtgctgtactctgttgaagagcaaagacagcggcactatctgggccacaacgatgacatcaagtgcctcgctatacaccccgacatggtgacaatcgctacgggacaggtggcaggaacgaccaaagagggtaagcctctaccaccgcatgtcagaatttgggactccgttagcctgagcacattgcatgtgctgggattaggtgttttcgatcgagctgtatgttgcgtgggattctcaaaaagtaacggcggcaacctgttatgtgccgtggacgaatcgaacgatcacatgctatctgtttgggactgggccaaggagactaaagttgtagacgtcaaatgctctaatgaagcagttttggtggccacctttcaccctaccgaccctacagtgctgatcacttgcgggaagagtcatatttacttttggaccctggagggcgggtccttgagcaagagacagggactctttgagaaacatgaaaagccgaaatatgtgctctgcgttaccttcttagagggcggagatgtggtgacgggtgacagcggtggaaacctatatgtctgggggaagggcggcaatcggatcacacaggcggtcctgggcgcccatgacggcggagtgttcggactatgcgcattgcgggatgggactctggtttcggggggcgggagggaccgccgggtggtcctgtggggtagcgattattctaaattgcaggaggttgaggtgcccgaagactttgggccggtccgcactgtggctgaaggccacggagacaccctgtacgtaggaactactcggaatagcattttgcaagggtccgtacataccgggttcagtttgctcgtgcagggccacgttgaagagctctggggcttggccactcatccaagccgggcacagtttgttacctgtggacaggataaattagttcatctttggagttcggattcccaccagccactgtggagccgcatcatcgaggacccagccagaagtgccgggtttcacccctccgggtctgttctagcagttgggacggtgaccggtcgatggctgctgctggatacagagacccacgacctggtagccatccacacggatgggaacgagcaaatctcggtggtgtctttttctcctgacggcgcatacctcgccgttggatcacatgataacctcgtttacgtttataccgttgaccagggaggacgcaaagtcagtcggctcggtaaatgctcggggcattctagcttcatcacgcatctggactgggctcaggattctagctgtttcgtgaccaatagtggtgactatgagattctctactgggaccccgctacctgcaagcagattacatcagcggatgccgtgcggaatatggaatgggcaactgcaacctgtgtgctcggattcggagtatttggcatttggtctgaaggcgccgacgggactgacatcaatgctgtggccaggtcccacgatgggaaactgctcgcgtccgccgacgactttgggaaggttcatctgttttcttacccgtgttgtcaaccccgcgcgttgtcccacaaatacggagggcactcttcccacgtgactaatgtcgcgtttctgtgggatgatagcatggctttgacaacaggcggtaaagatacttcagtgctccagtggcgggtggtgtag

SEQ ID NO: 27237 - DNA, 2502 bp, synthetic construct
  source 1..2502: mol_type = other DNA; note = Synthetic coding sequence
atggccgtggaggacagcaccctgcaggtggtggtgcgggtgcggcccccgaccccaagggaacttgactcacagagacgccctgtggtgcaagtagttgatgagagggtgttggtgtttaacccggaagagccagacggcggtttccccgggctgaagtggggcggcacccacgatgggccaaagaaaaagggaaaagacctgacatttgtgttcgatcgcgttttcggggaggcggctacccagcaggatgtcttccaacacaccacacactcagttcttgatagcttcctccagggctacaattgcagtgtattcgcctacggggccacgggcgctggaaagacacatactatgctcggccgagaaggcgaccctggaatcatgtatcttacaaccgtcgaactgtatcggcgcctggaggctcggcagcaagagaagcattttgaagtgctaatttcttaccaggaggtgtacaatgaacagattcatgatctgctggagccgaagggtcccctggccatacgtgaggatccggataagggcgtggttgtacagggcctcagcttccatcaacctgcatctgccgaacagctgctcgagatcctgactagagggaacagaaaccgcactcagcaccccactgacgcaaatgcgacttcctccagatcccacgccatttttcaaatatttgtcaaacagcaggacagggtgcccggcctgacccaggctgtgcaggttgctaagatgagcttaatagacctagcgggcagtgagcgggcgagctctactcacgcaaaaggcgagcgcttgcgagagggagccaacatcaataggtctctgcttgccctaattaatgtcctcaacgctctcgctgatgcgaaaggcagaaaaacacacgtgccatatcgcgactctaagctgacaagacttttaaaggactctttaggcggtaactgccggacagtgatgatcgccgcgatttctccaagcagcttaacctacgaggacacatacaataccctcaaatacgccgacagggccaaggaaatccgcctaagccttaaaagcaatgttaccagtttagattgccacatctcacagtacgcaaccatttgccaacaattacaggcagaggtcgccgcgttacggaaaaagcttcaagtgtacgaaggtggtggccagccccccccccaggacctcccaggctcccccaaaagtggtccaccacctgagcatcttccatcttcaccactgcccccccacccccccagccagccctgcaccccagagctcccagctgggcctcgggcgctgcaagaagagtccctcggtatggaggctcaagtggaacgtgctatggagggaaattcttctgatcaagagcagtcacccgaagatgaggatgagggcccagctgaggaggtgccaactcagatgcccgaacaaaacccaactcatgccctgcctgaatcaccccgcctgacactacaacccaagcctgttgtgggacacttcagcgcccgtgagcttgatggggatcgcagcaagcagctcgcactgaaggtgctgtgtgtggcccagcggcagtacagtctgcttcaagccgccaatcttctgacccctgacatgataacagagttcgagaccttacagcagctcgtccaggaggaaaaaatcgaaccaggagccgaagctctgcgtacgagcggtctcgctagaggagcacctctggctcaggaactctgctccgaaagtatccccgttccaagccctctgtgcccggaaccgccaggctataccgggcctgtcactcgaacaatggctcgccggctgagtgggccactgcacacactgggcatccctccagggccaaattgcacccccgctcagggtagtagatggccaatggagaaaaaacggagacggccatccgccttggaggcagactcacctatggcaccaaagcgtggcacaaagcggcagcgtcagtctttcctcccttgcctccgccgggggtctctgcctgatacgcaaccaagccaggggccaagcactcccaaaggagaaagagctagtagcccgtgccatagccctcgggtttgtcctgcaactgtgatcaaatcaagagtcccgctgggcccctcagcaatgcaaaattgtagcactccgttagcacttcccactagggacctgaacgccacattcgatctctccgaggagcccccaagcaagccaagctttcacgagtgcatcggttgggacaagatccctcaggaattatcaagactcgatcagccatttattccacgagcaccagtgcctctgttcacgatgaagggaccaaagcctacatcttctttacctgggaccagcgcctgtaagaagaagcgcgtggcaagcagctccgtgagtcatggtagatcaaggatagcccgcctgccctcctctacgcttaagagacctgctgggcccctcgtcctccctggcgattggcactag

SEQ ID NO: 27238 - DNA, 3351 bp, synthetic construct
  source 1..3351: mol_type = other DNA; note = Synthetic coding sequence
atgtacggcagcgcccggagcgtgggcaaggtggagcccagcagccagagccctgggaggagtccacgcctgccccgcagccctcggttgggtcaccgcagaaccaactctactgggggatccagcggtagttccgtgggaggtggatctggaaagacactcagcatggagaatatccagtccctgaacgcagcctacgcaacttctgggccaatgtatctttccgatcatgaaaatgtcggcagcgaaactcccaaaagtacgatgacactaggtcgatcaggaggaaggctgccctacggcgtgcgcatgacagcaatgggatctagtccaaacatcgcgtcatcaggggtggcctctgatacaattgccttcggggagcaccatctgccgcccgtctcaatggcctccacggtaccccactctctgcgccaggcgcgcgataatactatcatggacctccaaacccagctcaaagaggttctaagagaaaacgacctgttgcggaaagatgtagaagtcaaggagagcaagctgagctcctctatgaattccattaagaccttttggtcacctgagctgaaaaaagaaagggctctcaggaaagacgaggccagtaaaatcacaatttggaaagagcaatatagagtagttcaggaggagaaccagcacatgcagatgactatccaggcactgcaggatgaattacgcatccagagggacctgaaccaactctttcagcaagattcctcctcgagaaccggcgaaccttgcgtagctgagcttaccgaagaaaactttcaacgtctccacgcagagcacgaaaggcaggctaaggagctgttcctactcaggaaaaccctggaggagatggaactcagaattgaaacccagaaacagactttgaacgcgagggacgagtcaatcaaaaagttactagaaatgctgcagagtaagggcctctcagccaaggccaccgaggaagatcacgaaaggacccgaaggctggcggaggccgagatgcatgtccaccacctggaaagcttgctcgaacagaaggagaaagagaactccatgctgcgcgaggaaatgcatcggagattcgagaacgccccagacagtgcaaagacgaaagcacttcagactgttatcgagatgaaagattctaagattagcagtatggagaggggactccgggacctggaagaagaaattcagatgctcaaatcaaatggcgcattgagtaccgaggaaagggaagaagaaatgaaacagatggaggtttatcggagccacagtaaatttatgaaaaataaggtcgaacagctgaaagaggagctgtcctccaaggaagcacagtgggaggagctcaaaaaaaaggctgcggggttacaggccgagatcgggcaggtaaagcaggagctgagccgaaaggacacagaactgctggctctgcagactaagctggagacgctgacaaaccaattctcagattcaaaacaacacatcgaagtgttgaaggaaagccttacagccaaggaacagagggccgctattctgcagactgaggtggatgcgctccgactccgcctggaagagaaagagacaatgctcaacaaaaaaacaaagcagatacaagacatggcagaagaaaaaggcacccaggctggggaaatccacgatctgaaagacatgctggatgtgaaggaaagaaaagtaaacgtgttgcagaagaaaatcgagaatcttcaagaacaactccgggacaaggaaaaacagatgagttcattaaaagagagagtaaagtctcttcaagccgatacgacaaatactgacacggccttgaccacactggaagaagccctggctgagaaggaacggaccattgagagactcaaagaacaacgggaccgggacgagagggagaaacaggaggagatcgataactataagaaggacttaaaggatctgaaagagaaggtttccctgctgcagggggatctgtctgagaaagaggcctctctgctggatctgaaagaacatgcatcctccctggcttcttcaggcctgaagaaagacagcaggctcaaaacgctggaaatcgccctggagcagaaaaaggaagagtgcctgaagatggagtcacagctaaagaaagctcacgaggcagccctcgaagctagagcttccccagaaatgtccgaccggatccagcatctcgagcgagagattacacggtataaagacgaatcttccaaggcccaggccgaggtcgaccgactgttagaaatacttaaggaagtcgagaacgagaagaacgataaggacaagaagatcgcagagctggagcgacaagtcaaggatcagaataaaaaagttgccaacctcaagcataaggagcaggtggaaaagaaaaaatccgcccagatgttagaagaagcacgcaggagagaagacaacctcaatgactcttctcaacaacttcaagactctctgcgtaagaaggatgacaggattgaggagcttgaggaggcccttcgggagtccgtgcagatcacagccgaacgcgaaatggttctggcacaggaggagtcggccaggacgaatgctgaaaagcaggttgaagagctgctgatggcaatggagaaagtaaaacaggagctggaatccatgaaggctaagcttagttccacccaacagtctttggccgagaaagagacccacctcacgaatcttagagcggaaaggagaaagcacctcgaagaggttctggaaatgaagcaggaggcccttctggccgcaatctccgaaaaggatgccaacatagctctgttagagctctcatccagcaaaaaaaaaactcaggaggaagtggccgctctaaagagggagaaggacaggttggttcagcagttgaaacagcagacccagaaccggatgaaactcatggcagataattatgaggatgaccactttaagtcttcccactcaaatcagacaaaccacaagccttccccagatcagatcatacagcctctcttggagctggaccaaaatcgctctaaacttaagctttacattgggcacctgacaacgctgtgccatgaccgtgatcccttgatcctcaggggattaacaccaccagcgagctataacctcgatgacgaccaggcagcatgggaaaatgagctccagaagatgacccgtgggcaactgcaggatgagctcgagaaaggggaaagagataacgccgagctgcaggagttcgctaatgcaatcctgcaacagattgccgaccactgcccagatatcctcgagcaggttgtgaatgctctagaggaatcttcctag

SEQ ID NO: 27239 - DNA, 2055 bp, synthetic construct
  source 1..2055: mol_type = other DNA; note = Synthetic coding sequence
atgatccccccccaggaggccagcgcccggcggcgggagatcgaggacaaattgaaacaagaggaagagaccttgtcctttatcagggatagcctcgagaagagcgaccagctgaccaagaatatggtctcaatactctcttcctttgagtcaaggcttatgaagctggaaaactctattattcccgtgcataagcagaccgaaaatcttcagagactgcaggaaaatgttgagaagaccttgagctgcctggaccacgttatatcctattatcatgtggcgtctgacacggagaagattatacgcgaaggcccaacaggccgtctggaggaatacctcggctccatggcaaaaatacagaaggccgttgagtatttccaagacaatagtcccgactcccctgagttgaacaaggttaaactgctatttgagagaggtaaggaagctttggagtcggagttccgatcgttgatgactcgccactcaaaggtagtgagccctgttcttatcttggatctgattagcggcgatgatgacctggaagctcaggaagatgtcaccttggaacatttgcccgagagtgtgttacaggacgtgattcggatatcacgatggttggtggaatacggtcgcaaccaggacttcatgaacgtctactatcagatccgaagcagccagctggatcgctccataaagggtctgaaggaacactttcacaagtcctcttcatcctccggagtgccctattcaccagccattcctaacaagcgcaaagatacacctactaagaaacccgtgaagcgcccaggtacaattcgcaaggcccagaatctgctgaaacagtactctcagcatgggcttgacggcaagaagggaggctctaatctcattccgcttgaaggtcgagacgatatgcttgacgtagaaacagatgcctatatccattgtgtgtcagcttttgtgaagctcgctcaaagcgagtatcagcttctcgctgacatcatccctgagcaccaccagaaaaagacatttgattctttgatacaggatgctctagacggtcttatgctggaaggggagaatatagtatctgctgcacggaaggccatcgtgcgtcatgacttctccacagtactcacagttttccccatcctgcggcatttgaagcagacaaaacctgagtttgatcaggtcctgcaggggaccgccgcgtcaactaaaaacaagctgccgggattgataacgagcatggagacaattggagcgaaagcactcgaggatttcgccgacaatattaaaaatgatccagataaggaatataatatgccgaaagacggaacagtccatgagctcacatcaaacgctattctattcctgcaacaactgctcgacttccaggagaccgccggagcaatgcttgcttcccaagaaacaagttcgtcggcaactagctactccagcgaattctctaagcgattgctgagcacttacatctgtaaggttttggggaacttacagttgaatctgctgtctaaaagtaaggtctacgaagaccccgctctgagtgctattttcctgcacaacaactataattacattttgaaaagcttggaaaagagcgaacttattcagctggttgcagttactcagaagacagccgaacggtcctatagagaacacatcgaacagcagattcagacctaccagcgtagttggttgaaagtgacagactacatcgctgagaagaacctacctgtgtttcagccaggggtaaaattaagagataaggaacgacagatcatcaaggagcggtttaaaggctttaatgatggactggaagagctgtgtaaaatccaaaaggcatgggccataccagacacggaacagagggaccgaattagacaagcgcagaaaaccattgtaaaagagacatacggcgcttttcttcagaagttcggctccgttccattcactaagaatcctgagaaatatattaagtatggggtggagcaggtgggcgatatgatcgaccgactgttcgatacaagcgcttag

SEQ ID NO: 27240 - DNA, 378 bp, synthetic construct
  source 1..378: mol_type = other DNA; note = Synthetic coding sequence
atggccgacgaggagctggaggccctgcggcggcagcggctggccgagctacaggctaaacacggggaccccggagacgctgcccagcaggaggctaagcacagagaggcagaaatgaggaactctatcttggcccaagtgttggatcagagcgctcgggctcggttgtctaacctggctctggttaagcctgagaagactaaggccgtagagaattatctgatccagatggctagatatgggcagctgtccgagaaggtctccgagcaaggtctcattgagatcttgaaaaaagtctctcagcagacagagaaaacaactactgtgaagtttaataggcggaaagtcatggacagcgatgaggacgacgattactag

SEQ ID NO: 27241 - DNA, 3327 bp, synthetic construct
  source 1..3327: mol_type = other DNA; note = Synthetic coding sequence
atggccctgcggcccggcgccggcagcggcggcggcggcgccgccggggccggggcgggaagcgcgggcgggggcggcttcatgttcccggtggcgggtggaatccggccaccacaggccggcctgatgccaatgcagcagcagggctttcctatggtgtccgtcatgcagcctaacatgcagggcattatgggaatgaattatagtagccagatgtcacagggacctatcgcgatgcaggcaggtattcccatgggcccgatgccagccgccgggatgccctatcttggacaggcccccttcctggggatgcgcccacccggtccacagtacactcctgacatgcaaaaacagttcgctgaagaacagcagaagaggttcgagcagcaacaaaagctcctggaagaagagcgcaagcgacgccaattcgaggagcagaagcaaaagcttaggttgctgtctagtgtaaagcccaagaccggggagaagtccagagacgatgcgctggaagctataaaggggaacctggacggatttagcagagatgccaaaatgcaccccacacctgctagtcatcctaagaagcctggggtgggggtctttccaagccaagatcccgctcagcctaggatgccgccgtggatctacaacgaaagcctcgtgcccgacgcctacaagaagatcctggaaaccaccatgactccaactggaattgacacagctaagttgtatcccatcctcatgagcagcgggctcccacgggagaccttggggcaaatttgggcgctggccaatagaaccaccccaggtaagttgaccaaggaagagctgtataccgtcctggcgatgatcgcagtcactcaagtggtaaaacctgaggaggacgacttccaggactttcaggatgcatcaaaatctgggtccctggacgacagcttttctgacttccaggaactgccagcatcttccaaaacttctaattcccagcatggcaatagcgcaccttctctcttaatgccactgcctggcactaaagctctcccttctatggacaaatacgccgtgttcaaagggatcgccgccgataagtcaagcgaaaatacagtgccgccaggcgacccgggtgacaaatactctgccttccgggagttggagcaaacagccgagaataagcctctgggcgagagctttgctgagttccgttccgccggaacagacgatggattcactgacttcaaaacagccgattctgtctcacccctcgagccgccgacaaaagacaaaacttttccgccaagttttccgtcgggtactatacagcagaaacagcaaacacaagtgaaaaaccccctgaatctagccgacctagatatgttttcatccgtgaattgctcctctgagaagcccctgagtttcagcgctgtattctccacatcgaagagtgtgtctaccccacaatcaaccggctcagcggctactatgactgcccttgctgctacaaaaactagctctctagccgacgatttcggagagttcagcctattcggcgagtattctggcttggctccggtgggagagcaggacgactttgcagattttatggccttcagtaactcatccattagtagcgaacagaaacctgatgacaagtacgacgcgttaaaagaggaagctagcccggtgcccttgacttctaatgttggatccacggtgaaagggggccagaatagcaccgcagcctccactaagtacgacgtcttcaggcagctgtctctggagggaagcggactgggtgtcgaagatctgaaggataatacaccctccggcaagtccgatgacgatttcgctgatttccattcgagtaaatttagttcgataaactcggacaagtcactgggggaaaaggctgtcgctttcagacatacaaaggaagacagcgcttctgtcaagagtctcgatttaccgtcaatagggggaagctctgtcggaaaagaggactccgaggacgctctttctgttcagtttgacatgaaattagccgatgtgggcggggacctgaaacacgtgatgtcggactctagtttagaccttccaactgtcagcggacagcacccaccagcggccgctgggtctggcagtccgtcggccactagtatacttcagaagaaagagaccagctttgggagctccgaaaacataacaatgaccagcttaagtaaagtgaccacatttgtgagtgaggatgccctgccagagacaacatttccggccctcgcctccttcaaggacaccattcctcagacaagcgagcaaaaggaatacgagaatagagattataaagactttaccaagcaggacctcccaacggcggagcgcagccaagaagcaacttgcccatctccagcatcatccggagcatctcaggagacccctaacgaatgttcagatgacttcggggagtttcagtccgaaaagccgaagatctcaaagtttgattttttggtcgccacaagccaaagcaaaatgaaaagttctgaggagatgatcaagtctgagttggcaacgttcgacctgtccgtgcagggaagtcataagcggtctctcagtcttggagacaaggaaatcagcagaagctcccccagccctgcattggaacaacccttccgggaccgcagcaatacactgaatgaaaagcctgctttgcccgtcatcagggataagtataaggacctcacgggcgaggtcgaggagaacgaacgctacgcctatgagtggcaacgttgtttaggaagcgccctgaatgtgatcaagaaagccaacgacacactgaatggaatttcctcgagctcagtgtgtacagaagtgattcagtctgcgcagggcatggaatacctgctgggagttgtagaggtgtaccgagtcacaaagagggtagagctgggaattaaggccacagcagtgtgttcggagaaactgcaacaacttcttaaggatatcgacaaagtatggaacaatcttatcggtttcatgtcacttgctacacttacacccgacgagaattccctggacttttcctcctgcatgctgcgtcccggcatcaaaaacgcccaggaactggcctgcggggtgtgtcttctgaacgttgattccaggtcacggaaagaagagaaaccagccgaggaacatccaaagaaggcatttaattctgagactgattctttcaagctcgcctacggagggcatcagtatcatgcgagttgtgcaaacttctggataaattgtgtcgaacccaaaccacctggccttgtgttacccgacctgctgtag

SEQ ID NO: 27242 - DNA, 594 bp, synthetic construct
  source 1..594: mol_type = other DNA; note = Synthetic coding sequence
atggccgccttccgggacatcgaggaggtgagccagggcctgctgagcctcctgggagccaatagagcagaagcgcagcagaggagacttctagggcgacacgagcaggtggtcgaacgtcttcttgagacccaagatggcgcggaaaagcagctccgggagatcctcactatggagaaggaagtggcacaatcgctgttgaatgctaaggaacaggttcaccagggcggtgttgagctgcaacagctcgaagctggcttgcaggaggcgggagaggaagatactaggctaaaagcgtccctactccaactcaccagggaattggaagagctaaaagagattgaagccgacctggagagacaagagaaggaggtggacgaggacacaaccgtcaccataccaagcgctgtttacgtcgcccagctgtaccaccaggtgtctaaaatagagtgggattatgaatgcgaacctgggatggtgaagggaatacaccacggcccatctgtcgcacagcccatacacctagatagcacacaactgtcacggaaatttatctccgattacctctggtctttagtcgacactgagtggtag

SEQ ID NO: 27243 - DNA, 906 bp, synthetic construct
  source 1..906: mol_type = other DNA; note = Synthetic coding sequence
atgacccggcacggcaagaactgcaccgccggcgccgtgtacacctatcacgaaaagaagaaagacaccgcggcctctgggtacgggacccagaacatccgtctgtcccgggacgctgtgaaagactttgattgctgttgcctgtctctgcagccatgccatgatcctgtggtcacaccagacggctacttatatgagcgggaggcgattctggaatacattttacatcaaaagaaggagattgcacgacagatgaaggcctatgaaaagcagagaggcacgaggagagaagagcagaaggagctgcaacgcgctgcctctcaagaccatgttagaggatttctggagaaagaaagcgccatcgttagccgccccttaaacccattcacagccaaagccttgtcaggaacttcccctgacgacgtccagcctggaccatctgtgggcccaccttccaaagacaaagacaaggtgctcccttcgttttggattccgagcctgactcccgaggccaaagccaccaagttagagaagccttcaaggaccgttacctgtcctatgagcggtaagccactgcgcatgtccgacttgacccccgtccatttcacccctttggactcttccgtagaccgagttggcctgattactcgttccgagcgatatgtctgcgcggttactcgtgattccctaagcaacgctacgccttgcgcggtacttagaccttctggcgcggtggtgaccctggaatgcgtggagaagctgatcaggaaagatatggtggatccagtgaccggagataagctgaccgacagagatatcatcgtacttcagcggggtgggactggattcgcaggttccggcgtgaaattgcaggcagaaaagtctagacccgtgatgcaggcttag

SEQ ID NO: 27244 - DNA, 990 bp, synthetic construct
  source 1..990: mol_type = other DNA; note = Synthetic coding sequence
atggaggtggccgagcccagcagccccaccgaggaggaggaggaggaggaggaacacagcgccgagccgcgacctaggactcgatctaaccccgagggggccgaagatagggccgtgggggcgcaggcttctgtcggctcaagatcagagggggagggtgaggctgctagcgctgacgacggaagcctcaacacgagcggggcgggacccaaatcatggcaggtcccccctccagctcccgaggtgcaaattagaacgccacgagtgaactgtcctgagaaggtcatcatctgcctggacctaagcgaggagatgtctctgcccaagctcgaaagttttaatggctccaaaacaaatgccctgaatgtcagtcagaagatgatagagatgtttgtgcgtactaagcacaagatcgataagagccatgagttcgctctcgtggtcgtgaacgacgatactgcctggctgagtggccttacctcagacccacgcgagttatgctcttgcctctacgacctcgagacagcatcctgtagcactttcaacctcgaagggctgttttctctgatccagcaaaaaaccgaactccccgtgacggagaatgtccagaccatcccgccaccctacgttgttcgcaccattcttgtgtacagccgccctccttgtcagccgcagtttagtctgactgaacccatgaagaagatgttccaatgtccgtacttcttttttgacgtggtttatattcataacggcacagaggagaaggaagaggagatgtcctggaaggatatgtttgcgttcatgggatcacttgatacaaaaggtacatcatataagtacgaggttgccttagcaggtccagcccttgagctccataattgtatggccaagctgttagcgcacccccttcaaagaccatgtcagtcccatgccagttatagtttgcttgaggaggaggacgaggccatcgaagttgaggcgacagtatag

SEQ ID NO: 27245 - DNA, 1263 bp, synthetic construct
  source 1..1263: mol_type = other DNA; note = Synthetic coding sequence
atgctgagcagcttccccgtggtgctgctggagaccatgagccactacacggatgaaccccgattcaccatagagcagattgatctgctgcagcgactgagaagaactggtatgaccaagcatgaaatcctgcacgcgctggaaacactggaccggctggaccaggaacattctgataagtttggtcggcgcagctcttacgggggctccagttacgggaactccactaataatgttcccgcttccagcagcaccgcaacagcatctacgcaaacacaacattctggcatgagtccaagcccttccaactcatacgatactagcccacagccatgcactactaaccaaaatggtagggaaaataacgagcgtttatctacctcgaacggcaagatgtcacccacgcggtatcacgccaactctatgggtcagagaagttactcatttgaagcaagtgaggaggatcttgatgtagatgacaaagttgaggagctgatgagacgagactcgtcagttatcaaggaagaaatcaaagcattcttggctaatcgccgtatttcgcaggcagtggtcgctcaagtcacagggatcagtcagtcgaggatatcccactggctcctgcagcaggggagtgacctgagcgaacaaaaaaaacgtgcattctatcggtggtaccaactggagaagactaatccgggtgccacattatccatgcgccctgctcccattcccatagaggatccagaatggcggcagactcccccacctgtgagtgcaacctctgggactttcaggcttcggagaggtagtagatttacatggcggaaggaatgcttggcggtgatggaatcatatttcaacgagaatcagtaccctgacgaggcaaagcgcgaggagattgccaacgcatgtaatgctgtgattcagaagccgggtaaaaaactgagcgacctggagagggtcaccagtctaaaggtatataactggttcgccaacaggaggaaagagattaagaggagggccaatattgaagccgccatccttgagagccatggtatcgacgttcagagcccaggaggccactccaactccgacgatgtcgatggaaacgactattctgaacaggatgattctacatctcactccgaccaccaggaccctattagcctggccgtggaaatggctgccgtgaaccacaccatacttgccctcgcccggcagggcgctaacgagataaagacagaagctttggacgatgactag

SEQ ID NO: 27246 - DNA, 1263 bp, synthetic construct
  source 1..1263: mol_type = other DNA; note = Synthetic coding sequence
atgctgagcagcttccccgtggtgctgctggagaccatgagccactacaccgatgaaccccggtttactatcgagcagattgacctgctccagcgactgcggagaacgggcatgacaaagcacgagatcctgcacgcgcttgagacactggaccgtcttgatcaggaacactctgataaattcggtcgacggtcatcttatggaggaagttcatacggcaacagcacaaataatgtgcccgccagcagttctactgctacagcatctacccagacccagcatagcggcatgagcccaagtccttccaactcctacgacacctcacctcagccttgtacgacaaatcagaatggcagagagaacaatgagaggttgagtaccagtaatggcaagatgagtccaacaagataccacgccaactcaatggggcagcgctcctacagctttgaggcctcagaagaggacctggacgttgacgacaaggtggaggagctcatgcggcgcgattcttccgtgataaaagaggaaattaaagcttttctggcaaacagacgtatttcacaggcagtggtggcccaagtgacagggatctctcagtctagaatctcacattggctactccagcagggcagtgacctgtctgaacaaaaaaagcgggcattctacaggtggtaccaactggagaagacaaatccaggagcaactcttagcatgagaccagctcccattcccatagaggaccccgaatggcgccagactccaccccccgttagcgcaacctccggcaccttccgcctgagacgaggctcaagatttacctggcgcaaggaatgtcttgctgtcatggaatcctatttcaatgagaatcagtaccccgacgaagccaagagagaggagatagcgaatgcttgtaacgcagtcatccagaaaccagggaagaagctgagcgatcttgagagggtaacatctttaaaggtttataattggtttgcaaatcggaggaaagagatcaagcgccgcgcaaacatcgaggccgcgatcttggaatctcatggtatcgacgtccagagcccagggggacatagcaatagtgacgacgtcgatggaaacgattactctgagcaggatgattccacttcgcatagtgatcaccaggacccaatttcccttgcagtggagatggcagccgtcaatcacacgatcctggcgctggctcggcagggcgcgaacgagatcaaaacagaggctttagacgatgactag

SEQ ID NO: 27247 - DNA, 915 bp, synthetic construct
  source 1..915: mol_type = other DNA; note = Synthetic coding sequence
atgctgagcagcttccccgtggtgctgctggagaccatgagccactatacagacgaaccgcggttcacaattgaacagatcgatctactccagcgtctgcgccgaactgggatgacaaaacatgagatactgcacgccctcgagaccttggatcgcttggatcaggagcactcagacaaattcggaagacgcagcagctacggcggatccagttacgggaactccacgaacaacgtgcccgctagttcgtcaacagctacggcttccacgcagacacaacacagtggcatgagcccttcgcccagcaactcttacgacacgagtcctcagccttgcacaacaaaccaaaatgggagagagaacaatgaacggctcagcaccagtaatggaaagatgagtcctactaggtaccacgcaaacagcatgggtcagcgctcatatagtttcgaggctagcgaagaagacttggacgtggacgacaaggtggaggaattgatgcgacgcgacagttctgtcatcaaggaggaaatcaaagcatttcttgccaaccggcgcatctctcaggcagtagtcgcacaggtgaccggcatttctcagtcaaggattagccactggctactgcagcagggctccgatcttagcgagcaaaagaagcgagccttctatcgctggtaccagttggagaaaactaatcctggggcaactttatccatgcggccagccccaataccaatcgaagacccagaatggcggcagactcctccacccgtgtccgccaccagcgggacgtttcgcctgcgccgcgggtcacggttcacctggagaaaagagtgcttggccgttatggaaaggaacacgtggtctccagagcggcggatggaggaaaataagtggaagctgctgtcggccggctag

SEQ ID NO: 27248 - DNA, 1332 bp, synthetic construct
  source 1..1332: mol_type = other DNA; note = Synthetic coding sequence
atgctgagcagcttccccgtggtgctgctggagaccatgagccactatacagatgagcccaggtttactatcgaacagatcgacttgctgcaacgtctacgccgcacaggcatgacgaagcatgagatccttcacgccctggaaactttggacagactggatcaggagcacagtgacaagtttggaaggcgctcatcctacggagggagttcgtacggcaattccaccaacaatgtccccgcttcctcttctaccgctacagcttcgacccagacccagcatagcggcatgagcccctcgcccagcaacagttatgacactagcccccagccatgtaccactaaccagaacggccgcgaaaacaacgagaggcttagcacctccaacggtaagatgtctccaactcgctaccatgccaactctatgggccaacgtagctatagcttcgaggcgtcggaggaagatttagatgtggatgataaggtcgaagagttaatgaggagggatagttctgttattaaggaagagatcaaggccttcctggcaaacaggcgtatttcgcaagcggtggtggctcaggtgacaggcatcagccagtcaaggatctcgcactggttgctgcagcagggctctgacctgtccgagcagaaaaaaagagcattctatcgatggtaccagctggagaaaacgaacccgggggccacattatccatgagacctgcaccaataccgatcgaagaccccgagtggcgacagacaccaccaccggtctcagccacgagcgggacttttcgccttagacgcggcagtcggttcacctggcgcaaggagtgcctagcggtcatggagtcttacttcaatgaaaaccagtatccagatgaagccaagagagaggagattgcaaatgcctgcaacgccgttatccagaagcccggtaaaaagctgtctgacctagaacgcgtgaccagtctgaaagtgtacaactggtttgcaaatcgcaggaaagaaattaagaggcgcgcgaatatcgccgcgatcctggagagccatggaattgatgtgcaatctccagggggtcattctaacagcgatgacgttgatgggaacgactattctgaacaggacacctggcaggttagaaatggggaagaggaggaaggtaggtcatccgagggaggcagagaagcagagaaagacgattctacctctcatagcgaccatcaggaccctatcagcctagcagtggaaatggccgccgtgaaccataccatactggcgcttgctaggcaaggcgctaatgagattaagactgaggcattggacgacgattag

SEQ ID NO: 27249 - DNA, 357 bp, synthetic construct
  source 1..357: mol_type = other DNA; note = Synthetic coding sequence
atgctgagcagcttccccgtggtgctgctggagaccatgagccactacacggacgaaccccggtttactattgagcaaattgacctgctccagcgcctgcgacggaccggcatgaccaagcacgaaatcctacacgccctggagacattagatcgtctggaccaggagcattccgacaaattcggcagaaggtcaagctatggcgggagctcctatggcaattcaacgaacaacgttcctgcatcaagctcaaccgccaccgcgtccacacagacacagcacagcggaatgtctccgtcacctagtaacagttatgatacctcaccccaaccgtgtactaccaaccaaaacggctag

SEQ ID NO: 27250 - DNA, 1332 bp, synthetic construct
  source 1..1332: mol_type = other DNA; note = Synthetic coding sequence
atgctgagcagcttccccgtggtgctgctggagaccatgagccactacaccgacgaacctaggttcaccatcgaacagatagacctactgcagcgcctgaggcgtacgggcatgacaaaacacgagattctccacgcactcgaaactctggacaggttggatcaagaacattctgacaagttcggtcggcggagctcttacggaggaagctcttacggcaactctaccaacaatgttccagcttccagctccactgctactgcctccacccagacccagcattctggaatgagtccgtcgccctctaattcatacgatacttctccccagccctgtactactaatcagaacgggagagaaaataacgagcggctgagcactagcaacggaaaaatgtccccaactcggtatcatgcaaattccatgggccagcggagctacagttttgaagccagcgaggaagacctggacgtagatgacaaggttgaggagctgatgaggagggacagcagcgttattaaggaagagataaaagcattccttgctaatcggaggatatctcaggctgtagttgcgcaagtgaccggaattagccaatcaagaatttcccactggctgcttcagcaggggtctgacttatccgaacagaaaaaacgagctttttataggtggtatcaactggaaaaaacaaaccccggggctaccctctcaatgagacccgcgccaatacctatcgaggaccctgagtggcgccaaacccctccacccgtgagcgcaactagtggtaccttccgcctgcggagggggtcccgatttacctggaggaaggaatgtctggctgtgatggagagctacttcaatgaaaaccagtaccctgatgaagccaagcgcgaagagattgccaatgcgtgcaatgcggtgattcaaaagcccggaaaaaagttgagcgatctggagagagttacttcgctcaaggtatacaactggttcgccaaccgtaggaaagaaattaagcgccgagcaaacatcgcggctattctcgaatcccacggcatcgacgtccagtctccaggaggtcacagcaactcagacgacgtcgatggcaacgattacagcgagcaggacacatggcaggtgagaaacggagaggaggaggagggcagatccagcgaaggcgggcgagaagccgaaaaggatgattcaacgtcccactcggaccatcaagatcccatctccttggctgtcgagatggctgctgtgaatcacacaatccttgctcttgcgcgtcagggcgccaatgagattaaaactgaggctctcgatgacgactag

SEQ ID NO: 27251 - DNA, 1218 bp, synthetic construct
  source 1..1218: mol_type = other DNA; note = Synthetic coding sequence
atgctgagcagcttccccgtggtgctgctggagaccatgagccactataccgacgaaccaaggtttactatcgaacagatcgatttgctgcagagacttcgcagaacagggatgactaaacacgaaatccttcacgctcttgagactctcgatagactggatcaggaacactcagataagttcggaagaagatcctcttacggaggttcgagttacggcaattccacgaacaacgtgcccgcatcatcaagcaccgccaccgcgagtacacaaacccaacacagtggtatgagtcccagtccctctaactcctacgacacctccccacaaccttgcacaacaaaccagaatggtcgcgagaataacgaaagactgagcactagcaacggaaagatgtcacccacaaggtatcatgcgaacagcatggggcagaggtcgtactcgttcgaagcctccgaagaggacctggatgtagatgacaaggtggaggaactgatgcgacgagatagctcagttatcaaagaagagataaaggcctttctcgctaatagacgcatttcacaggctgtggtagcgcaggtcacaggtatttcccaatccagaatctctcattggctgctgcagcagggcagtgacttgtctgagcagaagaagcgcgctttttacagatggtaccagctagagaaaacaaatcctggagctactctcagtatgagacccgcacctattcctatcgaagatcctgaatggaggcaaacacctcctccagtgtccgccacctctggtactttccgcctccgccgaggaagtaggtttacatggagaaaggaatgcctcgctgtgatggaatcctactttaacgaaaatcagtatccagacgaggccaagagggaggaaattgccaacgcatgtaatgccgtgatacagaaacccggcaagaaactgtctgacctggagagggtgacctctctgaaagtctacaactggttcgccaatagaagaaaagagatcaagaggagggccaacatcgcggccattctagaatcacatggcatcgacgtgcagagccctggcggccacagcaattcggatgatgtcgacggcaacgactattctgagcaggacacctggcaagtaagaaatggcgaagaagaagaggggcgctctagtgagggcggcagggaagcggagaaggttgaggaagagagacgcatttag

SEQ ID NO: 27252 - DNA, 1380 bp, synthetic construct
  source 1..1380: mol_type = other DNA; note = Synthetic coding sequence
atgactgctgaagagatgaaggctacagagagcggagcccaatcggcgcctctcccaatggaaggcgtagacatatctcccaaacaggatgagggcgtcttgaaggtcatcaaaagagagggaaccggtactgagatgcccatgatcggagatcgcgttttcgtgcactacacaggctggttactggacggaacaaaattcgacagttcccttgatcgcaaagacaagttcagcttcgatctcggtaaaggagaggtgattaaggcatgggatattgccattgcaaccatgaaagtgggagaggtgtgtcatattacttgcaagcctgagtatgcttatggctctgccggatcccccccaaagatcccacccaatgccaccttggtttttgaagtagagctgttcgagtttaagggggaagatttgaccgaggaggaggacggaggaattatccgtaggatacaaacgcgaggtgagggttatgctaaacccaacgaaggagctatcgtagaagtggcactggaggggtattacaaggataagctctttgaccaaagagaacttcgcttcgaaataggggagggtgagaatctggatcttccttacggactggagagagccatccagcgaatggagaaaggtgagcattccattgtgtacctgaaaccttcatatgcctttggtagcgtggggaaagaaaaatttcagatacccccaaacgcggaacttaagtatgagctgcatctgaagagcttcgaaaaggctaaggagagctgggagatgaactctgaagaaaaactggagcaaagcacgatagtgaaagagagggggacagtctattttaaggaagggaagtacaagcaggctctgttgcagtacaaaaagattgtgtcctggttggaatatgagtcgtctttctctaacgaggaggcccagaaagcccaggccctgcgcctcgcttcccacttgaatctggctatgtgccacctcaaactgcaggcctttagtgctgcaatcgaatcatgcaacaaagcactcgaactggattctaataacgaaaagggactcttccgcaggggcgaagctcatctggccgtgaatgattttgagctggccagagcggatttccagaaagtgctgcagctgtacccaaacaataaggctgccaaaacacagctggctgtttgtcagcagcgtattcgcaggcagctggccagggagaaaaaactttacgccaacatgttcgaacgcctggcagaagaagaaaacaaggccaaggcggaggcctcgagcggcgaccacccaaccgacacggagatgaaggaagaacagaaatcaaatacggcaggtagccagagtcaagtcgaaactgaagcatag

SEQ ID NO: 27253 - DNA, 477 bp, synthetic construct
  source 1..477: mol_type = other DNA; note = Synthetic coding sequence
atggagcctccggagggggcaggtactggtgaaatcgtgaaagaggccgaagtgccgcaggctgccttgggcgtgccagctcaaggaactggagataacggtcatactcctgtcgaagaggaagttggaggcatccccgtgcctgcaccaggattgctgcaggtgactgaacgcaggcagcctctgtcctctgtgtccagtttggaagttcattttgacctcctcgacctgactgagctgaccgacatgtcggatcaagagctcgctgaggtgtttgctgatagtgacgacgaaaaccttaacacagaatctcccgcaggactccaccccctgcctcgagcaggctacttgaggtcaccttcttggacgagaactcgagcggaacagagtcacgaaaaacaaccgctgggggacccagagcggcaggcgacagtgctagatacatttctgactgtggaacgaccccaagaagattag

SEQ ID NO: 27254 - DNA, 954 bp, synthetic construct
  source 1..954: mol_type = other DNA; note = Synthetic coding sequence
atggcatctgtcatcccagcaagcaatcggtctatgagatctgatcggaatacctatgtagggaaaagatttgtccacgtgaaaaacccataccttgatctgatggacgaggatattttgtatcatcttgatcttggtaccaagactcacaatctccctgccatgttcggggatgtgaagttcgtatgcgtgggagggagccccaatcgcatgaaagccttcgccctattcatgcacaaagaactgggctttgaggaggctgaggaagacattaaagacatctgcgcaggtaccgaccgctattgcatgtacaaaacgggaccagtgttggcgatcagccatggcatgggcatcccatctatctcgatcatgctgcatgaattgatcaagttgctgcatcatgccagatgttgtgatgttaccattataaggataggcacaagtggaggaatcggcatcgcccctggtactgtcgtgataacagatatcgctgtggatagctttttcaagccccgatttgagcaagtcattcttgataatatcgtaacgcgcagcacagaactagacaaggagctctctgaagaattgtttaactgtagcaaagaaattccgaatttcccgacactggtggggcataccatgtgcacatacgacttctacgagggacaagggagattggacggagctctctgctctttttctagggagaaaaagttggattatctgaagcgcgcttttaaagccggtgtccggaacattgagatggagtctaccgtgtttgccgcaatgtgcgggttgtgcgggctcaaagcagccgtggtatgcgtgacactcttggaccgtttggactgcgatcagatcaacctgcctcacgacgtcctggtcgagtatcagcagagaccccagctgctgataagtaacttcatccgcagacggctggggttgtgcgattag

SEQ ID NO: 27255 - DNA, 1095 bp, synthetic construct
  source 1..1095: mol_type = other DNA; note = Synthetic coding sequence
atgtcagaagtggaagccgctgcaggcgctactgccgtgcctgcggcaactgtccccgctactgccgctggggttgtggcagtggtcgttcctgttcccgctggcgaacctcaaaagggcggtggcgcaggtgggggaggcggagccgcatcggggccagcggcaggcacaccttctgcccctggcagccgtacacccggtaatccagccacagccgtgtctggaactccggctccccctgcacggagccaagctgacaagcctgtgttggcaattcaggttctaggcacggtgaaatggtttaacgtcagaaacggatacgggtttatcaacagaaatgatacgaaggaagatgttttcgtgcatcaaacagctattaagcggaataacccacgaaaattcctccggtctgtgggggatggcgagactgtcgagttcgatgtggtcgagggagaaaagggggcagaggcaaccaacgtgacaggacccggaggcgtgcctgtgaagggcagtcggtacgcccctaacagaagaaaatctaggaggtttatcccacgccctccatcagttgccccacccccaatggtcgccgagattccctcagctgggactggccctgggagtaaaggcgagcgcgctgaggatagtgggcagcgaccgaggagatggtgcccacctccgttcttctaccgaagaaggttcgttaggggacccaggccacccaaccaacagcagcccatcgagggaaccgatcgtgtggagccgaaagaaacagcgcctcttgaggggcaccagcagcagggagatgagcgggtgcccccaccccgattccgcccaaggtatcgtcggcctttcagacccaggcctagacagcagccaactaccgaggggggagatggagaaaccaagccttctcaaggcccagctgatggctccagacccgaaccccagcggcctaggaataggccctacttccagcgtcggaggcaacaagcccctggcccacagcaggccccaggcccacggcagcctgcagccccagagacttccgcacctgttaactccggggatccaacaactactatattggagtag

SEQ ID NO: 27256 - DNA, 5706 bp, synthetic construct
  source 1..5706: mol_type = other DNA; note = Synthetic coding sequence
atggctaccttccggaataaccatatgaagacgaaagcctccgtgcgcaagagtttttctgaggacgtttttcaaagcgttaagtctctgctccagtcccagaaggaactctgctccgtgactgccgaggattgccttcagcaagatgagcacgcaaatctgaccgaggttacatttctcggcttcaacgaggaaaccgatgccgcacacatccaggatctcgcagccgtgagccttgagttacctgatattctgaactcattgcatttttgtagcctgaatgaaaacgaaatcatctgcatgaagaacatcaataagcccctcgacatttcaagtgacccattaaaccaatctcatccttcaggcatgctgtgtgtcatgagagtgagtccaacatcaccccgtctgagaatagactttatctttagcctgctttcaaagtatgcaactggcatcagatacacactcgatacatttcttcaccagaaacaccaattggaaacaaccgacgaggacgacgatgataccaaccagagcgtaagctctatcgaggacgatttcgtcaccgctttcgagcatctcgaagaggaggagacgtccaagccttacaacgacggtatgaacatcactgttctgaggtctcagtgtgatgccgcttctcagaccgtgactggacaccatttggagacccatgatctaaagatcctgatttcaagtggtcaacagaagtctttggcaaagcccagcacctccagtgtgaatgtcctggggcacaaggaactgccgtctgtgaagacatcagtgacaacgtctattagcgaaccatggacgcagagatccttttatcggtccagcaatgcttccgataaagatagtgatttgcagaaaacattttttagctcatcccccgcttactcctcagagagcgagtgcagttctccttcgccggtgatttttctggatgaagaaggataccaaaaatcacttaaggccaaactcgagttgccaaagatccccgtcatgaaagacgatatagaagattcagactccgaagtgtctgaattctttgatagctttgaccagtttgatgaactggaacagactctggaaacttgtctgtttaataaggatccagtgatcggtaaaagctctcagcggaagggtcacaagcatggaaagagttgtatgaacccccagaagttcaaattcgatcggccagcacttccagccaatgtacggaaacccaccccccgaaagcccgaatccccatacggcaacctctgtgatgcacccgacagtcctaggcctgttaaggcctcaagagaggattcaggcctgttctctccaatccgctcctcagcttttagtccccttggaggttgcactcctgcagagtgcttctgccagactgatattgggggagaccgaatacatgaaaaccatgattcagtgtactatacatatgaagattacgcgaagagcattagctgtgaagtactggggtccgtgctgagaactcatcataccaacactttatcaaacataaactccatcaaacatggagagaacaagaccgtgacattcaagcatggaaacctcgatcagaaaaataagagcaagaacaagtctctgatgattaaggactcaatccagaaatttgcagcagatcttgtggagaagtcttttggttcagcgtttaaagaccttcagaagggagtgagttcctgtaccaacgctttgtaccatttggcaattaaattaacgtcttccgtgctgcagatggccttcgacgaactgaggagacaaagggccttctccctgaaggagagggcgatttcagggttagcgaatttcctagtgtcagaggctctgtccaacgctttgaaggacctgcagtatgttaagaagcaaatattcaccaacactgttgccagattcgcagcagacctagcagaggagctcgtgttcgagggaataatggaagtttgccaatttagttatcctcagacccctgctagcccacagtgtggctcattcgactttgaggataaggtggtgaaactgtatgcaaaagatctctctgagtctgtgattcaagaggccttcattgaactgagtcaggtcgacgtcacattcaccacaaaggctgccgtgagtgttagcacggataacattaagtacgtgtctgccgaatccgttgtgccatctacacaagccgttacattttccccgagctttcacaaccaagccatcatggtgactaagcccgtgcaagaatataagaaagaatataccgtgcagcaagccctgttctgcactagtgggattgtgactagcataccagttcccctcgcaggaagcgctttgctcccataccatatttcttccactgcatgccaagccaaagctcatctttcatctgacgactcaaactccaacggagactctgctcaagtgcatatcgccaccaagaaccgagaggagaaggctgcctgtcttcgaaacatttgcctgcccagcgaacataacccaggcaatcaaaatgatttcaagcccaccaatgacgatatcgaaatgcagtcaagctccaaactgccaaacgatcctgctatcatttctaatttctccgccgctgttgtgcacaccattgtgaatgagaccttggaatcaatgacgtccctggaagttaccaaaatggttgatgaacgaaccgactacctcaccaagagtctgaaagagaaaacccccccattctcccattgtgatcaggcagtgctgcaatgttccgaggcatcaagcaataaagacatgtttgccgaccgcctgtccaaaagcataattaaacacagtatcgacaagtctaagagcgttattcccaatattgacaagaatgctgtgtataaagagagtttaccagtatcgggagaagaatcgcagctgacaccagaaaagtctcccaaattccctgacagccaaaatcaacttacacattgtagcttgtcagcagccaaagactgcgtgccggagtgcaaggtgtccatggtccacgggtcgtctcttgaaaccttaccctcctgtccggcagtgaccggccaaaaaagcgatttgaaagagagtgccaaagaccaaccactgaagaaacacaacctgaattctacctccctggaagcactgtcatttgggcaggagaatccattcccgcactctcacactttctcttccacagccctaacctgtgttgacgggctgcatgtcgaggacaaacaaaaggtcagagataggaatgtcatcccggatacgcctcctagtactccactggtgccttcacgggcatcaagcgagtgggacataaaaaagcttaccaaaaagctgaaaggtgaactggcaaaagagtttgcacctgctaccccaccatctaccccacacaacagctccgtcggcagcctctcagagaacgaacagaacaccatagagaaagaagagttcatgctgaagctgatgcggtccctgagtgaggaagtggaaagctcggaaagcggagagctccccgaggttgacgttaagtccgagcattcaggcaagaaggtacagttcgccgaggctctggccacccatattctgtctctcgccacggagatggcagcttcacacctggataataagatcatccaggagcccaaggtcaagaacccatgtctgaatgtccaatcacagcgttctgtctcaccaaccttcctgaatccttcagatgagaacctaaagactttgtgtaactttgccggagacctggccgcagaggtaatcacagaagccgaaaaaatcgccaaggtgcgcaactgtatgttgttcaagcagaagaagaactcctgctacgctgacggggatgaagactataaggtggaggagaagttggacattgaggctgtcgtccaccctagagaagtggatcctttcatcctgtcccttcccccatcctcctgtatgtcaggcttaatgtataagtacccgagttgcgagagtgtgaccgatgagtacgctggacatctgattcagatcctaaagcaagagggaggaaattctgaattaattatggaccagtatgccaatagactggcatatagatcagtcaagtcagggctgcaagaggctgccaagaccactaaagtacagtgcaactcacgaatgttcccagttcccagctctcaggtgaagaccaataaggagttattaatgttttctaataaagaacaccatcaggaagcagacaagaaacgccaatctaagcgtaatgaaggctatttctgtaagaaccagacctgtgagcgtacgctagatccttaccgaaacgaggtgtcgcagctgtacagtttctctaccagcctggttcacagcatcaccaaggacgcgaaggaagagctgaccgcttctttggtcggtctccccaagtccctgactgacagctgcttgtttgaaaagtccggctatgaagaggacaacgagtgccacgtaacacctgagctgcccaaatctctgcagccgtcctcccagaatcaccgcttttaccactcaaccggaagtctcaacggatacggctgcggggacaatgtcgtacaagccgtggaacagtacgcaaaaaaagtggtggatgacaccctggagttgaccttaggcagcactgtgttccgggtctcagagactacaaagtcagccgacagagtgacatatgcagagaagctgagtcccttgactggccaggcttgtaggtattgcgatctcaaggaattgcacaattgtacggggaactccagtcagcacttctttcgccagggctcactggcaagcagcaagcccgcaagtaaccctaagttcagtagtcgttaccaaaagtcccggatcttccacctcagtgtgcctcagatccacgtgaacctcgataagaaggcggtattggccgaaaaaatcgtcgccgaggcaatcgaaaaagccgaaagggaactctcctccacatcactggctgctgatagcggaataggacaggagggtgccagttttgcagaatcgttggcaacagaaacgatgactgcagctgtgacaaacgtcggccatgccgtgtcatcctctaaagaaatcgaggattttcagtcaaccgagtcagtaagttcacaacagatgaacctgagtatcggggacgacagcacagggagctggagtaacctctcttttgaagacgagcaccaggacgagtcatctagcttccatcatctttcagagagtaacggcaatagcagttcctggagctccttgggattggagggcgatttgtacgaagataatctgtcctttcccactagcgactcagatgggcctgacgacaaagatgaggaacatgaagatgaagtcgagggactcgggcaggacggcaaaacacttttaatcactaatatagatatggaaccatgtactgtggaccctcaactcagaatcatccttcagtggctgattgccagtgaagcagaagttgctgagttatattttcacgattccgctaataaggagttcatgctcctctctaaacagttacaggaaaagggatggaaggtaggagacttgctacaggcggtcctgcaatattacgaagtgatggagaaggcttcatccgaggagagatgcaagagcctgttcgattggctgctggaaaacgcttaa

SEQ ID NO: 27257 - DNA, 417 bp, synthetic construct
  source 1..417: mol_type = other DNA; note = Synthetic coding sequence
atggccgagctccagcagttacgggtgcaggaggcagtggaaagtatggttaagagtctagaacgggagaacataagaaaaatgcagggcttaatgtttagatgctcggccagttgttgtgaggactcgcaggcctcaatgaagcaggtgcaccagtgcatagagcggtgccatgtcccgctcgcccaagcccaggccctggtgacttccgagcttgagaaatttcaggacagacttgctagatgcacaatgcattgcaacgacaaagctaaggactccattgatgccggtagcaaagagttacaggtcaagcagcagctcgatagttgcgttacgaagtgtgtggatgatcacatgcacctgatacccaccatgactaagaagatgaaagaagcactgctgtctatcggcaagtag

SEQ ID NO: 27258 - DNA, 1110 bp, synthetic construct
  source 1..1110: mol_type = other DNA; note = Synthetic coding sequence
atgactctggaagctattcgttacagccgagggtcactgcagattcttgatcagctgcttcttcccaagcagtcgagatacgaggctgtcgggtctgtccatcaagcttgggaggctatccgcgcaatgaaggtgcggggagccccagccattgcactcgtgggatgcctgtcattggcggtcgagctacaggcgggtgccggagggcctggtctggctgcactggtggccttcgtgagagacaagctcagcttcctggtgactgctcgtccaacagctgtaaatatggcccgagcggctcgggacctggcggatgtcgccgctcgcgaagccgagcgggaaggggctacagaggaagcagtccgcgaacgagtgatctgctgtacggaggacatgcttgaaaaagacctgagggataataggtccataggcgacctcggcgctaggcacttgctcgagcgagttgccccaagcggaggcaaagtcacagtgctcactcactgcaatactggggctctggctacagccggatacgggacagccctgggggttatacgttcactgcattcactcggcagactggagcacgctttctgtacagaaaccagaccctataaccaaggggctaggctaacagcattcgaacttgtgtatgagcagatcccagcaacgttgatcaccgactcgatggttgcagccgctatggcccatagaggagtgtcggccgtcgtggtgggtgcggaccgtgttgtagcaaatggggacaccgccaacaaggtcggcacttatcaactagccattgtggcgaaacatcatggaattcccttctacgttgctgctccaagtagctcctgcgatcttagacttgagaccggcaaagaaatcatcatagaggagcgacctggtcaggagctgaccgatgtgaatggggtgcggatcgctgcccctgggatcggagtttggaaccccgctttcgatgtcaccccgcacgatctcatcaccggaggtatcatcaccgaattaggggtcttcgccccagaagagctgaggactgctcttaccactacaatcagcagcagagacggcacactcgatggccctcagatgtag

SEQ ID NO: 27259 - DNA, 3660 bp, synthetic construct
  source 1..3660: mol_type = other DNA; note = Synthetic coding sequence
atgatgtctttgagcgtgaggccacagagacgcctcttgagcgccagggtgaaccgtagtcagagcttcgccggagtactaggatcccacgagcggggaccacgttcatttccagtgttcagcccgcctgggcctccccgtaaaccccctgccctcagccgtgtgtcccggatgtttagcgtggcacatccagccgcaaaagtaccacaacccgaacgccttgacctggtgtatacagcattgaaacgcggattgacagcttatctggaagtgcatcagcaagaacaggaaaagctacaaggtcagattcgagaaagcaagcggaacagccgtctgggcttcctttacgacctggacaaacaagtgaagagcattgagaggttcctgcgcagactggaattccacgcctccaagatagatgaattgtacgaagcctactgtgtccagcgtagactgcgagatggggcttacaatatggtgcgtgcttataccacggggtctcccggttctagagaggcccgagacagcctagctgaagccacgagaggacaccgcgagtataccgagagtatgtgcctgctggagagcgaactggaagcacaattgggagaatttcatctgcgcatgaagggtctggccggatttgctcgtctatgcgtcggagatcaatacgaaatctgcatgaagtatggcagacagaggtggaagctgagaggacgcatcgaaggctccgggaaacaggtgtgggactcagaggagactatatttctgccattgctgacagaattcctcagtatcaaggtgaccgagctgaaagggctcgcgaaccacgtggtggtgggatcagtttcatgcgaaactaaggatttgttcgcggctctgccccaggtcgtggctgtggatatcaacgacctgggaacaattaagttgtcactggaggtgacttggtctccgttcgataaggacgatcagccttccgctgcctcctctgtgaataaagcatccacagtcaccaagcggttttctacttactcccagtcacccccagacaccccaagtttgcgcgagcaggccttttacaatatgttaagacgccaggaagagctcgagaatggcacagcatggagcctgtccagtgagtctagtgacgactcatcgagcccacagctgagcgggaccgcacggcattctcccgcacctagaccactagtacagcagccggaacccctgcctatccaagtggccttcaggcggccagagaccccgtcttccggcccactcgacgaagagggagctgtcgcccctgtgctcgctaatggccacgccccatattcacggacactgtcgcacatcagcgaagccagtgttgatgctgctctggcagaagcttccgtggaggcagtcggcccagaatcgctggcatgggggccttcccccccaacacatccagcaccaacacacggggaacacccctcccccgtacccccagctctcgatccgggacactccgcaacttcgtccactttgggaacaacgggttcagtccctactagtaccgatcctgccccatccgcccacctcgactcggttcataaaagtactgactcagggcctagcgaactgccaggccctacacacactacaactggctcaacttattcagccataactaccacccactccgccccatctccactaacacacacaactacaggctccactcataaaccgatcatcagtacacttactacaactgggcctaccctgaatatcatcggtccagtccagactacaacctccccaactcacacaatgccatcgcccactcacacaaccgcatcccctacgcatacctcgacttctcctacccacaccccgacctctcctacccacaaaacttccatgtctcctcccacaaccacaagccctacacccagtggaatgggcctagttcagaccgccacatcgcctacccaccccaccacatccccgactcaccccaccacatctccaattttaatcaacgtctcgccgagtacatctttggaactggctaccctgtcgtccccttctaaacattctgatccgacgctgccgggaactgactccttgccatgcagcccgccagtcagcaactcgtacacccaagccgatcctatggccccacgaaccccacatccgagtcccgctcactctagccgcaagccgctcacaagccccgcaccagatcctagcgagagtacagttcagagcctctccccgaccccttctccacctacacccgctccacaacactctgatctttgtttagctatggccgtgcagacgccagtgcccacagcagccggtgggtcgggagatcggtcacttgaagaggctcttggcgctctcatggccgctctggatgattatcgtggccagttccccgaactgcagggcttagaacaggaagtgacaagattggaatccctcttgatgcagcgccaggggcttacccgatcacgtgcatcatcgctgtccattactgtcgagcatgccttggaaagtttcagcttcctaaacgaagatgaggatgaggacaacgacgtgccaggggacaggcccccttcgtcacccgaagctggtgccgaagattcgatcgattcgccttctgccaggcccttgtcaacaggctgtccggcactagacgccgcactggttaggcatctctaccactgcagccgactgctactgaagttggggacttttggtccacttcgctgtcaggaggcgtgggcactagaaaggttactccgtgaggctcgggtcctagaagccgtctgcgagttcagtaggaggtgggagatccctgctagttctgctcaggaagtggtccagttcagcgctagcaggcccggatttctaactttctgggatcagtgcacagagaggctgtcctgtttcctgtgtccagtggaacgcgttctgctcaccttttgcaaccagtacggtgcccgactgtcactgcgacaacctggcctggccgaagcagtgtgcgtgaagttcttggaggacgccttggggcagaaattgcccagacgccctcaacctggaccaggggaacagctgaccgtctttcagttctggtcattcgttgagacacttgacagccccactatggaggcctatgtgacggagaccgctgaagaggttctgttagttcgtaatttgaattccgacgatcaggcggtggtacttaaggctcttaggctcgcacccgaggggagactgaggagggatggcctacgggcactgtcatctctgctggtgcatgggaacaacaaggtcatggcagctgtttctacacagctgcggtcccttagcctgggaccgacgttcagggagcgcgcactgctgtgttttcttgaccagctggaagatgaagacgtgcagacccgggtcgctggctgccttgcactgggctgtatcaaagccccagagggtatcgaacctttagtttatttgtgccagaccgatactgaggctgtgagggaagctgctcgtcagagtttgcagcagtgtggcgaggaaggacagagcgctcatcgtaggttagaggagtcgcttgacgctctgccgaggatttttgggcctggttctatggcctccaccgccttttag

SEQ ID NO: 27260 - DNA, 1326 bp, synthetic construct
  source 1..1326: mol_type = other DNA; note = Synthetic coding sequence
atggcatcagtggcagccgctagagccgtgccagtggggagtggtctgcgaggcttgcaaagaaccctgcctctagtggttatactgggggctaccgggacagggaaaagtacattggcgctgcagctgggtcaacgccttggaggagaaatcgtttccgcagactctatgcaggtgtacgagggattagatatcataacaaacaaggtgagtgcccaggagcagaggatatgtcgacaccacatgatcagcttcgtggatccccttgttacgaattacacagtggtggatttccggaatagagctactgcccttattgaagacatcttcgccagggataaaataccaatcgttgtggggggaacgaactactacatcgagtccctgctgtggaaggtgctggtaaatacaaagccccaggagatgggtacagaaaaggttatcgatcgcaaagtagagttggagaaggaagatggactggtgctgcacaagcgccttagccaggtggacccagaaatggcagctaagctgcatccacacgataagcgcaaggtcgcgagatcccttcaagtgttcgaagagaccggcatttcacatagcgagtttctgcacagacagcacacagaagaaggaggaggtcccctgggaggccctttgaagtttagcaacccctgcatcttatggctccacgctgatcaagccgttctggatgagcggttggataagagggtcgatgacatgctagctgctggattactcgaggagctgagggattttcataggaggtacaaccaaaaaaacgtttccgaaaactcccaggattatcagcatggaatcttccaatctataggctttaaagagtttcacgagtacctgatcactgagggcaagtgtactctggagaccagtaatcagctcctgaagaagggacccggtccgattgtacctcctgtctatggacttgaggtaagcgacgtttcaaaatgggaggagagtgtgcttgaaccggctttggagattgttcaaagctttattcaggggcacaagccaactgccacccctattaagatgccttataatgaggccgaaaacaagcgcagttaccacttatgtgacctttgtgataggatcataatcggagatcgtgagtgggccgctcacattaaaagcaaaagtcatctgaatcagcttaaaaaaaggcggaggctggattcagacgcagtgaacacaattgagagccaaagcgtttctccagaccacaataaggagccgaaagagaaaggtagtcccggacagaacgaccaggagttgaagtgtagtgtgtag

SEQ ID NO: 27261 - DNA, 618 bp, synthetic construct
  source 1..618: mol_type = other DNA; note = Synthetic coding sequence
atggcagaacctctgcagccagaccccggagctgccgaggacgctgctgctcaagctgtagagacccccggttggaaggctccggaggatgccggtccccaacctgggagttatgagattcgccattacggccctgccaagtgggtgtcaacctccgtggaatcaatggattgggactcagctatccagactgggttcactaaacttaattcatacattcagggcaaaaacgaaaaggagatgaagattaagatgaccgcccctgttactagttatgttgagcccggttccgggcctttcagcgagagcaccatcaccattagcctctacatcccatcagaacagcagttcgatcctccaaggcctcttgaaagcgacgtgttcattgaagacagggcagaaatgaccgtgtttgtgagaagctttgatggtttctccagtgcgcaaaagaaccaggaacagctactgaccctagccagcattctgcgggaggacggaaaagtttttgacgaaaaggtctactataccgctgggtataattcgcccgtcaagttgttgaatcgcaataacgaagtctggttaattcagaagaacgaaccaacaaaagaaaacgagtag

SEQ ID NO: 27262 - DNA, 624 bp, synthetic construct
  source 1..624: mol_type = other DNA; note = Synthetic coding sequence
atgtcttgcacgattgagaaaattctcacggatgccaaaactttattagaacggttaagagaacacgacgcagccgctgagagtctggtggaccagtccgccgctttgcatcgcagggtagctgcaatgcgtgaagctggaacagcgctgcctgatcaatatcaggaggatgccagcgacatgaaggacatgtccaagtataagccccacatcctgctgtcccaggaaaacacccagataagggatctccagcaagaaaatcgagaactgtggatcagtctggaggagcatcaggatgctctggagctgattatgagtaaataccgtaagcagatgctccagctgatggtcgctaaaaaagccgtggatgcagagccagttttaaaagcacaccagtcacatagtgcagagatcgaaagtcagatcgaccgcatttgtgagatgggggaagtgatgcggaaggcagtgcaagttgacgatgaccagttctgtaagatccaggagaaactcgcccaactggaactcgagaacaaggaactcagagagcttctttctattagttccgagtcgctgcaggccaggaaagaaaattccatggacactgcatcccaggctatcaagtag

SEQ ID NO: 27263 - DNA, 1032 bp, synthetic construct
  source 1..1032: mol_type = other DNA; note = Synthetic coding sequence
atgaacatccacagaagcactcccatcacaattgcaagatatggcagaagtcgaaataagacccaggacttcgaagagctgtcctccataagaagtgccgaaccgtcgcagtccttctctcctaatctgggaagcccatctcccccagagacaccaaatctcagtcactgcgtgtcatgtattggtaagtatcttttgttagaacctttggagggagaccacgtgtttcgggctgtccatctgcattccggtgaggagcttgtgtgcaaggtcttcgacatctcttgctaccaggagtccctcgcgccttgtttttgtctcagtgctcactctaatattaaccagattacggagattatactaggtgagacaaaggcctacgtgtttttcgagaggtcctacggcgacatgcatagctttgttcgcacatgtaaaaaattacgggaggaggaagctgccaggctgttctaccagatagcgtccgcggtggctcattgccatgacggcggtctggtcttaagggatctcaagctccgcaaatttatcttcaaggatgaagaaagaactcgagtgaagcttgaatcacttgaagacgcctatatactccgcggtgacgatgattcactgagcgacaagcatggctgtcccgcatacgtcagcccagaaatactcaacaccagcggctcctactccggtaaggctgctgatgtttggtcactgggtgtgatgctgtacactatgttggtcggacgatacccctttcacgatatcgagccatcttcactgttttccaaaattcgcagggggcagtttaacatacccgagacactctcacccaaggccaagtgcttgatcagaagcatcctgcgaagggaaccttcagaacgactaacaagtcaggaaattctggaccacccctggttctccactgacttctctgtaagtaacagtgcttatggcgctaaagaagtgtccgaccaactggttccagatgtcaatatggaggagaatttggacccgtttttcaattag

SEQ ID NO: 27264 - DNA, 3048 bp, synthetic construct
  source 1..3048: mol_type = other DNA; note = Synthetic coding sequence
atgcgtcggtttctgcgacctggccacgatccagtgcgagaaagacttaagagagatctgttccaatttaacaagactgtggaacacggtttcccacaccaaccgtcagccttaggctactcccctagtctgcgtattctagccattggaacccgtagcggggcaataaagctttacggtgcccctggggtcgaattcatgggattgcaccaagagaataatgccgttacacagatccatctgctgccaggtcagtgccagctggtaacgctgctggatgacaacagcctccatctgtggtccttaaaggtgaaaggaggggctagtgaactgcaggaagatgagtcttttacactacgaggaccacctggggcagcgccatcagcgactcagataacggtggttctccctcatagctcgtgtgagctcctatacttgggtacagagtctggcaatgtatttgtagtgcagcttcccgcattcagggcactcgaggacaggacaatcagttccgacgccgtcctccagagattacccgaagaggcccgacaccgccgagtgttcgaaatggtcgaggcgcttcaagaacacccgagagatccaaaccagattctgatcgggtacagcagagggctggtggtgatctgggatctccagggaagccgcgtcctgtatcactttctttcttcacaacagctagaaaacatctggtggcaaagggacggaagacttcttgtgagttgccattccgatggctcgtactgccagtggccggtgtcttctgaagcccaacagcctgagcccctcagatccttagtgccttacgggccttttccttgcaaggctatcaccaggattctgtggctgacaaccaggcagggactgccatttactatctttcagggcggaatgccccgagcctcctacggcgataggcactgcattagcgtgattcatgacggtcagcagacagccttcgacttcacttctcgggtgatcgggttcactgtactcactgaagcagatccggctgccactttcgacgacccctatgccctcgtcgtgttggccgaggaagagctagtcgtgattgacctgcagactgccggttggccgccagtccagctcccgtatctggcctctctccactgtagcgcgatcacctgctcccaccatgtgtccaatattcctctcaaactctgggagagaattattgccgctggcagcaggcaaaacgcgcatttttctaccatggagtggcctatcgacgggggaacaagtctgacccctgcacctccccaacgcgacctcctgcttactgggcatgaggacggcaccgtgaggttctgggatgcatctggtgtctgcctgaggctcctttacaagctgagtaccgttcgcgtttttctgacagacacagacccaaatgagaattttagcgcacagggcgaggatgagtggcctccattacgtaaagttggtagttttgacccctattccgatgatccaagactgggcattcagaagattttcctttgcaaatacagtggttacctcgctgtcgccggaaccgccggtcaggtgttagtgctcgaactgaatgacgaggcagctgagcaagctgttgaacaggtggaggcagatctcctgcaggatcaagagggttaccgttggaaaggccatgagagacttgccgcaagatcaggacccgtgcgtttcgagccgggttttcagcctttcgtgctggtgcagtgccagcctccggctgttgtcaccagcctggccttgcattctgaatggcgtttagttgcattcgggacctcacacgggtttgggctctttgaccatcaacagagaagacaggtctttgtcaagtgtaccctgcacccgagcgatcaattggctctggaagggccactgtctcgcgtgaagtcccttaagaagtccctaaggcagagcttcaggagaatgcggagatccagggtatcctctcgtaagagacaccccgcaggccctccaggagaggcacaggaaggctcagccaaggcagagcgccctggtctgcagaatatggagctggcgcctgtccagaggaagatagaagctaggtcagccgaagactcgttcactgggtttgtccgcactttatacttcgctgacacctacctaaaggactctagtcgtcactgccccagcctgtgggctggaaccaacggaggaacaatatacgctttttccctgagagttccccctgctgaaagaaggatggatgagccagtgagagcggagcaggcaaaggagatccagttaatgcaccgtgcacccgtggtcggcatcctagtgctcgacggacattcagtgccactgcccgagcctctcgaggtagcccatgatctttccaagtctcctgacatgcagggaagtcaccagctgctagttgtttcagaagagcagttcaaggtcttcacacttcccaaggtttccgccaagttgaagctaaaactgactgctcttgagggaagtagggtacgaagggtttcggtggcccactttggctcccgcagagctgaggattacggtgagcaccacctggccgtactcaccaatttgggagatattcaggttgtgagcctgcccctgcttaaacctcaggtaagatattcctgtatacgcagggaagatgtaagcgggatcgcttcctgtgtgtttaccaagtacggccagggattctacctcatctcgccctccgagttcgagaggttcagccttagtactaagtggctcgttgaacctaggtgtctagtggatagtgctgagacaaagaaccatcgacccggtaatggagcaggacccaaaaaagccccaagtagggcgcgaaattctggaacacagagtgacggcgaggagaagcaacctgggttggtcatggaacgcgctttactttccgatgagcgcgcagcaacaggcgtccacatcgaaccaccatggggagccgcttcagccatggccgagcagtccgagtggttgagcgttcaagccgctagatag

SEQ ID NO: 27265 - DNA, 897 bp, synthetic construct
  source 1..897: mol_type = other DNA; note = Synthetic coding sequence
atggcagccgcagaaccagcagtcctagcattaccaaacagcggcgctggaggagcaggggcaccctcaggtactgtaccggtcctgttctgcttctctgtgttcgccaggccttcatccgtccctcacggcgctggatacgagttgctgattcagaagtttctgtccctctacggcgaccagattgacatgcatcgcaaattcgtagtacagttgttcgccgaggaatgggggcagtacgttgacttaccaaagggatttgctgtcagcgagcggtgcaaggtccgactagtccccttgcagatccaactgaccactttaggcaacttgacgccatcaagcactgtcttcttttgctgtgacatgcaggagcgcttccgacctgcgatcaagtacttcggtgacattatctccgtcggacaacgcctcttacagggagctcggattctcggcataccagtcattgtgacagagcaatatcccaaggggcttggctctacagtgcaggagattgacctgacgggcgttaaactcgtcctgccaaaaacaaagttttccatggtcttgcctgaagtcgaagccgcactcgctgagatccctggcgtgcgcagcgtggtgctgtttggtgtagagactcacgtgtgcatccaacagaccgcactggagcttgtcggacgcggagtggaggtgcatatagttgctgacgcaaccagttcaaggtcgatgatggatcgtatgttcgccctggagcgtctggcccgtacaggcatcattgtgactacatctgaggccgtgcttctccagttagtggcagataaggatcaccccaaattcaaagaaatccagaacctcattaaggcttcagctccagagtccggcctgcttagcaaggtgtag

SEQ ID NO: 27266 - DNA, 2439 bp, synthetic construct
  source 1..2439: mol_type = other DNA; note = Synthetic coding sequence
atgagcgagcagggggacctgaatcaggccattgctgaggaggggggtaccgagcaggaaaccgctacaccggagaacgggatcgttaaatctgaaagtctcgacgaagaagaaaagctggagctgcaacgccgtctggaagcccagaatcaagagaggcgcaaatctaagtccggcgcaggtaagggaaaactcacccggtcgctggcagtatgcgaagaatccagtgccagacctggcggtgagtcccttcaggaccaagagtccatccacctgcagctctcctccttctcttccttgcaggaagaagacaagagcagaaaggatgactccgaacgcgaaaaggagaaggacaagaacaaggacaagaccagtgagaagcctaagatcagaatgctgagcaaagactgttcccaggagtataccgacagcactggaatagatcttcatgagttcctgattaatacacttaaaaacaactctagagatagaatgatactcctcaaaatggagcaagaaattatcgattttatcgccgacaataataatcattacaagaaatttccccagatgtcatcgtaccagagaatgttggttcacagggtggccgcatattttgggctcgatcacaacgtagaccagacaggtaagtcagtgattatcaacaagacgtcttccacacgcattccggaacagcgcttctgtgagcacttgaaggacgagaaaggggaagagtcacaaaagcgatttatcctgaaacgggataactcatctattgacaaagaagataaccaacagaaccgaatgcacccttttagggatgacagacgaagcaaatccattgaggagagagaggaagagtatcaacgggtgagagagagaatctttgcacacgactctgtatgtagtcaggagtccctctttgtcgagaattctagactgctcgaggacagtaatatttgtaacgagacatacaagaagagacaactatttagaggaaaccgtgacggctccggcagaacctccgggtcacgtcaaagttcttccgaaaacgaactgaagtggagcgaccatcaacgagcctggtcctctactgacagtgacagctctaatagaaatctcaaacctgccatgaccaaaactgcttcttttggcggaataacagtgctaacgcgtggagactcaacatccagtacccgctctaccggtaagctctctaaagccggatccgaatcatcttcctctgcaggatctagtggctcgctcagcaggacacatccacctttgcagtccactccgctggtctctggcgttgccgctggttcaccaggctgcgttccctaccccgagaatgggatcggtggccaggttgcaccctcgagtacgtcttatattctgctgcccctggaggccgctaccggtatccccccagggtcaatactgctgaatccccatactggccagccattcgtcaaccctgacggaactcctgcgatatacaatccacccacctcccagcagccactgagatcagccatggtgggtcagtcccagcagcagcctcctcagcagcaaccaagtccgcagcctcaacagcaggttcaacctcctcagccgcagatggctggaccacttgtgacccagcgtgacgacgtggctacccagtttggacaaatgacgctttcaaggcaatcctccggagaaaccccagagcctccttctggccctgtgtatccgtctagtttaatgccacaacctgcccaacagccatcctatgtgattgcatcaacaggccagcagctgcccacaggaggtttctcgggatctggccctcctatctcccaacaggttcttcagccaccgccttcacctcagggttttgttcagcagcccccaccagctcagatgccagtgtactactacccatcggggcagtacccaaccagcacaacacaacagtacagacctatggcccctgttcagtataacgctcaacggagccagcagatgcctcaggcagctcagcaagctggataccaaccagtcctgagcggccaacagggcttccagggcctgatcggagtccagcaaccaccacaatcgcagaatgttatcaacaaccagcagggaacacctgtgcagagtgtgatggtgagctatcctacaatgagctcatatcaagtgcccatgactcagggcagccagggactaccgcagcagtcctaccagcagccaatcatgctgcccaaccaggcagggcagggcagcctccctgccaccgggatgcctgtctactgtaacgttacaccgccaacaccgcagaacaacctcagactaattgggccacactgccccagctcgactgtccctgtgatgtccgcatcttgtcgtacgaactgtgcaagcatgtccaacgcagggtggcaagtcaaattctag

SEQ ID NO: 27267 - DNA, 1191 bp, synthetic construct
  source 1..1191: mol_type = other DNA; note = Synthetic coding sequence
atgaccactctggtcctggataacggggcttacaatgcgaagatcggctactcacacgagaatgtatccgtaatcccgaattgccagttccggagcaagactgcacgcttgaaaaccttcacagcgaatcagatcgacgaaatcaaggaccctagtggactgttctacattttacccttccagaagggctatttggtgaattgggacgtgcagcggcaggtgtgggattaccttttcgggaaagagatgtaccaagtggattttctagatacgaacatcatcataaccgaaccttactttaactttacgtctattcaagagtctatgaacgagatcctttttgaggaatatcagtttcaggctgttttgcgcgtcaacgcaggagcattgtccgcacatcgctacttccgcgataatccctctgaactttgttgcattatcgtcgactccgggtacagtttcacgcatatagtcccttactgccggagtaaaaagaaaaaggaggctattattagaatcaatgttgggggaaaactcctgactaaccacctcaaagaaataatcagctatcgccagttacacgtcatggacgaaacacacgttattaatcaggtgaaggaagatgtatgttacgtgtctcaggacttctacagggatatggacatagccaagctgaaaggagaggagaatacagtcatgattgattatgtgttaccggatttttcgactattaaaaaggggttttgcaaacctagggaagagatggtactgagtgggaaatacaagagcggggaacaaattctaaggctagcaaacgagaggttcgctgtccctgagatcctgtttaatccttccgatataggcatccaggaaatgggtatcccagaggccattgtgtatagcattcagaatctccctgaggagatgcagccccacttttttaagaatatcgtcctgaccggcggtaattccctgttcccagggttcagggatcgtgtttactccgaggtacgctgtctcacccccactgactacgatgtgtcagtcgtactgccggaaaatcccataacctacgcatgggaagggggtaaactgatctctgaaaatgatgattttgaagatatggtggtcacgagagaggattacgaagagaacgggcacagcgtttgcgaggagaaattcgacatttag

SEQ ID NO: 27268 - DNA, 1005 bp, synthetic construct
  source 1..1005: mol_type = other DNA; note = Synthetic coding sequence
atggagcctggacctacagctgcacaaagacggtgtagtttgccaccttggctccccctggggctgttgttgtggtctggactggcactcggcgctttgccctttggatcaagcccacacagggtctttcacgacctgctcagcgagcaacagctgctcgaggtggaggacctcagtttgagcctcctccaagggggaggtttaggccctctttctttacctcccgacctgcccgatctcgacccagagtgccgggaactgctactggactttgccaacagtagtgcggagctcaccggctgtctggtccgatctgcccgaccagtgcggctgtgtcagacctgttatcccctgtttcagcaggtggtgtcaaaaatggataatatatcacgcgcagccggaaataccagcgagtcgcagagttgtgcaagatccctgctgatggcagaccgaatgcagattgttgtgattctgtctgagttcttcaacactacgtggcaagaggccaattgcgcgaactgtcttacgaacaacagtgaggagcttagtaacagtaccgtttatttcttgaatcttttcaatcatacacttacatgctttgagcacaaccttcagggcaatgctcactctcttctgcagaccaaaaactattcagaggtttgtaagaactgccgcgaggcttataaaaccttgagttctctgtatagcgagatgcaaaaaatgaatgaacttgagaataaagccgagcccggaactcatctgtgcattgacgttgaggacgccatgaatataacaaggaaactgtggtcccgaacatttaattgttcagttccttgttcagataccgttcctgtgatcgccgtgtctgtgttcatcctgttcctgccagtggtattttacttatctagcttcctgcattccgagcaaaaaaagcgaaagttgatcctgccgaaaagactcaagtcctctaccagctttgctaacattcaagaaaactccaactag

SEQ ID NO: 27269 - DNA, 2172 bp, synthetic construct
  source 1..2172: mol_type = other DNA; note = Synthetic coding sequence
atgtcaacggccaccggtcccgaggcggcacctaaaccatctgctaagtccatttacgagcagcgcaaaagatacagcacagtggttatggccgatgtttctcaataccctgtgaatcaccttgtgaccttttgcctgggcgaagacgacggtgttcacactgtggaggacgcctcaagaaagctcgccgtgatggattcccagggtagggtgtgggctcaggaaatgctgctgagggtttcaccagatcatgtcacattattagacccagcatcaaaagaggagcttgaaagttaccccctgggtgctatcgtcagatgcgatgctgtaatgcctccaggacggagtcggagtttgctcctcctggtgtgccaggagccagaacgcgctcagccagatgtgcatttctttcaaggtcttcggctgggtgctgagttaatacgcgaagatattcaaggagccctccacaactacaggagcgggcgaggcgaaaggcgggcagccgctctgcgagcgacgcaggaagagttgcagcgcgaccgaagcccggctgctgaaacaccaccgcttcagcggaggccatctgtgcgcgcagtcatatcaacagttgaaaggggggctggaagaggtcgtccgcaggctaaaccaatccctgaggccgaagaggcacagcgccctgagcccgtgggcacaagtagtaatgctgatagcgcatcaccagatttaggaccacgagggcctgatttggctgttttgcaggccgagagggaggtagacattctgaaccacgttttcgacgacgtggagagtttcgtgagccgcctgcagaagagcgccgaagcagctcgtgtgttggaacatcgcgagagaggcagaagaagccggcgacgggcagctggtgagggtctcctcaccttgagagctaaacccccttctgaagctgagtacacggatgtcctgcagaaaattaaatacgcatttagccttctggccagattgcgaggcaacattgccgaccctagtagtcccgaactgctgcactttctcttcggccctctgcaaatgatcgtcaacacttctggaggcccagagttcgcttcatccgtgagacgccctcacctgacatctgacgctgtcgctttactacgggataatgtcacaccacgcgagaatgaactctggacaagccttggagattcctggacacgacccggtctggagctgtcaccagaagagggccctccctaccgccctgaattctttagcggttgggaaccgccagttactgacccccagtcccgcgcttgggaggatcctgtggagaagcaattgcaacatgagagacggaggaggcaacagtcagccccacaggtggctgttaatggtcacagagaccttgagcctgagagcgagcctcagctggaaagcgagactgccggaaagtgggtattgtgtaattacgatttccaggcaagaaactcctccgagctatccgtgaaacagagagacgtgctcgaggttcttgatgattccaggaaatggtggaaagtacgcgatcctgctggccaggagggttacgtgccctacaatatattgacaccatacccgggtcccaggctacatcactctcagagtcctgctcgctccttgaacagcacccctcccccacccccagcaccggcacctgccccacccccagcgctggctcgacccaggtgggaccgacctcggtgggatagttgtgactccttaaacggtttggacccaagcgagaaggaaaagttcagtcagatgcttattgttaatgaggagctgcaggctcgcctggcccaaggacgatccggacctagtcgggcagtgcctggtcccagggcccctgagccccagctgagcccaggatcagatgccagtgaggtgcgggcatggcttcaggccaaaggtttctcttctggaactgtcgacgcgctcggggtgttgacgggtgctcagctcttctcactgcagaaagaggaactgcgagccgtttcccccgaagagggggctagagtttatagccaggtgaccgttcagcggagtctattggaggacaaagaaaaagtctcggaactggaggccgtcatggagaagcagaaaaagaaagtcgaaggggaggtcgaaatggaggtcatctag

SEQ ID NO: 27270 - DNA, 5622 bp, synthetic construct
  source 1..5622: mol_type = other DNA; note = Synthetic coding sequence
atgttttccagaaggtcccacggtgatgtgaaaaagagcacccagaaagtgctggaccctaaaaaagatgtgcttaccagactgaagcacctgagagccttgcttgacaacgtcgatgctaatgacttgaaacaattttttgaaaccaattacagccagatctattttatcttctacgagaacttcatcgcactcgagaacagcctgaagcttaagggcaacaataagagtcaaagagaagagctcgactctattctattcctgttcgagaaaatcctgcagttccttccagagagaatcttttttagatggcactaccagtccatcgggagtacgctcaaaaaactacttcacactgggaactcaattaagattaggtgcgaggggattagactgttcctgctctggctgcaagctctgcagactaactgtgctgaagagcaggtgctgatcttcgcatgcctagtgcccggttttcctgctgtcatgagcagcaggggaccctgcactctagagaccttgattaacccttccccatccgttgctgacgtgaagatctaccccgaggaaatcaccccactgctgccagccatttcgggagaaaagattgccgaggatcagacctgcttctttctccaaatcctgctcaaatatatggtaatccaggcagcctctctggagtggaagaacaaagagaatcaggacactggctttaaatttctgtttacgctgtttcgtaagtattacctgccacacctcttcccctcctttacaaagctgacaaacatctataagcctgttctggatattccccaccttcgcccaaagcccgtctatattactactacacgcgacaacgagaatatctattccacaaagatcccttatatggccgcacgtgtagtgtttatcaaatggatcgtcaccttttttcttgagaagaaatacctcacagctacacagaataccaagaatggagttgatgtcctgcccaagatcatccaaaccgttggaggcggagctgtgcaggaaagggcccctgagctggatgggggaggtccgacagaacaggacaagtcacactccaattcctctaccctttccgacaggcgcctctctaattcctctctttgttctattgaagaagagcatcgcatggtgtacgagatggtccagcgtattttgctgtccacccgcggatacgtaaactttgtgaacgaggtgtttcaccaagcgttcctgctgccttcatgtgagattgctgtaactcggaaagttgtgcaggtgtaccgcaagtggatcctgcaggataaacctgtatttatggaggaacccgatagaaaagatgttgcccaggaggacgccgagaaactcggattttccgagaccgactctaaggaggccagttctgaaagctccggtcataaacggtcctctagttggggacgaacgtactcgtttacctctgcaatgtcccggggatgtgtgaccgaggaggaaaataccaatgtcaaagctggagtacaggccctgctccaggtgttcctcacaaactccgcaaacatatttctactggaaccgtgtgctgaagtgcccgtactgctgaaagaacaggttgacgcgtgcaaagctgtgttaatcatctttcgcagaatgattatggagctgactatgaacaagaaaacctgggagcaaatgctacaaatcctcctgagaattacagaggccgtcatgcaaaagcccaaggacaaacaaatcaaagatctgttcgctcagtctctggctggcctgctctttcgaacactcatggtcgcctggatacgggctaacctctgcgtgtacatcagtcgagagctgtgggacgattttttgggtgtgctgtcttccctgaccgaatgggaggagcttattaatgagtgggccaacattatggattcccttactgctgttcttgcacgaactgtgtatggtgttgaaatgacgaacttgccgctcgacaaactgagcgaacagaaagagaaaaagcagaggggcaaaggctgcgtgttagacccccaaaaagggaccactgtcggtaggtctttcagcctcagttggcgcagtcaccccgacgttacagaaccaatgcggtttagatcagcaacaaccagcggagcccctggagtggagaaggctagaaacatagtgcgccagaaggctacagaggtcgaggaatgccaacaatctgaaaacgcacccgcagctggaagtgggcacctcacggtaggccagcagcagcaggtgctgcggtccagcagtacaagcgacattcccgagcctctttgtagcgattcttcacaaggacaaaaagctgaaaatacccaaaatagctcttcatctgaaccccagcccatccaggagaacaaaggccacgtaaaacgtgagcatgaaggaatcaccatcctggtccgcagaagtagctcccccgctgagctggatcttaaggatgatcttcaacagacacagggcaaatgcagggaacggcagaagtctgaatccaccaactccgacacaacgctgggctgcaccaacgaggccgaactctctatgggaccctggcagacctgcgaagaagatccagaactgaacacccctacagatgtggtcgcagatgctgatgctcgccactggctgcaactgagccctaccgacgcatccaacttaactgatagctccgagtgtctgacagacgattgcagtattattgccggtggctcactcacgggctggcatcccgatagtgctgcggtgttatggcggagggtgctgggaattctcggcgacgtaaacaatattcaatcaccgaagatccatgctagggtcttctgctatctttacgagttatggtataagctcgcgaaaatcagagacaatttggctatcagccttgataatcaaagttcgccgagtccccctgtgctgatcccgccactgcgcatgttcgccagctggctgttcaaggcggctacattacccaacgagtataaggaagggaaactccaggcctatcgtcttatttgcgctatgatgaccagacgccaagacgtgctccccaattccgattttctggtgcacttctatttggtgatgcatctggggctcactagcgaggatcaggatatattgaatactatcatcagacactgccctccaaggttcttcagcctcggcttccctgggttcagcatgcttgtgggggactttatcaccgccgcagccagggttttgtccacggatattctgacagccccaagatccgaggccgtgaccgtgttgggctccctggtgtgcttcccaaacacttatcaggagattccactactgcagtctgtgcccgaagtgaatgaggccattaccggaaccgaggacgtcaaacactatctcattaacatcctgttgaagaacgcaacggaggagcccaacgagtacgcgagatgtattgccgtctgctcgctgggggtatggatatgcgaggagctggcacagtgcaccagccaccctcaagtgaaggaagccataaatgtcatcggggtgactctgaagtttcctaataagattgtcgctcaagtggcctgtgatgtgctccagctgctcgtcagctattgggagaagctgcagatgtttgaaacttccctcccgaggaaaatggccgagatcctcgtcgccacagtggcctttctgctacccagcgctgaatatagctccgtggaaacagataaaaaattcatcgtgtcgctcctattatgtctcctggactggtgtatggctctgcctgtaagcgtgcttctccatccagtgagcactgccgttctggaggaacagcactcagccagagctcctctcctggattatatataccgcgttctccactgctgcgtatgtggatcttccacctatacacagcagtctcattacatcctcaccttggcggacctctcgtctactgactatgaccccttcctgcctctggctaatgttaaatcgtctgaaccagttcagtatcactcctctgcggaactgggcaatcttttgactgtggaagaggagaagaagagaaggtctctggagctgatccccctaacagccaggatggtcatggcacacttggtgaaccatctggggcactatccgttgtctggcggtcctgctatcctgcatagcctggtgtccgaaaaccacgataacgcacacgtggagggtagcgaactatcctttgaggtcttccgatctccaaatttgcagctctttgtctttaacgattccacacttatctcttatctgcaaacccctaccgaaggtccagttggagggtcacccgtggggtcgctttcagatgtgcgggtgatcgtgcgcgatatcagcggaaaatactcttgggacggtaaagtcttgtacgggcctctggaggggtgcttggctccaaacggtagaaacccgtcattcttaatatcatcttggcacagggatactttcggtcctcagaaagatagctcgcaggtggaagagggagacgatgttctggacaaactgcttgaaaatataggtcacactagtccggaatgcctattaccgtctcagttaaacttgaatgagccttcactgacaccctgcgggatgaactacgatcaggagaaagagatcatcgaggttatcctgcgccagaacgcccaagaggacgagtacatacagtcccacaacttcgatagcgctatgaaggtcacatctcaaggacagccatcccccgtagagccgcgagggccattttatttctgccgcctgctccttgatgaccttggcatgaattcttgggacagaagaaaaaacttccacttgctgaagaaaaactcaaaactgcttagagaattaaaaaaccttgactctaggcagtgcagagaaacacacaagatcgctgtgttctatatcgccgaaggccaggaggataagtgttccattctttcaaacgaacgcggatcccaggcttacgaagacttcgtggccggactcggctgggaggtcgatctgtcaacgcattgcggcttcatgggagggttgcaacgaaacggcagtactggccagaccgccccatattacgctacctctacggtcgaagtgatcttccacgtcagcacgagaatgccttctgacagcgatgactcactcaccaagaagctccgccatctcggaaacgatgaggtccacattgtgtggagcgagcacagccgggattaccggagagggattatccctaccgcattcggggatgtcagcattatcatctaccctatgaagaatcacatgtttttcatagccatcacgaagaagcccgaggtcccgttcttcggcccattatttgacggcgctatcgtgtcaggcaaactcctgccaagcctggtctgcgccacgtgcattaatgcctcgagggcagtaaagtgtctcattcctttgtaccagtccttctatgaagaaagagcactgtacctggaggccattatccagaatcaccgcgaggtgatgaccttcgaagacttcgccgcacaggttttttcgccaagcccaagttactcattaagtggtacagattas

SEQ ID NO: 27271 - DNA, 1041 bp, synthetic construct
  source 1..1041: mol_type = other DNA; note = Synthetic coding sequence
atggcaaggcccggacagaggtggctgggaaagtggctagtggcgatggtagtttgggcactgtgtcgattggctacgcctttagctaaaaatctcgagcccgtaagctggagctcattgaatcctaaattcttgtctggaaaagggctggttatctacccaaagataggggataaattggacattatctgcccacgggcagaagccggacggccttacgaatattacaagttgtatcttgtgaggcctgagcaggctgccgcttgctccaccgttctggaccccaacgttctagtaacatgcaaccgacctgaacaggaaatccgattcactattaaattccaggaattttctcccaactatatgggattggaatttaagaagcatcacgactactacattaccagcactagcaatgggtcactggaaggcctggagaacagagagggaggagtatgccgtaccaggaccatgaaaataataatgaaggttggtcaggaccctaacgcggtcactccagagcagctgaccactagtagacctagcaaagaggccgataatacagtgaaaatggccacgcaggcacccggttccaggggatccctgggcgacagcgacggaaagcacgagaccgtaaatcaggaagagaaaagcgggccaggcgcttcaggcggttcatccggggaccccgatggtttttttaactctaaagttgcccttttcgcggctgtaggcgctggctgcgttattttcttgctgataataatctttctgacagtgcttctgttaaagcttcgcaaacggcaccgcaagcacactcagcagcgcgctgccgctctgagtctgagtacactcgcctccccaaaaggagggagtggcactgccggaacagaaccctccgatattatcatccctttgcggacgactgagaataactattgtcctcactatgaaaaggtgtctggggactacggccatccagtatatatcgtccaggaaatgccccctcagagcccagctaatatctattacaaagtgtag

SEQ ID NO: 27272 - DNA, 1617 bp, synthetic construct
  source 1..1617: mol_type = other DNA; note = Synthetic coding sequence
atggccagtgacccaatttttactctcgcgccacctctccactgtcactatggggctttcccgcctaacgccagcgggtgggagcagccacccaatgcctcaggtgttagcgtagcttcggctgctctcgcagcttccgccgcatctcgcgtcgcaacatctacagatccgtcttgctccggattcgctccaccagactttaatcactgcttaaaggactgggactacaacgggctgcccgttcttacgactaacgccatcggtcagtgggacctggtgtgtgatcttgggtggcaggttatcctcgagcaaatactttttatcttggggtttgcctctggctatctgtttctggggtacccagcagatagattcggccgtcgaggcatcgtcctgctgactctcggcctggtgggtccatgcggagttggtggagcagccgctgggagttctaccggagtgatggcgctgaggtttctgctgggctttctcctcgccggagtcgacctgggtgtgtatcttatgagactggagctctgcgatcccacacagaggctgcgggtcgctctggccggagaactggtgggcgtggggggtcactttttgttcctggggctagccctagtaagcaaggattggcgatttctgcagcgtatgataaccgccccatgcatcctgtttcttttttatgggtggcctggactctttctcgaatccgccagatggttaattgttaaaaggcagattgaagaagcgcaatcagtcctgcgcattttggccgagcgcaataggccccatggacaaatgctgggagaggaagcgcaggaagccctccaggacctggaaaacacctgtcctctccctgccacgtccagttttagttttgcctccctattgaactatcggaatatctggaaaaacctcctgatactggggttcaccaactttatcgctcacgcaatcagacattgttaccagccggttggaggtggcggaagcccttcagatttctacctgtgctccttactggcctcaggaactgccgctttggcctgcgttttccttggggttaccgtggaccgcttcggtaggaggggtatcttactgctgtctatgactctcactggtatcgccagcctggtcctactgggtctttgggattgtgagcatcccatttttcctaccgtgtgggcccagcaaggcaaccccaatcgggatctcaacgaggctgcgatcactaccttctctgtactaggtctatttagctctcaggccgcagccatcctcagcacgctcctggctgcggaggtaattcctaccaccgtgaggggccgtggccttggcctcatcatggccctgggcgcattgggtggattaagcggaccagcccagagattgcacatgggtcacggtgcattcctccaacatgtcgtcctggccgcttgtgccctgctgtgcatactgagtattatgctcttgcccgaaacaaaaagaaagctactaccagaggtccttagagatggtgaactatgcaggcggccaagtctgctgagacagccgcctccaacccgctgtgatcacgtccctctgctggcaactccgaatcctgccctttag

SEQ ID NO: 27273 - DNA, 1128 bp, synthetic construct
  source 1..1128: mol_type = other DNA; note = Synthetic coding sequence
atgagcaccgctgggaaggttattaagtgcaaggccgcagttctctgggaactgaaaaagccttttagcatcgaggaggtggaggtggctcctcctaaagcacacgaggtgcgcatcaaaatggttgccgtgggtatttgtggaaccgacgaccatgtcgtatcgggcactatggtgacacctctgccagtcattcttgggcatgaggccgcaggaattgtggagagtgtgggggaaggcgtgactactgtgaagcctggagataaggtgattcctctggccatccctcagtgtggaaagtgccgaatttgcaagaaccctgaatcaaactactgcttgaagaacgatgtgagcaatcctcagggcactctgcaggatgggacgtcacgctttacatgcaggagaaaacctatccatcacttcctgggtatctctaccttctcgcagtataccgtggtggacgagaatgccgtggcgaagatcgacgccgcttctcctcttgaaaaggtttgcctcatcggttgcggatttagcaccggctatgggtcagcagtcaatgtagccaaggtcacccctggatcgacatgtgcggtttttggcctaggtggggtcggcttgtccgcaatcatgggatgtaaagctgctggtgctgccagaattatcgcagtggacattaataaggataaattcgcgaaagctaaggaactgggcgctaccgagtgtatcaaccctcaggactataaaaagcctatccaagaggtccttaaagaaatgacggacgggggtgttgacttctcctttgaagttatcggtcgccttgacactatgatggcctcactcctgtgttgccacgaagcttgtggaacatccgtgattgtaggcgtcccgcctgactctcaaaacctgtccatgaatcctatgctactactgactggaaggacctggaaaggcgcaattttgggtggctttaagtcaaaagagtgcgttccgaagttagtggcagatttcatggccaagaagttctctcttgatgctttaattacacatgtgcttcccttcgagaagatcaatgaaggattcgacttgttgcacagcggcaaaagtatcagaaccattttaatgttctag

SEQ ID NO: 27274 - DNA, 1641 bp, synthetic construct
  source 1..1641: mol_type = other DNA; note = Synthetic coding sequence
atgtgtagcctgggtctgtttccccctccaccccctagggggcaggtgaccctgtacgaacataataacgaactggttactgggagctcttatgaaagcccaccaccggacttccgaggccaatggataaatctacccgtgttgcaactcacgaaagacccgttgaagacgccaggcaggctcgatcacggcactcggacggcatttatccaccatagagagcaggtgtggaaacgctgcataaatatttggcgagatgtgggcctgttcggtgtgctcaacgagattgcaaactcagaagaggaggtgttcgaatgggtgaaaaccgcctctggatgggcgttagcactctgccggtgggcaagttcactacacggcagcctctttccgcatctgtcactcaggtccgaggaccttattgctgaattcgcccaggtgactaattggtcctcttgctgtctgagagtgtttgcctggcatccacacaccaataaattcgctgtggccctgttggacgacagtgtgagggtgtataatgcctcatcaaccatcgtgccgtctcttaagcacagactgcaacgcaacgtggcatcattagcatggaagcccctttcagctagtgttcttgcggtggcctgccagtcttgcatcctgatttggacactcgaccctactagccttagcacgcggcctagttccggatgcgctcaagtattatcccacccaggtcatacccccgtcactagtctagcatgggctccttcgggcggtcgcctgttgtccgcgtcccctgtggatgctgccataagggtctgggacgtgagcacagaaacttgcgtgcccctgccatggtttaggggtgggggagtgactaatttgctctggagccccgatggaagcaagatcctggccacaaccccctcagccgtgtttagggtgtgggaggctcaaatgtggacctgcgaacggtggccgactctgtcagggaggtgccagactggatgctggtcaccggatggttcaagactgctcttcacagtgctgggcgaacctctgatctattcactgagctttcccgaaagatgcggtgagggaaagggctgcgtcggcggagctaagtccgccaccatagtggcagaccttagcgagacgactatacagacgcctgacggagaggagcgcctgggcggtgaggctcattctatggtctgggacccttcgggggagcggttggcagttctcatgaaaggcaagcctagagtacaggacggaaagcccgtgatacttctgttcaggaccaggaattctcccgtgttcgagcttctcccttgcggaattattcagggagaacccggagcacaaccccagctgatcacttttcacccaagcttcaacaagggagctctgctgagtgtcggatggagcaccgggaggatcgcacacatccccctgtacttcgtgaatgcccagtttcctagatttagtcctgtgctcgggagggctcaggaacctcccgcagggggagggggttccatccacgacctgccattgttcaccgaaacatcaccaacatccgccccttgggatccacttcctggaccccctcctgtgctcccacactctccccatagtcatttgtag

SEQ ID NO: 27275 - DNA, 576 bp, synthetic construct
  source 1..576: mol_type = other DNA; note = Synthetic coding sequence
atggggaaaaagacaaaacgcaccgccgacagctcttcttcagaagacgaggaggagtatgtggtggagaaggtgctggatagacgggttgtcaaggggcaggtggaatacttgctcaaatggaaggggtttagcgaagagcacaacacatgggaacccgagaagaatcttgattgtccagagttgatcagtgaatttatgaagaaatataagaaaatgaaggagggtgagaacaacaagccacgggaaaagtccgaatcaaacaagagaaaatccaacttttcaaacagcgctgatgacattaaaagtaaaaagaagagggaacagtccaacgatatcgctaggggatttgagaggggcctggagcccgagaagatcattggagcaacggattcttgtggcgaccttatgtttttaatgaaatggaaggacacagatgaagcagatctggtcttggccaaggaagcaaacgtgaaatgtcctcagatagtcatagccttttacgaagaacgcctgacatggcacgcctatcctgaggatgcagaaaataaagagaaagaaacagcgaagtcatag

SEQ ID NO: 27276 - DNA, 1554 bp, synthetic construct
  source 1..1554: mol_type = other DNA; note = Synthetic coding sequence
atgggccgaaaaagtaagaagtgggggaagaaggtatcacgatacgagggcaaggtgaggctcaagaaggtacccgctaagaaactggtccctgcttggaaagagaaggttctgtgggctctgctcgccgtgctactggctagctggcgcttgtgggctataaaggattttcaggagtgcacttggcaagtggtgctgaatgaattcaaacgcgtgggcgaatctggggtgtccgattcattcttcgagcaagagccagtggacacagtcagttccctgtttcacatgcttgtggacagtccgatagaccccagtgaaaagtatctgggatttccatattacctcaagattaactatagttgtgaggagaaaccgtctgaagacctggtgagaatgggccacctcacaggcttgaaacccctcgtacttgtgacctttcagtctccagtgaatttctatagatggaagatcgagcagctccaaatccagatggaagctgcacccttccgctcaaagggcggtcctgggggagggggacgcgaccggaatctggctggaatgaacataaatggattcctgaagcgcgaccgcgacaacaacattcagtttacggtgggtgaggaactctttaatttaatgccccagtatttcgtcggagtctctagtcgccctctgtggcatactgtcgatcaaagccccgttctgatattggggggaattcccaacgagaagtacgttctgatgacagatacctccttcaaagacttttcacttgttgaagtgaatggtgtgggtcagatgcttagcatcgacagttgctgggtgggctccttttactgccctcatagcggttttacagccactatatacgatacgatcgctaccgaatctacgctgtttatcagacaaaatcaactcgtgtactacttcaccggaacctataccaccctatatgagaggaacagaggctctggcgagtgcgctgtcgctggtccgacgccaggggaggggacccttgttaatccatctactgaggggtcttggatccgcgtattggcttcagagtgtatcaagaagctgtgcccagtgtacttccacagcaatgggagcgagtatataatggctcttacgacagggaagcacgagggctacgtgcactttggcactatcagggtgaccacatgcagcatcatttggagcgaatacattgcgggagagtacactctgctgctgctggttgaatcagggtatggtaatgcgagtaagcgctttcaggtggttagctataatactgccagcgacgacctggagctgctgtaccatatcccagaatttatcccggaggcaagaggtctggaattcttgatgatcctcggtactgagagctatacctctacggccatggcaccgaaaggcatattctgcaatccctataacaatcttatctttatctggggaaatttcctgctgcaaaggtccggcacgagttggcgggctgccactgggagcacatcctgtagcctcccacgtgctggcaggtgcacatcggcgtag

SEQ ID NO: 27277 - DNA, 1203 bp, synthetic construct
  source 1..1203: mol_type = other DNA; note = Synthetic coding sequence
atgagtggaagggtcggcgacctttccccaaaacaggcagagaccctagccaaattccgcgagaacgttcaggatgtgctccccgctctaccaaatccagatgactacttcctcttacgctggttacgggctcgcaattttgatctgcagaaatctgaagccctgctgaggaaatatatggaatttaggaaaacaatggatatcgatcatattttagactggcagccacctgaggtgatccaaaagtatatgcccggaggtctatgcgggtatgacagggacggctgccctgtatggtacgatatcataggaccactggacccaaagggcctgctcttctccgtgaccaaacaagaccttctgaaaacaaagatgagggactgcgagcggatcctgcacgagtgtgatttacagaccgagcgactggggaagaagatagaaacgatagtgatgatattcgattgcgaaggcttgggtctgaaacatttttggaaacctttggtcgaagtgtatcaggagttcttcggcttgctggaagagaattaccccgagacattgaagttcatgcttatcgttaaggcgactaagctctttcctgtggggtataatctaatgaaaccatttctgagcgaagatacacgccgaaagattatcgtccttgggaacaactggaaagaagggctgctgaaattaatcagtccagaagaacttccagcccaattcggcggtaccttgaccgatccggatggcaaccctaaatgccttaccaagattaattacgggggagagatccctaaaagcatgtacgtgcgggaccaggtcaagactcagtatgagcattccgtccagatcaaccgcggatcctcccaccaggtcgaatatgagatactatttcctggctgcgtactaagatggcagttctccagtgacggggctgacattggcttcggtgttttcctgaaaacgaaaatgggcgaacggcagcgtgccggagaaatgactgatgtgctacccagccagcgatacaatgcgcacatggtccctgaagatgggaaccttacgtgttcagaagctggagtttacgtgctgagattcgacaacacttacagctttgtgcacgctaagaaagtgtcttttacagtggaagtgttgctgcctgacgagggcatgcagaagtacgacaaggagctgaccccagtctag

SEQ ID NO: 27278 - DNA, 636 bp, synthetic construct
  source 1..636: mol_type = other DNA; note = Synthetic coding sequence
atggcagagcagcacggagctcccgagcaggctgccgctgggaagtctcatggagatctagggggtagttacaaggttatcctgtacgaacttgagaatttccaaggcaagcgatgcgagctgtccgccgagtgtcctagcctgacagattccctcctcgaaaaggtgggctctatccaggtcgagtcgggcccatggctcgcctttgagagtcgggcttttcggggtgaacagtttgtgctggagaagggggattaccctcgctgggacgcctggtcgaactccagagatagcgatagtttgttgtcgctgcgaccgttgaatattgatagcccacaccacaaactgcacttattcgaaaaccccgctttttcgggcagaaagatggagattgtcgatgacgacgtgccttcactctgggcccacgggttccaggatagagtggctagcgtgagggctatcaacggtacatgggtagggtatgaattccccggatacagaggacgccaatacgtgttcgaacgaggcgaatatcgacactggaacgagtgggatgcaagccagccccagctccagtcagtgaggagaattcgtgaccagaagtggcacaaacgcggacgcttccccagttcatag

SEQ ID NO: 27279 - DNA, 387 bp, synthetic construct
  source 1..387: mol_type = other DNA; note = Synthetic coding sequence
atgacagaagctgacgttaaccctaaggcctatcctttggccgatgcccatctcaccaagaagctgttggatcttgtgcagcagagctgtaattacaagcagctgcgcaaaggtgccaacgaggctaccaagaccttaaacagaggaatttcggaattcatcgtcatggcagcggatgcagagccgttggaaatcatcctgcacctccccctgctttgtgaggataagaacgtaccatacgtttttgtccgatcgaagcaggcgctggggcgagcatgcggggtgtcacgcccagtcattgcctgctctgtcaccataaaggaggggagccagctaaagcagcagattcagtcgatccaacagtcaatcgagcgcctgctcgtgtag

SEQ ID NO: 27280 - DNA, 2592 bp, synthetic construct
  source 1..2592: mol_type = other DNA; note = Synthetic coding sequence
atggcaggtccgaggggggctctgttagcgtggtgtaggcggcagtgtgaggggtaccggggtgtagagattagagacctatctagttccttccgagacggattagcattctgcgccatccttcaccggcaccgaccagaccttctggactttgacagcctgtctaaggacaatgtctttgaaaacaatagattggccttcgaagttgccgagaaggagcttggtattcccgctcttctcgatccaaatgacatggtatcaatgagcgtcccagactgtctcagcattatgacatacgtgtcccagtattacaaccatttctgctccccaggccaggcgggtgtgtcccccccacggaaagggctagccccttgtagcccccctagcgttgcccctactccggtggaaccagaggacgttgctcaaggggaagaactctcatcaggtagcctgagtgagcagggcacaggacagacccctagctctacatgcgcagcttgtcagcagcacgtccatctggtgcagaggtacctggcagatggacggttataccacaggcattgttttaggtgtaggaggtgcagcagcactctgcttcctggcgcatatgaaaatgggcctgaagaaggaacattcgtctgtgccgaacactgcgcacggctgggacctggtacgcgaagtgggaccaggccgggtcccttctcccaacctaaacagcagcaccagcaacagctcgccgaggacgccaaggacgtccctggcggaggtccctcatcaagcgcgccagccggagccgaagccgacgggccaaaggcctcacctgaggcgcgaccccaaataccgacgaaaccaagggtcccaggcaaactgcaggagctcgcaagccccccagccggaaggcctacccctgccccacgaaaagcttccgaaagcaccaccccggctcccccaacccctagaccccgaagtagtctgcagcaggaaaatttggttgagcaggccggttcctcttctctggttaacggcagactgcacgagctcccggtccctaaacctagaggcacacctaaaccctccgaaggtacacctgcacccagaaaagaccctccttggattacacttgtgcaggcggaaccaaagaaaaaaccagcacccctgcctccatcaagttcgcccggacctccctctcaggactctcgccaggtcgaaaacgggggaacggaggaagtagcacaaccctcccctactgcctctctcgaatctaaaccctacaatccgttcgaagaagaggaggaggataaggaagaagaggcacctgcagccccttcgttggcaaccagcccagccctgggccatccggaaagcacccccaaatcattgcatccctggtatggcatcacacctacttctagtcctaaaactaaaaagcgcccagcgccacgagcgcctagtgcctctcctctcgcactgcatgccagtcgcctcagccacagcgaaccgccaagcgcgactccctcaccggctctatccgttgaatccctgagctctgaaagtgcatctcagacagccggtgccgaactgttggagcctcctgccgtgccaaaatcaagtagcgagcccgctgtgcacgcacctgggacacctggaaacccggttagtttgtctacgaattccagcctcgcctcttccggcgaactcgtcgaaccaagagtcgagcagatgccacaggcttctccaggacttgcgccacgtacgcgaggctctagcgggccacagccagcgaagccatgcagcggcgcaacacctactccgctgcttctggtgggggaccgttcccctgtcccatcacctggatcgtcctctcctcagctccaggtcaagtcaagctgcaaggaaaatccatttaatagaaaaccatctcccgcagcatctccagctacgaaaaaagccactaaggggagtaagccagtgaggcccccagcgcctgggcacgggttccccctaatcaagcgtaaggttcaggcggaccagtacatacccgaggaggatatccatggtgaaatggataccattgagagacgcttggacgccctggagcaccgcggagtgttgctggaagagaagcttcgcggagggttgaacgagggtcgggaggacgatatgctggtggactggtttaagctgattcacgagaaacatcttcttgtgcgacgcgagtccgaacttatttacgtttttaagcagcagaaccttgagcagcggcaggccgatgttgaatacgagttgaggtgcctgctgaacaaacccgaaaaggactggacagaagaagatcgcgcacgggaaaaagtgttgatgcaagagctcgtcactctgatcgagcagcgaaacgcgatcattaattgtctcgacgaggaccggcagcgcgaggaagaggaggacaagatgctcgaagctatgatcaagaagaaggaatttcagagggaggcggaacccgaaggcaagaaaaagggtaaatttaagaccatgaagatgctcaagctcttgggtaataaacgtgatgccaagtctaagagcccacgagacaaatcctag

SEQ ID NO: 27281 - DNA, 708 bp, synthetic construct
  source 1..708: mol_type = other DNA; note = Synthetic coding sequence
atgtggcggggtagagcaggcgctctgctgcgagtctgggggttctggcctactggagtcccgaggagacgccctctctcctgcgacgccgctagtcaggccggtagtaattatccccgatgctggaattgtggtgggccatggggaccaggtcgtgaggacaggttcttttgcccccagtgcagagcattgcaagccccagatcctacacgggattatttctccctgatggattgcaatagatcatttagggtcgacacagccaagctgcagcaccggtaccagcagctgcaaaggctggtacatcccgacttcttcagtcagagatcccagactgaaaaggactttagcgaaaagcatagtactctagtgaatgacgcgtacaagacactgctggccccattaagccggggtttgtacctcttaaaactgcatgggattgaaatccctgagcgaaccgattacgagatggatcggcagtttctgatcgagattatggagataaacgaaaagttggccgaagccgagtctgaggccgcaatgaaggaaatcgaatctattgttaaagctaagcagaaggaattcactgacaatgtctcctccgcgtttgagcaggatgatttcgaggaggctaaagagatcctgactaaaatgcgttattttagtaatatcgaagagaagatcaagttgaagaagatccccttgtag

SEQ ID NO: 27282 - DNA, 2010 bp, synthetic construct
  source 1..2010: mol_type = other DNA; note = Synthetic coding sequence
atggcgaccgaacggagtcgatcggcaatggactcccctgtgcccgcttccatgttcgcaccagaaccaagctccccaggggctgctagggctgccgcagcagccgctcgcttgcatggaggttttgacagcgactgcagcgaagatggggaggctctgaacggggaacccgagctggacttaactagcaagcttgtactggttagtcccaccagcgagcaatacgattccctattgcgccagatgtgggaacgcatggacgaagggtgcggggagactatctacgtgatcggacaagggtctgacgggactgaatatggactgtccgaggcagatatggaggcctcctatgcaaccgtaaaatccatggcagagcaaatcgaagctgatgtcatcctcctgcgcgaacgacaggaggctgggggacgggtgcgggattaccttgtcaggaaacgcgttggcgataatgacttcctcgaggtccgggtggccgtagtgggcaacgtggacgcaggaaaaagcactctgcttggtgtgctaactcacggggagcttgataacggcagaggcttcgccagacaaaagctgttccgccacaagcacgagatcgagtcaggccgtacatcctccgtgggaaatgatatcctgggcttcgactcggaaggaaacgtggtgaataaacctgattctcatgggggatccttggaatggacaaaaatttgtgagaagagtaccaaagtaatcacatttatcgacctggcaggccacgaaaaatatctgaagacaacggtgttcggcatgactggccatctgcccgatttctgcatgctgatggtgggttcaaatgccggtattgttgggatgaccaaggaacacttgggtcttgcactggctctcaatgtgccggtctttgtggtggtcacgaagatcgacatgtgtccagcaaacatacttcaggaaacacttaagctgctgcagcggctgttgaaaagcccagggtgcagaaaaatccctgtacttgtccaatccaaggacgatgtgatagtgacagccagcaatttcagttccgagagaatgtgccctatctttcaaattagcaatgtcactggggagaacctggatctcctgaagatgtttctgaacctcctgagtcctaggacaagctacagggaagaagaacctgccgaattccagatcgacgacacttactctgttcctggcgtggggaccgtggtatctggtaccactttacggggactaataaaactgaatgacaccctgctgctcgggccagatccccttggaaacttcctctccattgccgtcaagagtattcaccgcaaacgaatgcctgtgaaggaggtgcggggaggtcagactgcttcatttgcactcaaaaaaatcaagcggagctctattcgcaagggcatggtgatggtgtcaccccgactgaacccacaggctagctgggaatttgaagctgaaatcctggtgctgcatcatcccacaaccattagcccgagatatcaggccatggtccactgcggaagcatacgccaaaccgccaccatcctgtccatggacaaggattgccttagaaccggcgacaaggcaacagtacatttccgctttataaagaccccggagtacctgcacatagaccagaggcttgtctttagagaaggcaggaccaaagctgttggtacgatcacaaagctgctccaaacaacgaataacagtcctatgaatagcaagccacaacagataaagatgcagtctacgaagaaggggcctttgaccaagagagatgagggaggacctagtggaggaccggctgtgggcgctcccccaccaggagatgaagcctcctccgtcggcgctggacaaccagctgcttcctctaatctgcagcctcagcccaagccctcctctggtgggagacggaggggtgggcagcgacataaggtgaaatctcaaggagcgtgtgtgaccccagcctcaggctgttag

SEQ ID NO: 27283 - DNA, 1656 bp, synthetic construct
  source 1..1656: mol_type = other DNA; note = Synthetic coding sequence
atggccgctcccgctctgtcttggagactgcccctcctgattctcctactgcccttggcaacttcttgggcaagcgcggctgttaacgggacatctcagttcacatgtttttataattccagagctaatatttcatgtgtgtggtctcaagacggggcattacaagacactagttgtcaggtgcacgcgtggcctgatagaaggaggtggaaccagacttgtgagcttttgcccgtatcccaggcatcttgggcttgcaacttgatcctcggagctcctgattcacagaaacttactaccgttgacatcgttacgttgagggtgctttgtcgggaaggggttaggtggcgcgtcatggcaatccaggactttaaacccttcgagaacctgaggctgatggccccaatcagcttgcaggtggtgcatgttgaaacccatcggtgtaatatatcgtgggagatttctcaggcctctcactactttgagagacaccttgagtttgaggcccgaaccctctccccaggccatacttgggaggaagccccactgctaaccctgaagcagaaacaagagtggatctgccttgaaaccttgacacctgacactcagtacgagtttcaagtgcgtgtgaagccgctccaaggggagttcacgacatggtctccatggtcgcaacctttggccttccggaccaaacctgcagcactgggaaaagatacaattccctggctaggtcacctcctggttggcctcagtggcgctttcgggttcattattctggtgtacctgctgataaactgtcggaatactggcccttggctaaagaaggtcctgaaatgtaacacacccgacccctccaagtttttcagccagctgtcctccgagcatgggggagacgtgcagaagtggctgagttcaccctttccatcttcttctttcagccccggaggtcttgctccagaaatctcgcccctggaggtgctggagcgagacaaggtgactcagctgctgctgcagcaggacaaagtgcccgaacccgcatccttatcctccaaccactccctcacgtcttgcttcacgaaccagggctatttctttttccacctgcccgacgcccttgagattgaagcctgccaggtgtatttcacttatgatccatacagcgaagaggatccagacgagggagtggccggtgctccaacaggttcttcaccacagccactgcagcctctgagcggtgaggatgacgcgtattgcacgttcccctcaagagacgacctactcctgtttagtccttccttactaggcggtccctcccctcccagcacagcccctgggggatctggggcaggggaggagaggatgcccccttccctgcaggaaagagtgcctcgcgactgggatccccagcctctggggcctccaacacctggtgtcccggatctggtggacttccagcccccaccggaactggtccttcgcgaagccggtgaggaggttcccgatgcaggcccacgcgagggcgtttcattcccttggtctcggcctcctggacaaggtgaatttcgggctttgaatgcaagactcccactgaatactgacgcttacctgtccctccaagagctgcagggtcaagaccctacacacctggtgtag

SEQ ID NO: 27284 - DNA, 3516 bp, synthetic construct
  source 1..3516: mol_type = other DNA; note = Synthetic coding sequence
atggaaaacaatttgaagacttgccccaaagaggacggggactttgtaagtgacaagataaaatttaagatcgaagaggaagatgacgacggcatcccaccagactcactcgagcggatggatttcaagtccgaacaggaggatatgaaacagacggattccggcggagagcgcgctggcctggggggaacgggttgtagctgtaaaccgcctggcaaatacctttcagcagaaagcgaagatgattacggtgctttgtttagccaatactcctccacactgtacgacgtggcgatggaggccgttacccagagcctgttgtcttcacgcaacatgagttctcgaaagaaaagtcctgcatggaaacacttcttcatctcacccagagactccactaaggccatctgcatgtactgcgtaaaggagttcagtcgagggaagaatgagaaagatctgtccaccagctgccttatgcggcacgtgcgtcgagctcaccccacagttctgatacaggaaaacggctccgtgtcagcggtcagttcgtttcccagccctagtctgctcctgccgccacaacccgctgacgcgggagacctttctacgatcttgagcccgatcaagctggtgcagaaagttgcttccaagatcccaagcccagaccgaataacagaggaaagcgtgtcggtggtttcttcagaggagatctcaagcgatatgagcgtaagcgagaagtgcggccgtgaagaggccctggtcggcagttctcctcatttgcccgctctgcactatgatgagccggcagaaaatctggctgagaagagccttccactgccaaagtccacatcaggatctcgtagaaggtccgctgtgtggaagcacttttatcttagccccctcgacaattccaaagccgtgtgcatacattgtatgaacgaatttagcagaggcaagaatgggaaggatctcggcacctcctgcttgattaggcacatgtggcgagctcatcgggcaatagtcctacaggagaacggtggcacaggaattccaccgctttatagtaccccacctacactgctcccttctctgctcccccctgaaggcgaattgagttcggtttcctcatctccagtgaaacctgtgagggagtcgccttctgctagctcatccccagatcgcctgaccgaagaccttcagtcacacctaaatcctggggatgggttgatggaggatgtggcagctttttcgtcttctgacgacatcggtgaggcctcggcctcatccccggagaagcagcaggcggatgggctctcccctagactttttgagagtggcgcaattttccagcaaaacaaaaaggttatgaaacgactgaaaagcgaagtgtggcatcacttctcacttgctccaatggattctctgaaggccgagtgccggtactgcgggtgcgcgatatctcggggaaagaagggagatgtagggactagttgtttgatgcgccatttgtacaggcggcatccagaagtcgtgggttcacaaaaaggtttccttggtgcatcccttgccaattcaccttatgctactctggcttcggccgagtcatcctcaagcaaacttacggaccttcctactgtagtaactaagaacaatcaggtgatgtttccagtgaattctaagaaaacttctaaactgtggaaccacttcagcatctgttcggcagatagcaccaaggtggtgtgcctccactgcggtcgaacaatttctcgaggcaaaaaaccaactaatttagggacatcctgtctgctccgccatctgcaaaggtttcactcaaatgtcctgaaaaccgaggtctccgaaacagcaaggccatcctcacccgatacacgggtcccccgagggactgagctgtctggagcttcttcattcgacgacactaatgagaagttttatgattcacaccccgtcgccaaaaagataacatctctgattgccgagatgattgccctggacctgcaaccgtacagctttgttgataacgtcgggttcaaccgcctgctggaatatctgaagccacagtattcattgcctgctccgtcctatttcagccgtacagctatcccagggatgtatgacaatgtgaagcaaatcattatgtctcatctcaaagaggccgaaagcggcgtgattcatttcactagtggcatttggatgagtaatcagacacgggagtacctcactctcacagctcattgggtgtcttttgaatctcccgctaggcccagatgtgacgatcatcattgcagtgctctgctagacgtctcacaggtggactgcgactattctggaaatagcatccagaagcaactcgagtgctggtgggaagcttgggtcacgtcgactggcctgcaagtcggaataaccgtaaccgataacgcatccatcgggaagactcttaacgagggtgagcatagcagcgtacagtgcttttctcacacggtcaacctgattgtttcagaggccattaagtctcagcggatggtgcaaaatctactgagcctcgcgaggaagatctgtgagagggtgcataggagcccaaaggctaaagagaagctagctgaacttcaaagagagtatgctttgcctcaacaccaccttattcaggacgtcccctccaaatggagcaccagtttccatatgctggagcgcttaatcgagcagaagcgagctattaacgaaatgtcagtggagtgcaatttccgggagctgatttcctgtgatcagtgggaggtcatgcagtccgtgtgcagagccctcaaacctttcgaggctgcaagtagagagatgagcacacagatgtcaaccctttctcaggtgatacccatggtccacatactgaatcggaaggtggaaatgttgtttgaggagacaatgggcatcgacacgatgctgcggagtctgaaagaggccatggtgtcgagactctccgcaacactgcatgatcctagatatgttttcgctacccttctggatccacggtataaggcctctcttttcacagaagaggaggccgagcaatacaaacaggacctgattagagagcttgagctcatgaactccacatcagaggatgtcgctgcatcacatcggtgcgatgccggtagcccttcaaaagactccgctgcagaggagaatctgtggtcccttgtggccaaggtgaaaaagaaagacccacgagagaagttgcctgaggcaatggtcctcgcatacttggaggaagaggtgctggagcacagttgcgacccccttacatattggaacttaaagaaggctagctggcccggactctctgctttggccgttagattcctgggttgtcctccgtcaatagttccctctgaaaaattgttcaacactccgaccgagaatggctcattaggccagagcagactgatgatggagcatttcgagaaactgatcttcttgaaagtcaacttgcccttgatctacttccaatactag

SEQ ID NO: 27285 - DNA, 744 bp, synthetic construct
  source 1..744: mol_type = other DNA; note = Synthetic coding sequence
atgcagcctatcctgctgctgctcgctttcctgctgttgcccagagctgatgcaggtgaaatcataggcggacacgaagctaagcctcactccaggccatacatggcatacctgatgatttgggaccagaaatccttgaagagatgtggaggttttctgatacgtgacgactttgtcttgaccgccgcacactgttggggaagcagtataaatgtaaccctcggggcacacaatattaaggagcaggaacccacacagcagtttatccctgtaaagaggccaatcccccaccccgcatacaaccccaagaacttctctaatgatattatgttgctacagttggagagaaaagccaagcgaaccagagccgtccagccgctcagactgccctcaaacaaggcgcaggtgaaacccggtcagacatgtagcgtggccggttggggccaaacagcacctttgggcaaacacagccatacactgcaggaggttaaaatgactgtacaggaagataggaaatgcgagagcgatctgagacactattatgactccacgattgaactgtgtgtaggggatcctgagattaagaaaactagctttaagggagattctggtggtcccctggtttgtaataaggtggcccaaggaatcgtaagctatggcagaaacaacggaatgcctccccgagcctgcaccaaggtctcctcctttgtgcactggattaagaagacgatgaaacgatactag

SEQ ID NO: 27286 - DNA, 1062 bp, synthetic construct
  source 1..1062: mol_type = other DNA; note = Synthetic coding sequence
atggaagacggtgtgctaaaggaaggcttcctggtgaagagaggccatatcgtacacaactggaaggcgcgttggtttattcttcgacagaacaccttggtttattataaactcgaaggcggtcggcgtgttacacctcccaagggccgaatcctgcttgatggatgcaccataacttgcccttgtttggagtacgagaacaggccactgttgattaaactgaagacacagacttccactgaatattttcttgaggcctgctcaagagaggagcgtgacgcttgggcttttgagatcacgggcgctatccatgccggacagcctggaaaagtccagcagctccattcgctgagaaactcttttaagttgcctccacatattagcttacatcgcatagtggataagatgcacgacagcaacactggaattcggagtagcccaaatatggagcagggaagtacatataagaagacattcctcggctcctctctggtggactggctcatctcaaatagttttaccgcgagccgcctcgaggccgtcacgctggcctcaatgcttatggaggagaactttcttaggccagtgggcgtcagatctatgggcgcaattagatctggggatctcgcggagcagttccttgatgattccacagccctttacactttcgccgagagttacaaaaagaaaatctctcccaaagaagaaatcagcctctcaaccgtggaattgagcggaactgtggttaagcagggctatctggctaaacaggggcacaaacgcaaaaactggaaggtcagaaggtttgtgctgcgcaaagaccctgctttccttcactactatgatccaagcaaagaggagaaccgcccagtgggaggcttttcgctcagagggtcacttgtcagcgctctggaggacaatggcgtcccaactggcgtgaaaggtaatgtacaggggaacctatttaaggttatcaccaaagacgatacccattattatatccaggcatcctccaaagctgaacgggctgagtggatcgaggctattaaaaaactcacgtag

SEQ ID NO: 27287 - DNA, 2025 bp, synthetic construct
  source 1..2025: mol_type = other DNA; note = Synthetic coding sequence
atggcagaagtgcctgaggactatgatagtgggcctgacgaagacggcgaactggagcccgagcgtcctgagttaccaggactccataaactttacgagaatgccgagccagatactatggcgaaagccgactcaaaattacccgcagaaatttatcaggaaccccaaccagagacagaggaagaagatttcaaggagggtgagccagactcggccaagaatgtacagttaaagccaggtggaaccagtcaggaaggtatagccaaggaatccaagagggacgtgccctccgaaacagagccgggtatccaccaggaggtgaagtccgagacgtcgcgtgagatgggcgagttctttaaagatctggaggcacccatggacgaaacacataaggaatccgaccttgaacctccagaggaggccaagcctaacgtgaccgaagacgtttttcttgaatctgccatggagaccgatcctgatcccgtgcccccaacagaaaccatgtccgaggtgtcaggcgctactgtaagggaaagaaatcttgagcttctagaagaggagactgaaccaggggtccctgaggagtcactgagggtacagcacgaagagacaggcctggagccaccagagcagacgaagcaagacttcccttcagagaaactcggggagagcctggaagaaaccgatttacagcctcccaaaatgacgaaaccggagactccagaagagacacagcgagagagtacagaaaaaaagagaaccgaacctccagagcaggctagattagaatttcttgagaaagagccgcgaaaatcctctgaggaggccggtctggaaccacctgaggagacccagcccgaggtccccgaagagatgcaacgcaaagctacagaggaaaaaggcactgagctgcctgagcgcaccaagccagatttcccagatcataaacccaggaagtccacagatgagaatgtgcccgaaccgttagaggagattaagcttgaatttcctgaagaggagtctaggaaaacaaacgaagaaacaattctggagcagtccgagatgatgaaaccagagtcaccagaggagatacgcaaaagtaatgagaaaaagaaccctcagccaccagaagagactggaccagtgttacctcaggaaattaacccccaagtggaagagaagacacagaccaaaccaaccgagaaaatacttgagctccccgatgaaactaaacctcgggagactcacgttgagttttcaaaggaagaccgacccgagcctatcaagagcaagtacagtgttggtaatgacgaattggagcaccgggagcccaaacgaggtaagttgtccctgtccgacaagttcaggaaagaatactacgccctaggctctctccgagagtctgaagagtctattggtacgcattatgaattcttacagccactgcaaaaactgctgaacgtctccgaagagtgctcttatagtgaccctagtgaaagtcaaactgagctatcagaattcgtccacgaaaaggaagttgttgatttatctcaggagctcaaggagcgagtcagtgaagacgatgagacacaacctgaaaaagggaccgaactccagttcgagcacctgaactgggatccagaagaagttgccgaatggatctcacagctcgggttcccccagtataaagaatgctttattacaaattttataagcggcagaaagctaattcacgtcaactgtagcaacctgccgcagatggggatcacaaatttcgaagatatgaaggcaatctcccgtcacacccaagagctcctggaaattgaggagccactgttcaagagaagcatatctctgccttatcgggacatcattggtttatatttggagcagaaagggcatacaggcattaagtcagattctttaacgttgtcagagttcgtgaaagcagccggtctgcaggactacgcccctgaaataactgcccctgaggaaaacgaggagctgccctgtacggagccctag

SEQ ID NO: 27288 - DNA, 1689 bp, synthetic construct
  source 1..1689: mol_type = other DNA; note = Synthetic coding sequence
atgcggcctgagccaggaggctgctgctgccgcagaacagtgcgggctaatggatgcgtggctaacggagaggtgaggaacggctatgtccgatcttcagccgcagccgctgccgcagcagccgcaggtcagatccaccacgtaacccagaatggtgggctgtacaagcgtccattcaacgaggcctttgaagaaactcccatgctagttgctgtactgacctacgtgggctacggagtcctgaccttattcggttatctgcgggattttctgcgctattggaggatcgaaaaatgtcaccacgcaactgaacgggaagaacaaaaggacttcgtgagcctgtaccaggacttcgaaaacttctatactcgcaacttgtacatgcgcatacgcgacaactggaacaggccgatatgctcggtaccaggggctcgtgtggatattatggagagacagagccacgactacaattggtccttcaagtacaccgggaacatcattaagggagtaatcaacatgggtagctacaattatctcggttttgcacgcaacactggaagttgtcaggaggccgctgctaaggtgcttgaagagtatggcgcaggcgtttgctccaccagacaagagatcgggaatctggacaagcacgaagaactggaggaactggtggctcggttcctgggagtcgaggcagcgatggcctatgggatgggattcgcaactaatagcatgaatatcccggcactggtggggaaaggttgtttgattttgtccgatgaactgaaccatgcgtctcttgttctgggcgcacgcttgtccggtgcaacaatacgcatattcaaacataacaacatgcaatccctagagaaactgctgaaagatgcaatcgtatatggacagccaaggacccggaggccttggaagaaaattctgatactggtggagggcatttacagcatggaaggttccattgtgcgactgccagaagtgatcgctctgaaaaaaaagtacaaagcctacctgtatctagatgaggcccacagtattggcgcactcggacctacaggcaggggcgtggtcgaatattttgggctcgacccggaggacgtggatgtgatgatggggacgtttacaaaaagcttcggagcatctggtggctatatcggagggaagaaggagctcattgactacctgcggactcactcccactctgcggtatatgctactagtcttagcccacctgtagtcgagcaaattattacaagcatgaagtgcattatggggcaggatgggactagcctcggaaaggagtgcgttcagcagctggctgagaacacccgctactttcgcagacggttaaaagaaatggggttcataatttacggcaacgaagatagccctgttgttccgttgatgctgtacatgcccgctaaaatcggggctttcgggcgtgagatgctgaaacgcaatatcggagtcgtggtcgtagggttccccgctactccaattatcgagtccagagcccgtttctgcctttccgccgcacacacgaaagaaatactcgacaccgctttaaaggaaatcgacgaggtcggcgaccttttgcagctaaaatattctaggcacaggctggtgccccttctggataggccttttgacgaaactacatacgaagagactgaggattag

SEQ ID NO: 27289 - DNA, 2346 bp, synthetic construct
  source 1..2346: mol_type = other DNA; note = Synthetic coding sequence
atgagctcctcctctcctaccgggcaaatagcatccgctgccgacatcaaacaggagaatggaatggagagtgcatctgagggacaggaggctcatagggaagtggccggaggcgcagccgtgggtcttagcccacccgctccagccccttttcctctagagccgggagatgctgccaccgccgctgctagggtgagtggggaagagggagcagtggccgcagccgctgccggagcagcggcagaccaagttcagctacactccgaactcctggggcgacatcatcacgctgcagctgcagctgcccaaactcccctggcttttagcccggaccatgtcgcgtgcgtctgtgaggccctgcagcaagggggtaacctggaccgacttgccaggtttctgtggtctctcccccaatccgacttgctgcggggaaacgaaagtttactgaaggctagagcactggtcgcctttcaccaggggatatatcccgaattgtactcaatactggagtctcactcctttgagagcgcgaaccaccccctgttgcagcaactgtggtataaagctagatatacggaagctgaaagagcccgtggacggcctttgggcgcagtagataagtatcgcctgcgcagaaagtttcctctcccccgaaccatatgggatggagaagaaactgtgtattgtttcaaagagaagtctagaaacgccctgaaagagttgtacaagcagaatcggtatcccagccccgctgaaaaaagacatctggccaagatcaccgggctgtcactgacacaggtttcaaattggtttaagaatcggaggcagagggatagaaacccttctgagacacagtctaagagcgagtcagacggaaaccccagtaccgaggacgagagttctaagggacacgaagacctgtcacctcaccccctgagctcctctagtgatggcatcacgaatctcagcctcagctctcacatggaacccgtatatatgcagcagattggcaacgccaaaatcagcctgtccagcagcggagtgcttctaaatggctctctggtgccagccagtacgtcacctgtattccttaatggaaactctttcatacagggaccatccggagtgatcctgaatggactgaacgtgggtaacacccaggctgttgccctgaatcctccaaagatgagctcgaatatcgtgtccaacgggatttctatgacggacattctgggttctaccagtcaggacgtgaaagaattcaaagttctccagagctccgccaactcggccacaactactagctatagcccctctgttcccgtcagtttcccaggcctcatcccttctaccgaggtcaagcgggagggtatacagaccgtggcttcgcaggacggtgggagcgttgtgacatttaccacccccgttcagattaaccaatacggaatagtccagatccccaattctggcgctaattctcaatttctgaatggcagtattggtttcagtccacttcagttgccaccagtatctgttgccgctagtcaaggtaatatcagcgtgtcttcaagtaccagtgatggatccacgtttacaagtgagtctacaacggttcagcagggtaaggtgttcttgagtagcctggccccatctgccgttgtctacacagttccgaacaccgggcagacgatcggctcagtgaaacaggaggggcttgagagatcactagtttttagccagcttatgcccgtgaatcagaatgcccaggtcaatgcgaatctatcctcagaaaacatttctggctctggcttgcaccctttggcttccagcctagtgaacgtctcgcctacccataacttcagtctgagtccttctacactgctgaaccctacagagttaaatcgcgacattgcagactctcagccaatgtcggcccctgtggcttcaaaaagcaccgtcacaagcgtgtctaacaccaactatgccactttgcagaattgtagcctgatcactgggcaggatttactgtcagtacccatgactcaggccgcactaggcgagattgtccctaccgctgaggaccaggtaggccaccccagcccagcagtccaccaagacttcgtgcaggagcaccgcctcgttcttcagagcgtggccaacatgaaggaaaattttctgtccaattcagagagcaaggcgaccagctcattgatgatgctggacagtaagtctaaatacgtcctggatggaatggttgataccgtttgtgaggatttggaaaccgacaagaaagaactggcgaagctacagactgttcaattggacgaagacatgcaggacctgtag

SEQ ID NO: 27290 - DNA, 1392 bp, synthetic construct
  source 1..1392: mol_type = other DNA; note = Synthetic coding sequence
atgggtaaggagaagactcacatcaacattgtggtgattggacatgtcgatagcgggaaatctactaccactggccacctcatctacaagtgtgggggtatcgataagcgtactattgagaaattcgagaaggaggcggctgagatgggaaagggctcctttaaatatgcatgggtgctcgacaagttgaaagctgaacgcgagagaggtatcactattgacatttccctgtggaagttcgagaccactaagtattatattaccatcattgatgctcctggccatcgcgattttatcaaaaacatgatcacaggtacatcccaggccgactgcgcagtcttgattgtggctgcaggggttggagagtttgaagcgggtataagcaagaacggccagacacgagaacacgcgttactcgcctacaccctgggcgtgaaacagctaatagtgggagtgaacaaaatggattctacagagcctgcttatagtgagaagaggtatgacgaaatcgtgaaagaggtaagtgcttatataaagaagatcggatataatcctgccactgtcccctttgttcccatcagcggctggcatggcgataacatgctggaacctagccctaatatgccctggttcaaagggtggaaagtggaacgaaaagagggcaacgcgagcggggtatctctactcgaagctctcgataccatcctgccccctacgcggccaaccgataagccgctgcgcctccccctccaagatgtgtacaagatcgggggaattggcactgtacccgttgggagggtcgagaccggaatcctcagacccggaatggttgtgacgttcgccccagtgaacatcaccaccgaggtcaaatcagtggagatgcatcacgaggccctgagtgaagcactgcccggagacaatgttggttttaatgtgaagaacgtttccgtgaaagatataaggcggggaaatgtttgcggagattccaagtccgacccgccacaagaggccgcacagtttacgtctcaggtcattattctgaaccaccctgggcaaatttcagccggttactctccagtgattgactgtcacactgctcacatcgcttgtaaattcgcggagcttaaagagaagatagatcgtcgaagtggaaagaagcttgaagacaatcccaagtcactgaaatcaggcgacgccgctatagtcgaaatggtgcctggcaaacctatgtgtgtcgagtctttctcacagtatcccccattaggccgatttgcggtgcgcgacatgcgccaaactgtggccgtcggcgtcatcaaaaatgtcgagaagaagtcgggtggcgctggaaaagtaacaaaaagtgcacagaaagcccagaaggcagggaaatag

SEQ ID NO: 27291 - DNA, 600 bp, synthetic construct
  source 1..600: mol_type = other DNA; note = Synthetic coding sequence
atggccgctgccaataaggggaaatgtcttccaggtgtggtgggcctggcccaagctttacccgtcgggccagggagacgagcaatcgccgcaggcaacaagcctagagtgcgttcaatacggttcgctgcgggacatgacgccgaggggtcacatagccacgttcacttcgacgagaaacttcacgacagcgtggtgatggtcactcaggagtctgacagctccttcctcgtgaaagtgggattcctgaagatccttcatcggtatgaaattaccttcactttgccaccagttcatagactctcaaaggacgtgagggaagctccagtgcctagcctccaccttaagctgctgagcgttgtaccagtgcctgaaggctattcagttaaatgtgagtacagcgcacacaaagaaggcgtcctgaaggaggagatactcctggcatgtgaaggcggtaccgggacctgtgtgcgagtgaccgtccaagctcgcgtgatggaccgtcatcatggcactccaatgctgctcgacggcgtaaaatgtgtcggggcagagctcgagtatgacagtgaacattccgattggcacggatttgattag

SEQ ID NO: 27292 - DNA, 270 bp, synthetic construct
  source 1..270: mol_type = other DNA; note = Synthetic coding sequence
atgcaactacaggcatctttatcattcctgttgattctgactctctgtttagaactgaggtctgagctggcaagggacaccatcaaagacctgctgccaaatgtgtgcgcttttccgatggagaaggggccatgtcagacctatatgactcggtggttttttaattttgaaactggagaatgcgagctgttcgcctatgggggatgcgggggtaatagcaataacttcctccgcaaagagaaatgtgagaagttctgtaagtttacctag

SEQ ID NO: 27293 - DNA, 1251 bp, synthetic construct
  source 1..1251: mol_type = other DNA; note = Synthetic coding sequence
atgtcagaagccgatggtctcagacagcgcagacctctgaggccccaggtcgtcactgacgatgatggacaagctccggaagcaaaagacggcagctctttttcgggacgcgtcttccgtgttacctttcttatgttggcagtctcattaacagttccactgttgggggcaatgatgctcctagaaagccctatcgatccacaacctctgagctttaaggagccacccctcctgctcggagttctccatcctaacaccaagctacggcaagctgagaggctgtttgaaaaccagcttgtggggccagaaagcatagcccatatcggcgacgtcatgttcaccggaacggcagacggacgggtggtgaagcttgagaatggtgaaatcgaaacaatagctcgctttggatctggaccttgcaaaactagggatgatgagcccgtttgtgggagaccgttagggattcgggcaggtcccaatggaaccttgttcgtggcggatgcctataaggggttgttcgaagtcaatccatggaaaagggaagtgaaattactgctatcctctgaaacacctatagaaggaaagaatatgtctttcgtgaatgacctgacagtcactcaagacggtaggaaaatttacttcactgactcctcctctaagtggcaaagaagggactacctgttgttggtgatggaaggcaccgacgacggcagactcttggagtacgacactgttactcgcgaagtgaaagtcctgctggaccagcttcgctttccaaatggcgttcaactctccccagccgaggattttgtgttggtggccgaaaccacaatggcacggatccgtagggtctatgtttcagggctaatgaaaggaggggctgacctgttcgttgagaacatgccaggctttcctgacaacatcaggccctcaagcagcggaggctactgggtgggcatgtccactatccgcccaaatccaggattttccatgctggatttcctcagtgagcgaccgtggattaagcggatgatctttaaactgttcagccaagagaccgtcatgaagttcgtaccaaggtacagtctggttttggaattgagcgactccggagcattccgcagatcactccacgaccccgatggacttgtggctacttatatctcggaggtacatgagcatgacggacacttgtaccttggctcattccgctcgccatttttatgtcgtctgtccctacaggcagtgtag

SEQ ID NO: 27294 - DNA, 870 bp, synthetic construct
  source 1..870: mol_type = other DNA; note = Synthetic coding sequence
atggttggcgtgaagccagtgggatccgacccggatttccaacccgagcttagcggggctggttcacggctggcagtcgtgaagttcaccatgaggggctgtggcccatgtcttcgaatagccccagcgttttcatcaatgtccaacaagtacccacaggcagtgttcttagaagtcgatgttcatcaatgtcaaggcacagcggctacaaataacatttccgcaacacccactttcttgtttttccgaaataaggttagaatcgaccagtatcaaggcgctgatgcagtggggttagaggaaaagatcaagcaacatctggagaacgatccgggaagcaacgaggacactgacatacctaagggatatatggacctgatgcccttcattaataaagccggatgcgagtgtctaaatgagagtgatgaacacggattcgacaactgtctcaggaaagacaccacttttctcgagagtgattgtgatgaacagctgctgatcactgtggcttttaatcagccagtgaagctctacagtatgaagttccaagggcctgataacggacaagggcctaaatacgtgaaaatatttatcaatctgcccagatctatggactttgaggaggctgaaaggtctgaaccaacgcaggctctggagctgaccgaagacgacatcaaggaagacggaatcgttccactgcgttacgtgaagttccagaatgttaactcggtgactatcttcgtgcagagtaaccagggagaggaagagactacccggatctcctacttcactttcataggtacaccggtccaggctaccaatatgaatgattttaagcgggtggtcggcaaaaaaggggagagtcactag

SEQ ID NO: 27295 - DNA, 1164 bp, synthetic construct
  source 1..1164: mol_type = other DNA; note = Synthetic coding sequence
atggtttttgccttttggaaagtgttcctgatcctgtcttgcctcgccggacaagtgtcagtcgtccaggtgaccatccctgatggattcgttaatgtgaccgtgggatctaacgttactctcatttgcatctataccacaacagtggcatcaagagaacagctaagtatccagtggtcttttttccataaaaaagaaatggaaccaattagtatttatttttcccaggggggacaggccgtggctataggtcagtttaaagatcgaataaccggaagcaacgatccaggaaacgccagtattacaatctcccacatgcagccagcagacagtggcatttatatttgtgacgtcaataacccaccagattttctggggcagaaccagggcattctgaacgtatcagtcctcgtcaagccatcgaaacccctctgctccgtccagggcaggcccgagacaggacacacaattagcctgtcttgtttgtcggctctcggtaccccctcacccgtgtattactggcacaagctggaaggacgggatatcgttccagtgaaagaaaacttcaatccaaccacgggaatcctggtcattggaaatctcaccaacttcgaacaaggatactatcagtgcacggcaataaatcggttgggtaactcatcctgcgagattgatctgactagcagtcatcccgaagtaggcatcattgtcggcgctctcattggttcacttgtgggcgcagctataattatctctgtagtgtgtttcgctagaaacaaggcaaaggctaaagcgaaggaacgaaatagcaaaacaattgctgaactggaacccatgaccaagataaacccgcgtggggaatctgaggccatgcccagagaggatgcaacccagttggaagtcactctgccctcttccatacatgagaccggacccgacacaatccaagaacccgattatgaacctaaacctacccaagagccagcacccgagcccgctccagggagcgaaccaatggccgtcccggacctcgacatcgagctcgagctggagccagagacacagagtgaactggaaccagagccagaaccagaacccgaatctgaacctggagtggtcgtggagccactctcggaggatgagaaaggtgtcgttaaggcttag

SEQ ID NO: 27296 - DNA, 1821 bp, synthetic construct
  source 1..1821: mol_type = other DNA; note = Synthetic coding sequence
atgtcagacacatccgagagtggggcaggactgacaaggtttcaggctgaagcctccgagaaagactcctcatcaatgatgcagacactgttgaccgtaacacagaacgttgaagtacctgagacaccaaaggcctccaaagccctggaggtgtctgaggatgttaaagtcagtaaggcgtccggagtgagtaaagctactgaggtgtccaagactccagaggccagagaagcccctgcaacacaggcctcaagcaccacgcagctcaccgacacacaggtgcttgccgcagaaaataagtccctagcggctgataccaaaaaacaaaatgctgatccacaagccgtaacaatgcctgcaaccgagaccaaaaaagtcagccatgtggcagataccaaggtaaatacgaaagctcaggaaactgaggccgcaccatcccaggcacccgcagacgaaccagaacccgaaagcgctgccgctcaatctcaagagaaccaggatacaaggcctaaggtgaaagccaagaaagcccgaaaagttaagcacctcgatggggaagaagacgggtcaagcgaccagtcgcaggcttccggaacaaccggcggacgcagggtgagcaaggccctgatggctagcatggcgaggagagcaagccgtggcccaatcgcattttgggccaggcgcgcatctagaaccagactagctgcctgggcgcgtagagcattactcagcctgcggtcgccgaaggcaaggagaggaaaggctagaagacgagctgcgaaactgcaatccagccaggaacctgaggctccgccacctagggacgtcgctctgctgcaggggagggcaaatgatttggtgaagtacctgcttgctaaagatcaaaccaaaatcccgataaaacggtcagatatgctgaaagacatcattaaagaatacacagacgtgtatccagagattattgagcgagcaggctacagcctcgagaaggtgttcggcattcagttgaaggaaattgacaaaaacgatcatctgtatattctgctgtccacgctggagccgacggacgccggaatccttggtactaccaaagactcccctaaactcgggctgctgatggtgctgctttccattatctttatgaatggaaatcgttcttctgaggccgttatctgggaagtacttcggaaactaggcctgaggccaggcattcaccactccttattcggcgacgtcaagaagttgatcacagacgagttcgtcaagcaaaagtacctcgattacgctagagtgcccaacagcaacccgccagagtacgaattcttctggggtctgcggtcctactacgagacctctaaaatgaaggtcctgaagttcgcctgtaaagtgcaaaagaaggacccgaaggagtgggcagcccagtatcgagaggccatggaggccgacctgaaggccgcagcggaagccgcagcagaggccaaagcacgtgcagagataagagcgaggatggggatcggactgggtagcgaaaatgccgcaggaccatgtaactgggacgaagctgacataggcccttgggcgaaggcgaggatccaggcaggggctgaagccaaagctaaggctcaggaatccggctccgcatcaacaggtgcctcgacatctacgaacaactccgcctccgcctcagcctcaacttccggtggcttcagcgccggtgcctcactgactgcaaccctcacatttggcttattcgctggtctgggtggggctggagcctccacatccggctcctcgggcgcttgcggcttctcgtacaagtag

SEQ ID NO: 27297 - DNA, 369 bp, synthetic construct
  source 1..369: mol_type = other DNA; note = Synthetic coding sequence
atgaccacagcgaccagacaggaagtcctcggcctgtacagatctattttcagactcgccagaaagtggcaagccacctccgggcagatggaggacactatcaaagaaaagcagtacatcctgaacgaagcccgtaccttattccgcaaaaacaagaacctcacagacacagacttgatcaaacagtgtattgacgagtgtaccgctagaattgagatcggcctccactataaaattccgtatccacgtcctatacacctgccgcctatggggctgacacctttacgcggaaggggtttgcgctctcaggagaagttaagaaagctctccaaaccagtctacctgagaagccacgatgaagtctcttag

SEQ ID NO: 27298 - DNA, 582 bp, synthetic construct
  source 1..582: mol_type = other DNA; note = Synthetic coding sequence
atgctgggggtgttggaacttcttctcctgggagccgcttggttggccggaccagccagaggacaaaacgaaaccgagcccatcgttttagaaggcaagtgtcttgtggtgtgcgatagtaaccccacctcggaccccactggcacagcactgggcatatctgtgcgctcgggatcagcaaaagtggctttttcggccattagaagtaccaaccacgagcctagtgaaatgagcaaccgcactatgataatttactttgaccaggtactcgtcaacattgggaacaatttcgactccgagcgaagcaccttcatcgctcctcgtaaggggatatactctttcaactttcacgtcgtgaaagtgtacaataggcagaccattcaggtgtccctgatgctgaacgggtggcccgttatctccgctttcgcaggcgaccaggacgtgacccgggaggctgcgagcaacggcgtcctgattcagatggaaaagggcgaccgggcatacctcaagctggagcggggtaatctcatggggggatggaagtattctaccttctcaggattcctcgtgttccccctatag

SEQ ID NO: 27299 - DNA, 1578 bp, synthetic construct
  source 1..1578: mol_type = other DNA; note = Synthetic coding sequence
atgtcaaggcaattgctgcccgttctcctactcctactactcagggctagttgtccttgggggcaggagcagggcgcaaggagccccagcgaggagcctcccgaagaagaaatccccaaggaagacgggatcctcgtactgtcccgccacacactcggccttgcactgcgtgaacatcctgccttactggtcgaattttacgctccgtggtgcggacattgtcaggccctggcccctgaatactcaaaagctgccgcagtcctggcagccgagagcatggtggttacgctcgccaaggtggacggccctgcccagagagagctagcagaagaatttggagtcactgagtatcctaccctgaaattttttcgcaacgggaatagaactcatcccgaggaatataccggacctcgggacgccgagggcatcgccgaatggcttcgaagaagggttggtcctagcgccatgagactggaagacgaggcagctgctcaggctctgataggagggcgagatctggttgtgatagggtttttccaagacttgcaagatgaagatgtcgctacgttcttggcgctggcgcaagacgcactggatatgacatttggcctgacggacagaccgagattgtttcaacagttcggacttactaaggacactgtagtattgttcaagaaatttgacgagggaagagccgatttcccagtggatgaggagctcggcttagatctgggcgacctgtccagatttctggtgacccactcaatgcgacttgtgaccgaatttaattcccagacaagtgccaagatcttcgccgcacgcattcttaaccatctgctgttatttgtgaaccagactctcgctgcccatagggagctgctcgcgggatttggcgaagcagcccctaggtttaggggccaggttctgttcgttgtagtagacgtggctgccgacaacgaacacgttctgcagtacttcggtctgaaagcagaagccgcaccaaccctgcggttagtaaatctcgagactactaagaaatacgcccctgtggacggcggtccagtcactgccgctagcatcacggcattttgccacgccgtgttgaacgggcaggtcaagccttatttgctctcccaggaaatccctccggattgggatcaacggccagtaaaaaccttagtgggtaaaaactttgagcaagtggcattcgatgagactaagaatgtgttcgtgaagttctatgcaccatggtgtacccactgcaaagaaatggctcccgcatgggaggcactagcagaaaaataccaggatcacgaagatatcatcatagcagaacttgatgctacagcgaatgagttagatgcatttgccgtacatggcttccctactctaaagtacttccctgccggacctggtagaaaggtaatagagtacaaatccacccgtgacctggaaacgttcagcaagtttctggacaacgggggagtgttgcctaccgaggagcctcccgaggaacccgcagctccatttccggagccgcctgcaaatagtaccatggggagtaaggaagagctctag

SEQ ID NO: 27300 - DNA, 2262 bp, synthetic construct
  source 1..2262: mol_type = other DNA; note = Synthetic coding sequence
atggccgacaagcgaaaactgcagggcgaaattgaccgctgtctgaagaaggtgtcagagggtgtcgaacagttcgaggacatctggcagaaactgcacaatgcagcaaacgcaaatcagaaggagaaatacgaagcggatctgaaaaaagagattaagaagctccagagattgagggaccaaattaagacgtgggtcgcgagcaacgaaataaaggataaacgacagctgattgacaatcgtaagctcatcgaaacgcaaatggagcggtttaaggtggttgagcgcgagactaagactaaggcttacagtaaggaaggccttggccttgcccagaaggtcgatccagcccaaaaggaaaaggaggaagtgggccagtggcttaccaatactatagatactctcaacatgcaggtggaccaatttgaatcagaggttgagagcctgtctgtacagaccagaaaaaaaaaaggcgataaagacaagcaggacaggattgagggtctcaagcgacacatagaaaaacatcggtaccacgtgcgcatgctagagacgattttgcgaatgctggataacgactctatactcgtcgacgccatacgaaaaatcaaagacgatgttgaatattatgtggactcatcacaggaccctgactttgaggaaaatgagtttctctacgacgatctggatctggaggatatcccgcaggcccttgtcgccacttcacccccatctcacagccacatggaagacgagatattcaaccaatcaagtagtactccaacctcaaccacttcttctagtcccattcctccttcccctgcaaactgcactacggagaatagcgaagacgacaaaaagaggggcagatcaacagacagcgaggtttcccaatccccagctaagaatgggagcaaaccggtgcattccaaccaacaccctcagagccctgcagtgccccctacttatcccagcggccctcccccagccgctagcgcattgtcaacgacccctggaaataacggagtgccagctcctgccgcaccaccgagtgctctggggcctaaggcatcgccagccccatcacacaatagcggaacaccagcaccctacgctcaagcagttgcacccccagctcctagtgggccatcaaccacacagcccaggcccccatccgtccagccctccggcggtggaggagggggttcaggcggtgggggatccagttctagctcaaactcgtctgccggtggcggagccggaaaacaaaacggagccacgagttacagctcagttgtggccgactccccagccgaagttgccctctcttctagcgggggaaataatgccagttctcaggcgcttgggcctccttctggcccacataatccccctccttccactagcaaggaacccagtgctgccgctcctaccggggctggcggagtggctcctggctctggtaataattcaggcggtccgtcattgctggtcccccttcctgtcaatccccctagtagcccaaccccctccttttcagatgccaaggcggcaggagccctgctcaacggtcccccacagttttcgacagccccagaaattaaggctcctgagccactttcttcactgaagtcaatggccgaacgggcagctattagcagcggcatcgaggatcccgtacctaccctgcatctcactgagcgcgatataatccttagcagtacaagcgctccgcctgcgagtgctcagcctccactccagttgtccgaagtgaacattcccctgtccctgggagtgtgccctctcgggccagtaccactgacaaaggaacaactgtaccagcaggcaatggaagaggcagcatggcatcatatgccccacccctccgactctgaacgcattcgccagtacctcccgaggaatccctgtcccacccccccatatcatcaccagatgcccccacctcacagcgataccgtggaattttaccagcgcctctccaccgaaactttatttttcattttttattaccttgagggcactaaagcacagtatctggctgccaaggctcttaagaaacaatcttggcggtttcacactaaatacatgatgtggtttcagcggcacgaagagccgaaaactattacggacgaatttgaacagggcacctatatatacttcgactacgaaaagtggggccagaggaagaaagaaggtttcaccttcgagtatcggtacctggaagatagggatctgcaatag

SEQ ID NO: 27301 - DNA, 1146 bp, synthetic construct
  source 1..1146: mol_type = other DNA; note = Synthetic coding sequence
atgcccttcggaaacactcacaataagtttaagctcaattacaaaccggaagaagaataccctgatctctccaagcataataatcatatggctaaggtcctgaccctcgaactctacaagaaactccgcgataaagagacaccttccggctttacagttgacgacgtcatacagacaggggtggacaatccagggcacccattcatcatgacggtggggtgtgtcgccggtgacgaagagtcctacgaggtctttaaggagctgtttgacccaattatcagcgaccgccacggaggttacaagcccactgacaaacataagacagacctgaatcatgagaaccttaaaggcggagatgatctggatccaaattatgtattaagctcccgggtcaggacagggaggtccattaaaggctacaccctaccacctcactgcagcaggggggagcgcagggctgttgagaaattatctgttgaggcgctcaatagcttaaccggcgagtttaagggtaagtattatcctctgaaaagtatgaccgagaaagagcaacagcagctgattgacgatcattttttgtttgacaaaccggtgagtcccctcttgttggctagcggcatggccagagattggcccgacgctagaggtatctggcataacgataacaagagctttctagtctgggtgaacgaggaggatcatctccgtgtgatctcaatggagaagggagggaatatgaaggaagtgtttcgcagattctgtgtaggactccaaaagatcgaggagatcttcaagaaggcgggtcatccatttatgtggaatcaacacctgggatacgtcctgacgtgcccctccaatctagggacaggtcttagagggggtgttcacgttaaacttgcccatttatctaaacaccctaaattcgaggaaattctcaccaggctcagactgcaaaaacgaggcacaggaggagtggatactgccgctgttggctcagtttttgacgtctcgaatgctgatagactgggctcctccgaggtggaacaagtgcaattggtcgttgacggtgtgaaattgatggtcgaaatggagaaaaagcttgagaaaggccagtctattgatgacatgatccccgcacaaaaatag

SEQ ID NO: 27302 - DNA, 300 bp, synthetic construct
  source 1..300: mol_type = other DNA; note = Synthetic coding sequence
atggcccagggccagcgcaagttccaggcccataagcccgcaaaaagtaaaacagccgcagcagcctcagagaaaaatcgcggtccacgcaagggcggacgtgttatcgccccaaaaaaggcaagagttgttcagcaacagaagctcaaaaagaacctggaagtggggataagaaaaaaaatcgagcatgatgtcgtgatgaaggctagctcgagtttgcccaagaaattggccctacttaaggcacccgcaaagaagaaaggcgctgcggctgctacctcctccaaaactccatcatag

SEQ ID NO: 27303 - DNA, 1491 bp, synthetic construct
  source 1..1491: mol_type = other DNA; note = Synthetic coding sequence
atggacgacgtgcctgctcctactcccgctcctgccccacctgccgcagccgctccaagagtcccctttcactgttccgagtgcggcaagtctttcaggtatcgctccgacctgcggaggcactttgctcgccacactgcccttaaaccgcacgcgtgtccacggtgtggtaaaggattcaagcatagctttaatctagccaatcatctgagaagccatacaggggaaaggccatacagatgctcagcttgtccaaaaggatttagggactccaccggcttattgcaccatcaggtggtgcacactggagaaaagccttactgctgcctggtctgtgaattaaggttcagctcccggtcaagcctcggcaggcacctgaagcgacagcacagaggggtgttgccctccccacttcagccaggccctggcctccctgctctgtcagctccttgctccgtttgttgtaacgttggtccttgctcagtctgcggcggatctggcgctgggggtggagaagggccagagggggctggtgctggcctggggagctgggggcttgccgaggccgcagccgcagcagctgccagcctgccccctttcgcctgtggcgcatgtgctcgtaggtttgatcatggccgagaactggccgctcactgggccgcacatacagatgtaaagcccttcaaatgcccacggtgtgagagggacttcaacgctcccgcactgctggagagacataagctgacgcacgatctacaggggccaggggcaccgccagcccaggcctgggcagcgggaccaggagccggtcccgagacagcaggcgaaggtacagcagccgaggccggagatgcaccactcgcttccgacaggagacttctcctgggtccagctgggggtggagttccaaagttgggcggtctgctaccggagggcggtggagaggccccagccccagcggcagcagccgagccctcagaggatactctgtaccagtgtgactgtgggaccttctttgcttcggccgctgccctcgcttcccacttggaggctcacagcgggcctgcgacctatggctgcggccactgtggggcactgtatgccgcactcgctgcactcgaggaacataggagagtgtcccacggggaagggggaggggaggaggctgccactgccgctcgcgaaagagagcccgctagtggggagccaccttctggctccggacggggaaaaaagatttttggctgtagcgaatgcgaaaagctcttcaggtccccccgtgacctggaacgccacgtgctcgtgcataccggtgaaaaaccatttccctgtctcgagtgcggaaaattctttcgccacgaatgctatctgaagcgacatcgtcttttgcacggcacggaaaggcccttcccttgccatatctgtgggaaaggattcatcaccctttccaacctgtctcgacacctgaagctacatcgagggatggactag

SEQ ID NO: 27304 - DNA, 663 bp, synthetic construct
  source 1..663: mol_type = other DNA; note = Synthetic coding sequence
atgaagagtgtgatatatcatgccttaagtcagaaagaggcaaacgatagcgacgtgcaaccttctggggctcagagagccgaggcgtttgtcagagcattcctgaagaggtctacgccccgaatgtctccgcaggcacgtgaggatcagttgcagagaaaagccgtcgtgttggagtattttacacgccataaaaggaaagagaagaagaagaaggcaaagggactgtcagccaggcagagacgtgagctgcggctgttcgatataaaacctgagcagcagaggtatagcctctttcttcctctgcatgaactgtggaaacaatatattagagatttgtgttctggactgaaaccagacacccagccccaaatgattcaggccaaattacttaaagccgatctgcacggtgcaatcatttccgtcacaaagtcaaagtgtccatcatatgtaggaattacaggaatcctgctgcaggagacaaagcacatctttaaaataataaccaaggaagaccggctgaaagtgattcccaagctcaactgtgttttcactgtggaaacagacgggtttataagctacatctatggtagcaagttccaactccggagttccgaacggtccgcgaaaaagttcaaagccaagggcacaatagatttgtag

SEQ ID NO: 27305 - DNA, 768 bp, synthetic construct
  source 1..768: mol_type = other DNA; note = Synthetic coding sequence
atggccagagcgaaagcactgttgggagggcctggagaagagttggaggcagacactgaatacctggatcccttcgatgctcagccacacccagccccaccggatgacgggtatatggagccttatgacgcccaatgggtgatgagtgaactaccgggaaggggtgtccagctctatgatacaccttacgaagagcaagatccggaaacagcagatggccctcccagcggccagaaaccacggcagtccagaatgccacaggaggatgaaagaccggctgacgagtatgaccagccttgggaatggaagaaggatcacatctctcgcgcatttgcggtccagtttgactcaccagaatgggagcggactcccggaagcgcgaaagaactgcgtaggcctccccctaggagcccacagccagctgagagggtagatccagctttgcccctcgagaagcagccttggttccatgggccacttaaccgtgccgacgcagaatcgttgctgagtctgtgcaaggaagggagctatctcgtgagactctctgagacaaacccccaggactgttcactgtcacttagatcttcccaggggtttttgcacctcaagttcgctagaactcgcgaaaaccaagtggtgctgggccaacattcaggaccttttccaagcgtccccgagttagtcctgcactatagttcccggcctctgcccgtgcagggggctgaacacctggctttgctttatcccgtggtaacccagactccttag

SEQ ID NO: 27306 - DNA, 858 bp, synthetic construct
  source 1..858: mol_type = other DNA; note = Synthetic coding sequence
atgtctgacgacttcctctggttcgaaggcattgcattcccaaccatgggcttcagatccgagaccctgagaaaggtgcgggatgagtttgtgatccgcgacgaggacgtcatcatcttgacttaccccaagtctggcacgaattggttggctgagattctgtgtctgatgcatagcaaaggcgacgccaagtggatccagagcgtcccaatatgggaaaggtccccctgggtcgagagcgaaatcggatataccgccctctctgagacggaatctccaagattgttttcatcccacttacccattcagctctttcctaaatctttttttagctccaaagcaaaggtaatctatctaatgagaaatcccagagatgtccttgtgtcgggatatttcttctggaaaaacatgaagtttatcaagaaacccaaaagctgggaggaatactttgaatggttctgccagggcactgtgctgtacggctcttggtttgatcatatacacgggtggatgcccatgagggaggaaaagaacttcctccttctgtcctacgaggagctgaagcaggatacagggagaactattgagaaaatttgtcaattcctcggaaagacgctcgaacccgaagagctaaatttaattcttaagaacagctcatttcaatcaatgaaggaaaataagatgagcaattacagcctactgagtgtggactatgttgtagataaggctcagctgctgcggaaaggagtgtctggagactggaagaatcattttactgtggcccaggccgaggacttcgataaactgttccaggaaaaaatggcagacctccccagagaactgttcccctgggagtag

SEQ ID NO: 27307 - DNA, 1647 bp, synthetic construct
  source 1..1647: mol_type = other DNA; note = Synthetic coding sequence
atgaagacacctgcagacaccggtttcgcgttcccagactgggcgtataagccggagagcagcccagggagccgtcagatacagctctggcacttcattctggagttactgcggaaggaggagtaccagggtgttatagcatggcagggcgactatggggaattcgtgattaaggaccctgatgaggttgctaggctctggggcgttagaaagtgtaaaccgcagatgaactatgacaaactgagtcgcgcattgcggtattactacaacaagaggattctgcataagactaaggggaaacgatttacttataaatttaattttaataagctcgtattggtgaattacccgttcattgacgtaggactagccggaggtgcagtgccccaaagcgccccacccgtcccaagcggcggatcccacttccggtttccgccttcaactccttccgaggtgttatcacctacagaggaccctagatccccacccgcatgctcttcctcgagctccagcttgttctctgccgtcgtagctagaagactgggtaggggctcggtcagcgactgtagtgatggcacctctgagcttgaagaacctctgggggaggacccacgtgcccgacctccagggccacctgacctaggggcatttcggggaccgcctctggccagattaccccacgatcctggcgtgtttagagtgtacccaagacctcgaggcggacccgaacccttgtcgccttttcccgtctccccactagccggtcctgggagtctgctgccgccacagctatcacccgcactgccaatgactcccacccatttggcctacaccccgtcccctacactatctcctatgtatcccagtgggggtggagggcctagtggcagcggcggtggctctcatttttcatttagccctgaagacatgaaacgctacctccaagcccacacccaatccgtgtataactaccatctttctccacgagcattcctgcactatcctgggttggtggtaccacagccccaaaggcctgataagtgtccgcttcctcctatggcacccgagactccccctgtgccatccagcgccagtagctctagctcttcctcgtcttctccatttaaattcaagctacagccccctccgttggggagaaggcagagggcggcaggggaaaaagcagtcgctggagccgataagtcgggcggatcagccggagggctcgctgaaggcgcaggggctctcgctcctccaccccctccgcctcaaatcaaggtggaacctatctccgagggcgaaagtgaggaagtagaagtcactgacatcagcgacgaggacgaggaggacggggaggttttcaagaccccccgagcccctcccgcaccccctaaacccgagcctggagaggctcctggggcttcacaatgtatgcccctcaaactgagattcaagaggcgctggagtgaagactgccgcctggagggagggggaggacctgcagggggattcgaggatgagggggaagacaagaaagtacgcggagaaggtcccggtgaggcgggaggcccacttacgccaagacgcgtaagctctgatcttcagcacgcaacagctcagctgtcattggagcatagggactcttag

SEQ ID NO: 27308 - DNA, 1530 bp, synthetic construct
  source 1..1530: mol_type = other DNA; note = Synthetic coding sequence
atgggcgtcctgaaatttaagcacatcttcttcagatcctttgtcaaatcctcaggcgtctcccagattgttttcaccttcctcctgattccctgctgtctaactctgaacttccgggctccaccagtaattcctaacgtgccctttctctgggcctggaatgctccctcagaattttgcctgggaaagtttgacgaacccctggacatgtccctttttagttttatcggttctccccgaataaatgcaaccgggcagggggtcacaattttttatgtggaccgcctaggttattatccgtatatagacagtataactggagtgacagtgaatggcggaatacctcaaaaaattagcttacaggatcacctggataaggccaagaaggatatcacgttctacatgccagtcgataatcttgggatggcggtgattgactgggaagaatggcgcccaacctgggcacgaaattggaagccaaaagatgtgtataaaaatcgaagcatagagctggtgcagcagcaaaatgtacagctctcgctcacagaggccactgagaaggctaaacaggagttcgaaaaggccggaaaagattttctggttgagactattaagctgggtaaactgttaagaccaaaccacttgtggggctattacttattccctgactgctacaatcaccattacaagaagcctggctataatggatcttgtttcaacgtggagattaaacggaacgacgatctttcatggctgtggaatgagagcacagcactctacccctctatatatctcaacacccagcagtctcccgtagccgcaactctttatgtccggaatcgcgttagagaggctatcagagtatctaagattcctgacgcaaagtccccgctaccggtgttcgcctatacaaggatcgtttttacagatcaggttctaaaattcttgtcccaggacgaactggtgtatactttcggcgagaccgtggcgctcggagcctccggtattgttatctggggaaccctgagtatcatgcgttctatgaagtcttgcctacttcttgataactatatggaaactatcttaaatccatacattatcaacgtgacgctcgccgctaagatgtgttcacaagttttgtgtcaggagcagggcgtgtgtatccgcaagaattggaattcatcagactatctgcacttaaatccagataactttgccatccagttagagaaaggaggaaagtttacagtgagaggcaagcctactctcgaggatctggagcagttttctgaaaaattctactgctcctgttattctactctgtcatgtaaggaaaaggccgatgtgaaggatactgacgccgtagacgtatgcatagccgatggcgtctgcatagacgctttccttaaacctcccatggaaactgaagaaccgcaaatattttacaacgcaagcccctccaccctaagtgccaccatgttcatcgttagcatcctgtttctgatcatttcctcggtagcctctctctag

SEQ ID NO: 27309 - DNA, 1041 bp, synthetic construct
  source 1..1041: mol_type = other DNA; note = Synthetic coding sequence
atggagacccaactctcaaatggcccaacctgcaacaacaccgctaacgggcctacaaccattaataataactgctcttcgccagtagactccggtaatactgaggattctaagaccaacctgattgtcaattatctcccccagaatatgactcaggaggaattgaagtctctctttggctcaataggcgaaatcgagagctgcaagcttgtgcgggataagataaccggccagagtctgggctacgggttcgtgaattacattgatcctaaagacgccgaaaaggccatcaacacgctaaacggtcttagacttcagactaaaaccattaaagtctcctatgctaggccatcatccgcttccatcagagacgctaatctgtacgtgagtggtctccctaaaactatgactcagaaggagctggaacaactgtttagccagtacgggagaataataacctcaaggatactcgtggaccaagtcacaggcattagccggggagtaggattcatccgctttgacaagaggatcgaggccgaggaggccattaaggggctgaatggtcagaaaccacccggtgccacagaacctattactgtgaagttcgccaacaatcccagccagaaaactaaccaggccatcctctcccaactgtatcaaagcccaaaccgacgatatcccggacccctggctcagcaggcacagcgcttccggttctctccaatgacgatcgatggaatgacatcgctggcaggcattaacattcccggtcatccaggaacgggatggtgcatcttcgtgtataatctggctccagatgccgacgaatctatactctggcagatgttcggaccattcggcgctgtcactaacgtcaaagtcatcagagactttaataccaataaatgcaagggcttcgggtttgtgacaatgaccaattacgatgaagccgcaatggcaatcgcctcccttaacgggtatcggctcggggatcgtgtactgcaagttagctttaagacaaacaagacccataaggcgtag

SEQ ID NO: 27310 - DNA, 1437 bp, synthetic construct
  source 1..1437: mol_type = other DNA; note = Synthetic coding sequence
atggctcacgtgcccgcacggacttccccaggacccggaccccaattacttctgctgttactgcctttatttcttttgctcctgagggacgttgccggttcccacagggcacccgcatggtcagcacttcccgctgcggctgacggactccaaggagatagagacttacagcgccaccccggtgacgcggctgccaccctaggcccatccgcccaggacatggtcgctgtccacatgcatcgcctctatgagaagtatagccggcagggagccagacccggaggtggcaacaccgtgagatcttttcgcgctagactggaggtcgtggaccaaaaggcggtttacttctttaaccttacctcgatgcaagatagcgaaatgatcctaacggcaacatttcacttctattccgagccgcctcgctggcctcgagcactagaagtactgtgtaaacctcgcgcaaaaaacgcctcaggtcggccactgccacttggcccacccacacgccagcacctcctgttccggtccctgagtcagaacaccgccacacagggtctgctgcgcggagcgatggccctggccccacccccaagaggcctatggcaggcaaaggacatttcacccatcgtgaaagcagccaggagagacggggagctccttctgtccgcccagctagatagtgaggagcgtgaccctggggtgccaagaccctccccctacgcgccttacatacttgtctacgccaatgacctggctatctctgaacccaactccgtggcggtgacgctccagcgctatgatccattcccagccggtgatcccgaacctagggcggctccaaataacagtgccgatccgagggtgagaagagcagcccaggctactggcccactccaagataacgagcttccaggtctggacgaacgccctccgcgagcacacgcgcagcacttccacaagcaccagctgtggccatctcctttcagggccctaaagcctcggccagggcgaaaagatcgtagaaaaaaaggccaggaggtcttcatggctgcctctcaggtgctagacttcgatgagaagactatgcagaaagctaggcgaaaacagtgggacgagccaagggtgtgttcacggcgttacctcaaggtggatttcgctgacatcgggtggaatgagtggataatttcccctaagtcatttgacgcctattattgcgctggagcatgtgagtttcctatgccaaaaattgtccggccttctaaccatgcaacaatccagagcattgtccgcgctgtgggaatcatcccaggtatccccgagccctgttgtgtgcccgataagatgaactcgctgggtgtcctgttccttgacgagaatcggaatgtggtgctgaaagtgtatccgaatatgtccgtggacacttgcgcatgccgctag

SEQ ID NO: 27311 - DNA, 978 bp, synthetic construct
  source 1..978: mol_type = other DNA; note = Synthetic coding sequence
atggaatccaaaatgggagagctgccgcttgatatcaacattcaggagccaaggtgggatcagtcaacttttctcggcagggcaagacactttttcaccgtcaccgacccaagaaacctgctgctcagtggtgcgcaattggaggcgtctagaaatatagtgcagaattaccgggcaggcgtggtgactcccggaattaccgaggatcagctgtggcgcgctaaatacgtctacgattctgcttttcatccagacacaggcgaaaaggtcgtactgatcgggcgaatgtctgcgcaagtgccaatgaacatgaccatcactggttgtatgctgacattctaccgaaagacacccacagtggtgttttggcagtgggtcaatcagagttttaatgctatcgtgaattattctaataggtcaggcgacacccctatcacagtacgtcaactgggcacggcctatgtctctgcaactacgggcgctgtggctacagcactgggactgaaatctctgacgaagcacctcccccctttggtgggtaggttcgttcccttcgctgctgtcgccgctgcaaattgcattaacattccactgatgcgccaacgggaactgcaagtagggatcccagttgctgatgaggccggacagcgactagggtacagcgtaacagcagcaaagcagggaattttccaagtcgtcatctcaagaatctgtatggctattcctgccatggcaatccctcccttgatcatggatactctggaaaagaaagacttccttaaaaggaggccgtggctgggggctccacttcaggtggggctagtgggcttctgtctggtgttcgccacgcctctctgctgcgcgctgttcccgcagaaatcctccatccatattagcaatctggagcctgagctgcgagcgcaaattcatgagcagaacccctccgtcgaagtggtgtattataacaagggcctgtag

SEQ ID NO: 27312 - DNA, 1068 bp, synthetic construct
  source 1..1068: mol_type = other DNA; note = Synthetic coding sequence
atggaacctcacctgcttgggctactcctgggcctgcttctaggcggtacacgagtcctggctggctatccaatctggtggagccttgccttaggccaacagtacacctctctcgggtcacagccactgctttgcggcagtattcctggtctcgtgccaaagcagcttagattttgccggaattatattgaaataatgccaagtgtagccgagggcgtcaaactaggcatacaggagtgccagcatcagttccgcggtcggaggtggaactgcacaacgatcgatgatagcttagccatattcggtcccgtgctggacaaggcaaccagagaatcggcttttgtgcacgccattgctagcgccggagtcgcctttgcggtgacacgctcgtgcgctgagggcacatcaaccatctgcggctgtgactcccaccacaagggaccacctggggagggctggaaatgggggggatgcagtgaggacgcagattttggggtgcttgtctcgcgggaattcgcagacgcgcgagaaaataggcctgatgctcgttcagccatgaataaacacaacaatgaggcaggacgcaccaccatcctggatcatatgcaccttaagtgcaaatgtcatggactgagtggcagctgtgaggtgaagacatgttggtgggcacaacccgacttccgggctatcggggacttcctgaaggataaatacgactccgcaagtgagatggtcgttgaaaagcacagggagagccgcggatgggtggagaccctacgggctaaatattccctctttaagcctcccactgagcgtgacctcgtctactacgaaaacagccccaatttctgtgagcccaaccctgaaactggcagttttggcacccgcgacaggacctgcaatgtcacatcacacggtattgacggatgtgacttgctgtgctgtggaaggggccataacacacggaccgagaaaagaaaggagaaatgccactgcatcttccactggtgttgctatgtctcctgtcaggaatgtattaggatctacgacgtccacacctgcaagtag

SEQ ID NO: 27313 - DNA, 1437 bp, synthetic construct
  source 1..1437: mol_type = other DNA; note = Synthetic coding sequence
atggcagcgaggcctataactctgggtatcgatctgggcaccacttccgtgaaggcagccctgttgcgcgcagcgcctgacgacccgagtggtttcgcagtgttagcgagttgtgccagagcagcccgtgcagaggccgctgtcgagagtgccgtagctggcccacagggacgagagcaggatgttagtaggatccttcaggcactgcacgagtgcttagctgccttacctcggcctcaattgagatctgtggtcggcatcggggtttccggccagatgcatggcgtcgtgttctggaagacagggcagggatgcgaatggaccgaaggtggcatcactcctgtgttcgagccaagagcggtttctcacctggtgacctggcaggacggcaggtgttcatccgaattcctggcatcactgcctcagccaaagtcccacctctcggtggcaaccggattcggctgcgccacgattttctggcttctcaagtatagacccgagttcctgaagagctacgatgcagcgggaaccatccacgactatgttgtggctatgctgtgcggtctgccgaggccccttatgtcagatcagaacgccgcttcttggggttactttaatacccagtcccaatcgtggaatgtcgaaactctaagatcttctggattcccggtgcacctgctcccagatattgccgagcctggctcagtcgccggacgcacttcccacatgtggtttgagataccaaagggtacccaagtgggagtcgccttgggcgacctgcaagcctctgtctactcctgtatggctcagcggacagacgcggtgctcaacatcagcacatcagttcagctcgcagcatcaatgcctagtgggttccagccagcccagacccctgatcctaccgctccggtagcgtactttccgtatttcaaccgaacttacctgggagtagcagccagcctgaatgggggaaatgtgctcgcgacattcgtccatatgctggtgcagtggatggcggatctgggtctggaagtcgaggaatcaaccgtgtactcccgaatgatccaggctgccgtgcagcagagggatacacatttaacaatcaccccaaccgtgctgggcgaacgccacctgccagaccaattagcaagtgtgacacggatatcttccagcgatctgtccctggggcatgtaaccagggccttgtgtcgcggtattgtgcagaatctccacagtatgctgccaatccagcagctgcaggattggggggttgagcgcgttatgggaagcgggagtgccctatctagaaatgatgtgctcaagcaagaggttcagagagcttttccactgcctatgagttttggccaagatgtggatgccgctgtgggggcagctctggtcatgctccgtcgccatctgaatcagaaggaaagctag

SEQ ID NO: 27314 - DNA, 1578 bp, synthetic construct
  source 1..1578: mol_type = other DNA; note = Synthetic coding sequence
atgcgacggagaaggcgtagagacggattttaccctgcccctgactttagagacagagaagcggaggatatggcaggcgttttcgatattgatctggaccagccagaggacgcaggcagcgaggacgagctcgaagagggcggacagctcaacgagagcatggatcatgggggagtgggtccttacgaactgggcatggagcactgcgagaagtttgaaattagcgaaacaagcgtgaacaggggaccagagaaaatccggccagagtgctttgagctcttacgcgtcctaggcaagggaggatacggaaaggtgtttcaggttagaaaagtgacaggcgctaatacagggaagattttcgctatgaaggtacttaaaaaagctatgattgtccggaacgcgaaggacaccgcccacactaaggctgagagaaacatccttgaagaagtgaaacaccccttcattgtggacctgatttacgcctttcagactggaggtaagctgtacctaatccttgagtacctcagcggcggagaactgtttatgcaactagagcgcgagggcatttttatggaggatacagcctgcttctacctggctgagataagtatggctctcggacatttgcaccagaagggcattatttatagggacctgaagccggaaaatataatgctcaaccatcagggccatgtgaagctcactgatttcgggctgtgtaaggagtctatccatgatggcaccgttacacataccttctgcgggacaatagagtacatggccccagaaatacttatgagaagcggacataaccgagctgtcgactggtggtcgctcggcgcacttatgtatgacatgctaacaggcgctccgccatttaccggcgaaaaccgaaaaaagacgatagacaaaatcctgaagtgcaagttaaacctgcctccttaccttacgcaagaggccagagacctcctcaagaagctcttgaagaggaatgcagcctccagactgggcgctggccctggtgatgccggagaagtacaggctcacccttttttcagacacataaattgggaggaactactggcccgaaaagtggagccccctttcaagcctttactccaatctgaggaagacgtgtctcagtttgattcaaaatttacccgtcagaccccggtggattcaccagacgattctactctatcagaatccgccaatcaggtgttcctaggattcacctacgtggcccctagtgtactcgaatccgttaaggagaaattcagctttgagccaaagatacgttccccacggcgtttcatcggctctcctcgcacccctgtatccccagtcaagttttcccccggagatttctggggaaggggggcttccgccagcaccgctaatccccagacccccgtggagtacccaatggagacctctgggatcgaacagatggacgtgaccatgtccggcgaagcgtctgccccattacccatacgccagcctaacagcggcccatataagaagcaggcattccccatgatttcaaaaagaccggaacatcttcggatgaacctctag

SEQ ID NO: 27315 - DNA, 987 bp, synthetic construct
  source 1..987: mol_type = other DNA; note = Synthetic coding sequence
atggcaagaacagtggtactgatcaccggttgcagctcaggaattggcctccacctagcagtaagacttgcctctgaccctagccagtcgttcaaggtgtacgccacactgcgggacctgaaaacacagggtagactctgggaggcagcgagagctttggcatgcccccctggtagcctggaaacattgcagctagacgtaagggactctaagtcagtagccgctgctcgggaacgagtgactgagggccgagtggacgtgctggtctgcaacgcaggcctcggacttctgggaccgctcgaggccctcggcgaagacgctgtcgctagtgtgctggatgtgaatgttgttgggacggtgcgcatgctgcaagcctttctgccggacatgaagcgtcgtggttctggacgggtcctcgtcaccgggagtgtcgggggactgatggggctgccattcaatgacgtatactgtgcttccaaattcgcattagaaggcttgtgtgaatcactcgccgtcctgctgctcccctttggggttcacctcagtctgattgaatgtggcccagtccatactgccttcatggaaaaggtgctaggatctcctgaggaagtgctggatcgcacggatatccatacttttcacagattctatcaatatttagctcacagcaaacaggtctttagagaggctgcccagaacccggaagaggtcgcggaggtgttcctcacggcactgagagctccgaaacccacactgcggtacttcaccactgaacgttttttgcccttactgcggatgcggctcgacgatccgagtggatcgaattacgtcactgcaatgcaccgagaggtcttcggcgatgtccctgctaaggcagaggctggtgccgaggccggtgggggtgccggaccgggagccgaagacgaagctgggaggggagccgtgggagaccctgagctgggagacccacctgccgcaccacagtag

SEQ ID NO: 27316 - DNA, 1626 bp, synthetic construct
  source 1..1626: mol_type = other DNA; note = Synthetic coding sequence
atgccagggctgcgccgagacaggctgctgacccttctcttactgggtgcactcctctcagccgacctttattttcacttgtggccccaggtgcagaggcagttgcgccctcgagaaagaccacggggttgcccatgcactggcagggcctcatcactggcaagagatagtgcagccgctgcgagcgatccaggaaccattgtacataacttttctcggaccgaaccacgcacggagcccgcaggtgggtctcactctggttccagttctaagttgcaggccctcttcgcccatccgttgtacaatgtgccggaggagcctcctctgctgggggctgaggactccctgctcgcctctcaggaggcccttagatattaccgccgaaaagttgcaagatggaatcgcagacataaaatgtaccgcgagcagatgaacttgactagcctcgacccccctctgcagctcaggctggaagcttcttgggtgcaattccaccttggcatcaatcgccatggactgtactccagaagttctcctgtggtcagtaaactgctgcaggatatgcggcactttcctacaatctcggccgattatagccaagacgaaaaagctctgttaggagcttgcgactgcactcagatcgtgaaacctagcggcgtccacctgaaacttgttcttcggttttccgattttgggaaggccatgtttaagccaatgcggcaacagcgggatgaagagacacccgtggactttttttactttatagacttccagagacataacgccgaaattgcagctttccacctggataggatcctggatttcaggcgagtgcctccaaccgttgggagaattgtgaatgtgaccaaggaaatcctggaagtaaccaagaacgaaatcctgcagtccgtgttcttcgtttctcccgcttcaaacgtatgtttctttgccaaatgcccttacatgtgtaaaacagaatacgccgtctgcggcaacccccaccttttggaggggagtttgtccgcttttctcccatctctcaatttggctcctagactgagcgtgccaaatccctggattcggagttatactctagccggtaaagaggagtgggaagtgaatcccttgtattgtgatactgtgaagcagatctatccttacaataattcccagcgtctgctgaatgtgatcgatatggcaattttcgattttctgattgggaatatggatcgccatcactatgagatgtttactaagttcggcgatgacggcttcctgatacaccttgacaatgccagagggtttgggagacattcacacgatgaaatctctattctttcaccgctgtcacagtgctgtatgataaagaagaagactcttctgcatctgcagcttcttgcacaggccgactatcgactttccgatgtgatgcgcgagagtcttctggaagaccagctgagtcccgtactgaccgagcctcatctgctcgcactggataggcggttgcaaacaatccttcggacagttgagggctgcattgtagctcacggccaacagagtgtgatagtcgatggccctgtggagcagctggccccagattctggccaagctaatctcacaagctag

SEQ ID NO: 27317 - DNA, 954 bp, synthetic construct
  source 1..954: mol_type = other DNA; note = Synthetic coding sequence
atgaagacggctttaatcttgctgagcatcttagggatggcctgcgccttctccatgaaaaacctgcataggcgggttaagatcgaagacagcgaggagaacggtgtatttaaatacaggcccaggtattacctgtacaagcatgcgtacttctacccgcatttaaagaggtttcccgttcagggatctagcgactcctccgaagaaaacggcgacgactctagtgaggaggaggaggaagaagaggagacctctaacgagggggaaaataacgaggagtctaatgaggatgaggacagtgaggcggagaacacaaccttaagcgccactacactcggatatggggaggacgcaaccccgggtaccggatacaccgggcttgctgcaatccagctccccaagaaagctggagatattacaaataaggccaccaaagagaaagaaagtgatgaagaagaagaggaggaggaggagggcaatgaaaatgaggagtcggaggctgaagtggatgagaacgagcaaggtattaatggaacgagtacaaattccacagaggccgagaatggaaatgggtcgtctggcggagacaacggggaagaaggcgaggaagagtccgtgaccggggcaaacgccgaagatacaactgagaccggcagacaggggaaaggaacatctaaaaccactaccagcccaaacgggggatttgagcccacaaccccacctcaggtttatcggacaacgagtcccccattcggcaagacgactacggttgagtatgagggtgagtatgagtacactggggctaatgaatatgacaacggatacgagatttacgagagtgaaaatggtgagcccagaggcgataattaccgggcttacgaggatgaatatagttactttaaagggcagggctacgacggctatgacggacagaactactatcatcatcagtag

SEQ ID NO: 27318 - DNA, 345 bp, synthetic construct
  source 1..345: mol_type = other DNA; note = Synthetic coding sequence
atgtctttgccttcttcgcgtgcagccagggtgcccggacccagcggctcactttgcgccctcctagccctcttgctgctgctgactccacctgggccactggctagcgccggtcctgtgtcagcagtgctcacagagctgcgttgcacatgcttgcgagttaccttgagggtgaatcccaagaccattggaaaactgcaggttttccctgccggtccccaatgcagtaaagttgaagtagttgcgtcgctcaagaatgggaaacaggtttgtctggatccagaagcaccctttctgaagaaggtaatccagaaaatcctggacagcggcaataaaaagaactag

SEQ ID NO: 27319 - DNA, 2100 bp, synthetic construct
  source 1..2100: mol_type = other DNA; note = Synthetic coding sequence
atgccttcactgtggcgggaaattctgctagaaagcctgctggggtgtgtcagctggtctctctaccatgacctaggacccatgatatattattttcccctgcagacactggagctgacaggattggaggggttttctattgcgtttctgagcccaatctttctcactattaccccgttctggaagctggtgaataagaagtggatgctcaccctgctcagaataattaccattggctctatcgctagtttccaggctccaaacgctaaactgaggctgatggtgctggctcttggagtctcaagttccctcatcgtgcaagccgttacctggtggtcagggagccacttacagagatacttgagaatatggggtttcatcttaggccagatagttctggttgttctgcggatctggtacacaagtctgaatccaatttggagttatcagatgagcaacaaagtgattctgactctgtctgccattgcaactttggatcggataggaaccgatggtgattgtagtaagccggaggaaaagaaaaccggcgaggtagccacaggcatggcgtccaggcccaactggctgctcgctggagccgcttttggaagtcttgtgttcctcacacactgggtcttcggcgaagtgtctttggtgagccgatgggccgtctctggacatccccacccaggacccgaccccaacccctttggcggagcagtgctcctttgcctggcatcaggtctgatgctgccaagctgcctttggttccggggtacaggtctgatttggtgggtgaccggaacggctagtgccgctgggttgctgtatttacacacttgggctgcggctgtttcaggctgtgtcttcgcaatctttacagccagtatgtggccccagacactgggacatttaatcaatagcgggaccaaccccggtaaaacaatgactatagcaatgattttctatttgttggagatcttcttctgtgcttggtgcactgccttcaagttcgttcccggaggcgtctatgctcgtgagcggagcgacgtgctgctcggtactatgatgcttatcatcggactcaacatgctgttcggccctaagaaaaacctcgatttgttgttgcagacaaaaaactcaagcaaagtgctgtttcgcaagtccgagaagtacatgaaacttttcttgtggctgctcgtaggagtgggtctgctggggctgggcctgaggcataaagcttatgaaagaaagctcgggaaggtcgccccaactaaagaggtgagcgcagcaatctggccattccgatttggctatgataacgaaggatggtcgtcactggagagaagtgcacaccttctcaacgagacaggggcagattttatcacaatcctggagagtgacgcgtccaagccctatatgggtaacaacgacctgaccatgtggcttggcgagaaacttgggttctacaccgacttcggcccttctactcgctaccacacctgggggatcatggcgctgtcccgatacccaatcgtgaagagcgaacaccacttgctgcctagccctgagggagagattgctcctgccattacactgactgtgaacattagcggaaaactcgtggacttcgtagtgacacactttgggaatcacgaggatgacctggatcggaaactgcaagctatcgccgtgagtaagctgttaaagtcctcaagcaaccaggtgatttttctgggatacattacctctgccccaggctcccgcgactacctgcagctgacagagcatggtaatgtcaaggacattgactctacagatcacgaccggtggtgtgaatacatcatgtaccgcggacttatcagactcgggtacgcaaggatttcacatgccgagttgagtgattccgagattcagatggctaaattcagaattcctgatgatccgactaattatagagataaccagaaggtcgtcatcgaccacagggaagtgagcgaaaagattcactttaatccaagattcggctcttataaagagggccataactacgaaaataatcaccatttccacatgaatacacccaaatacttcttgtag

SEQ ID NO: 27320 - DNA, 1449 bp, synthetic construct
  source 1..1449: mol_type = other DNA; note = Synthetic coding sequence
atgctcttcgaaggtaaagtgaatccacagactcagagcctgcttgccgaatgtggcgagtggacgagacgatccctacatttaagagtgctgggtagacagcttattctcccaactgataagggggtgcaacactttcaggggagcacgccggcatctgccgtgcatcggcctcctctgtctgcctgtggccactcaagtaacattcgggagctttgcatctcaggtagccagattgtgccagctgctcttagtgcctctgctctgccgggtcctgacgacacaggcgttgcagatctgactgcacggtctagcttggaagaagaggtataccatgttgatgggaagatcgaggagtattttgcctttgatcgtaaagaggatgatgatgagtgcttggagcagaagcccgcacagccgggacggaagtggaggaaactgggtctccctccagtgagtccacgcgattgtgtgaaagatgccgttgctgctgaagtgtttgaccacgtgtggaccaatatggtagagctattggaggagctgataaggaagcactgggaaaccactttaaccgagggaaagaaacagagggaaacactgaaagttgctggcaataggttccctcatgtcctggttccgcacgctcacgcggacggcgcatcaggccctccgtcaggccatgccgaggctcacggcattagcctcgcaagcagattaaaccctccccaaatccaccacttctcaagctcattttactcagacatgaatggggtgatgacaattcaagctaaacctctgcagcgccgacctgcatatttcgctgacagaactcagaacgagaaagaggacaaagcttcggggggaggcgctggcgcactgagctctgcgccacatagacttgggagagcaagtgatacccacggactcagcccctctgcaaaaaagacaccggtaccttggcgtctccccagccttgctagtgacagtcagagactaaaaacgcctaatatttactcagacgaagtgctgaggggaacgaagctgcctactggcgtagaccacatggcctccccactggtgcagacgagtcgaagtagattccctccgctggtaaccgagaccaggggtcaaaatacagctgtccctggttgtaggctggtgagttataggggccgtcatctccagaatcgcgtccttagcgcaatgcctgacggcacagaacggtccaggcttagagaaagaactgcaactttggagcggctgtcaagaccttcaaccacccatactttccgacagagtgacacgcccagaaagtccagtctcacccaaatggagtttgctgcccacacctggacgggccagtcaatcttgaccggaagccagtacgtgcccaagtcattccaaagaaccacactcaccttcaagcggaggttccaggtgaccagttag

SEQ ID NO: 27321 - DNA, 1392 bp, synthetic construct
  source 1..1392: mol_type = other DNA; note = Synthetic coding sequence
atgggagccggaccaagtctcctgcttgccgcactgcttctcctgttgagcggagacggcgctgtgaggtgcgatacccctgctaattgtacttacttggatttactcggcacctgggtgtttcaggtgggctcctccgggtctcagcgagacgtgaattgctccgtgatgggccctcaagaaaaaaaggttgtggtctacctgcaaaagcttgacacagcatacgatgatttgggaaacagtgggcactttacgattatatacaaccaggggttcgaaattgtgttgaatgactacaaatggttcgctttctttaagtataaggaggaaggcagcaaagtgaccacttactgtaacgaaactatgactgggtgggttcatgacgtccttggcaggaactgggcatgttttaccggtaagaaggtgggcaccgcttccgagaacgtatacgtgaatatcgcccacttaaaaaattcccaggagaagtactcaaatcgattatacaaatacgaccacaacttcgtgaaggcgattaatgccatccaaaagtcatggactgcaacaacatacatggaatacgagactctgaccctaggagatatgattcgtcggagtggaggtcactcgcgcaagattccgcgacccaagcctgccccattgacagccgagatccaacagaagatcttacatctgccaacttcgtgggattggcgcaacgtgcatggcattaacttcgtttcacccgtaagaaatcaggcgagttgtggcagttgctattcgttcgcatccatgggcatgctggaagctcgcatcagaatcttgaccaacaattcgcagacgcctatcctgagcccccaagaagtcgtcagctgctcgcagtatgctcaaggatgtgagggagggttcccatacctgattgctggtaagtacgcacaggactttggtctggtggaagaagcatgcttcccctacactggcaccgacagcccctgtaagatgaaggaggactgtttcaggtattattccagtgaatatcattacgtcgggggattttatggcggatgcaatgaggctctgatgaagctggaattggtccaccacggccctatggctgttgcattcgaggtgtacgacgatttcttgcattacaagaaagggatttaccatcacactggattgagagaccccttcaatccttttgagctcacaaatcatgccgtgcttctggtgggctatgggaccgacagtgcctccggaatggactattggatcgtgaagaatagctggggcaccggctggggtgagaatggctactttcgcattcggaggggtacagacgaatgtgccattgaatctatagcagtcgcagctactcccatccccaaattatag

SEQ ID NO: 27322 - DNA, 1941 bp, synthetic construct
  source 1..1941: mol_type = other DNA; note = Synthetic coding sequence
atgtctaaaggccctgccgtcgggatcgatctggggacaacctattcctgtgtcggcgtatttcagcatggaaaagtagaaataatcgctaacgaccaaggcaacagaaccactccctcatatgttgcctttacagatactgagagacttattggagacgcagctaaaaaccaggtagctatgaaccctaccaatactgtgttcgacgcgaagagattaattggcagacgctttgatgacgccgtggtgcaatctgacatgaaacactggccgtttatggtagtgaatgacgctgggaggccgaaagtacaggtggaatataagggagagacgaaatcattctatccagaggaggtgtctagtatggtcctgacgaagatgaaggagatcgccgaagcatatctgggcaagaccgtaaccaatgccgtggttaccgtgcctgcttattttaacgattcacagcggcaggccactaaggatgcaggtaccattgcaggcctaaatgtgcttagaataattaatgagcctactgctgcggcaatcgcctatggtcttgataagaaagtcggcgctgagcgcaacgttctgatattcgacctaggcggaggcacgttcgacgtctcaatacttacaattgaagatggaatttttgaagtaaagtctactgctggtgacacgcacttggggggagaggacttcgataatcgcatggtcaatcatttcatcgccgagtttaagaggaaacacaaaaaggatatctctgagaataaacgggctgttagaaggctgcgcactgcgtgcgagcgcgcaaagcggacactgagcagctcaacccaagcctccatcgagatcgatagtctctatgaaggaattgatttctacacttctatcacccgcgcacgctttgaggagctgaacgcagacctcttccgtggcacactcgatcccgtcgagaaggctctgcgcgacgccaagttggataagagccagattcacgacatcgtgcttgtgggaggatctacccgcatcccgaagatacagaagctcctccaggacttcttcaacggcaaggagttaaacaaatccataaaccccgacgaggccgttgcatacggggcagctgtgcaagccgcaattttgtctggggataagtctgagaacgtgcaggacttgctgctgctggatgttacccctctgagccttggaatcgagaccgccggtggtgtcatgaccgtgctgataaagagaaatacaaccatccctaccaaacagacccaaactttcactacgtacagcgacaaccagcccggtgtgctgatccaggtctacgagggggagagagccatgaccaaggacaacaacctcctaggcaagttcgaactcacaggcatcccacctgctccgaggggtgtcccacagattgaggtgaccttcgacatcgacgctaatggtattctcaacgtttctgctgtggataaatccactggcaaggaaaataagatcaccatcaccaacgataaggggagactgagcaaggaagatatcgaaagaatggtgcaagaggccgagaaatacaaagctgaggacgagaagcagcgcgacaaggtgagctctaagaactcattagaatcgtatgcctttaacatgaaggcaaccgtcgaggacgagaagctgcagggcaagatcaatgatgaggataagcagaagattctcgataagtgtaacgaaatcattaactggctggataagaaccagaccgccgagaaagaggaatttgaacatcaacagaaagaactcgagaaagtttgcaacccaatcatcacaaaattgtaccagagtgcaggagggatgccaggcggaatgcccggtggctttccaggcggaggggcacctccctccgggggagcctcatctggacccactatcgaagaggtagattag

SEQ ID NO: 27323 - DNA, 1017 bp, synthetic construct
  source 1..1017: mol_type = other DNA; note = Synthetic coding sequence
atgtgggaggcaaacccagagatgtttcacaaagcagaagaactgttttctaagactaccaataacgaggttgatgacatggatacatctgacacacaatggggctggttctatcttgcagaatgtgggaaatggcacatgtttcagccagacacaaattcccagtgcagcgtgtctagtgaggacatagaaaagtctttcaagaccaatccctgcggcagcattagttttaccacttctaaattttcatacaaaatcgatttcgcggaaatgaaacagatgaatcttacaactggaaagcaaagacttatcaaacgggcacccttttcgatatccgccttctcttacatttgcgagaatgaggctattccgatgcctcctcactgggagaacgtgaacacccaagtcccttatcagctgatccctctgcacaaccagacccacgaatacaacgaggttgcgaacttgtttggcaagacaatggaccggaacagaatcaaacggattcagcgaatccagaacttagatctctgggaatttttttgcagaaagaaggcacaactcaagaagaaacgaggggtcccccagatcaacgagcagatgctgttccacggcactagctcggaattcgtggaagccatctgtatacacaactttgactggcggataaacggcatccacggagccgtcttcggcaaaggaacgtacttcgctcgggatgcagcctattcctcgagattttgcaaagacgatattaaacacggcaatacatttcagattcacggcgtgtccctccagcagcggcacctgtttaggacatataagtcaatgttcttggcacgggtcttgattggggactatataaatggcgattctaaatatatgagaccaccgtcaaaagatggcagctacgtcaatttgtacgattcatgcgtagacgatacatggaacccaaagatctttgtcgtctttgatgcaaatcagatttatccggaatatctgattgacttccactag

SEQ ID NO: 27324 - DNA, 1059 bp, synthetic construct
  source 1..1059: mol_type = other DNA; note = Synthetic coding sequence
atggttcgccctgtccgccataagaaaccagtgaactactcacaatttgatcactcagactctgatgacgattttgtcagtgcaaccgttccccttaataaaaaaagccgcactgctccaaaagagctgaagcaggacaagcccaaaccaaacctcaataatctccgtaaggaggagatcccagtgcaagagaagacaccaaaaaagcggctgcctgagggcactttttctatcccagcatcagccgtaccctgcaccaagatggccttggacgacaaactctaccagcgcgacctggaagtcgcccttgctctgagcgttaaggagctccctactgtgaccacaaacgtgcaaaactctcaggacaaatctatagagaaacatgggtctagtaagatcgaaactatgaacaagtccccgcatatatcaaattgctccgtggcttctgactatctggacctggacaagataacggtggaagacgatgtgggtggggtgcagggtaaacgaaaggcagcatctaaggccgctgcccagcagagaaaaattctgttagaggggtccgatggcgatagcgccaacgatacagagcctgatttcgcccctggagaggattccgaggatgactctgatttctgtgagtccgaagataatgatgaggatttttctatgagaaaatctaaggtgaaggaaatcaagaaaaaggaagttaaggtcaaatcccccgtcgagaagaaagagaagaagtcaaaatcaaagtgcaatgcactggtgacttcggtggacagtgctcccgctgctgttaagagtgagtctcagagcctcccaaagaaggtgagcctgtcctccgatactacccggaagcccttagaaatccgcagcccatccgccgagtccaagaagcccaagtgggtgccacctgccgcaagcgggggtagtaggtccagttccagcccgttagttgtcgtgtctgttaaaagcccgaaccagtctttgcgccttggactctcgcgattggccagggtgaaacctcttcatccaaatgcgacaagtacctag

SEQ ID NO: 27325 - DNA, 1488 bp, synthetic construct
  source 1..1488: mol_type = other DNA; note = Synthetic coding sequence
atgaccgtcatgtctggcgaaaatgtggatgaggcctccgctgccccaggacatccccaagacgggagttacccgagacaggcagaccacgacgaccacgagtgttgtgagcgcgtggtaattaatattagcggattacggtttgagactcaactgaagacactcgcacagtttccgaataccctgctgggcaatccaaagaagaggatgaggtactttgacccactcaggaacgagtattttttcgatcggaacagaccctctttcgacgccattttgtattattaccaaagcggagggaggttgagaagacctgtgaacgtacccctagatatgttctcagaggaaatcaaattctacgagctcggagaagaggccatggaaaagtttcgggaagacgaaggttttattaaggaagaagagcggccactgcccgagaaggagtaccagcgccaagtgtggctgctctttgagtatcctgagtcttcaggtcctgctcgagtcatcgccattgtgtcagtgatggttattcttatttccatcgtgattttctgcttggagacccttcccgagttaaaggacgataaagactttactggcacagtgcataggattgacaataccacagtcatctacaatagcaacatctttacagacccttttttcatcgttgaaacactgtgtattatatggtttagcttcgagttagtcgtgcggttcttcgcctgcccttccaagactgacttctttaagaatattatgaatttcatcgacatcgtcgccattataccctacttcatcacattaggtacagagatcgctgagcaggagggcaatcagaagggagaacaggccacatcccttgccatccttagagtcatcagactggtccgagtcttccgcatttttaaacttagtcgtcactccaagggacttcagatcctgggacagaccctcaaggcctctatgcgggagttgggtctccttattttctttttgttcattggcgttatcctgttttcaagtgctgtttattttgctgaggctgaggaggccgagtctcatttctcctcgattcccgacgcattttggtgggccgtggtgtccatgactaccgttggctatggtgatatgtatcccgttacaatcggcggaaagattgtggggtccctgtgtgctatcgctggcgtcctgacaatcgccctgcctgtgcctgtcatcgtgtctaactttaactacttttaccatcgggaaacagagggggaggagcaggcacagctcttacacgtgtccagccctaatctggcatctgacagcgacttgagcaggcgttcctcttcaacaatgtccaagtctgagtatatggagatcgaggaagatatgaataattctattgcccactatcgccaggtaaacattaggactgcgaactgtaccaccgccaaccagaattgcgtaaataagtctaagctgctgaccgatgtttag

SEQ ID NO: 27326 - DNA, 1632 bp, synthetic construct
  source 1..1632: mol_type = other DNA; note = Synthetic coding sequence
atgagaaagccagcagcaggctttctcccctcccttcttaaggtgctgctgctacctctagcacctgcggctgcccaggattccacccaggccagtacccccggatccccactctcacctaccgagtatgagcggtttttcgccttactcaccccaacctggaaagccgagactacatgccgactgcgagctacacatggatgccgaaaccccaccctggtgcagctggaccagtatgagaatcacgggctagtcccagacggcgctgtgtgttcaaatctgccatacgcttcttggtttgagtctttttgccaatttacacattaccggtgctcaaatcacgtgtactacgcaaaaagggtgctctgctcccaacctgtgagtatcttgtcaccaaacacgctgaaggaaattgaggctagtgccgaggtaagtcccactaccatgacttctcccatttccccgcactttaccgttaccgagcggcagacctttcagccctggccagagaggctgagcaataacgtggaagagctgcttcaatcaagtctttccctgggaggccaggaacaggcccctgagcacaaacaagagcagggcgtcgagcaccgccaggaacctacgcaggagcacaagcaggaggagggccagaagcaagaagaacaggaagaggagcaggaggaggagggaaaacaagaggaaggacagggtactaaagagggccgagaggcggtatcacaattgcagaccgatagtgaaccgaagtttcactcggaatctcttagttctaacccctcatcattcgctccgagagtgcgcgaggtcgaatctacacctatgattatggagaatattcaagaactcattcggagcgcgcaggagatagatgagatgaatgaaatctatgatgagaactcatactggaggaatcaaaatcccggaagcctgctgcagctgcctcataccgaagccctgttagtgctgtgctactcaatagtcgagaacacttgcatcattactcccaccgcgaaggcttggaagtacatggaggaggagattctcggttttgggaagtccgtatgtgattctcttgggcgtcgccacatgtcaacgtgtgcactgtgtgacttttgcagcctgaaactggagcaatgccatagtgaagccagcctgcagcgacagcaatgcgatacctcacacaaaacacctttcgtcagtcccctactggccagccaaagtttgagcattggaaaccaggtcggtagccccgaatcaggcaggttctatgggctggacttgtatggcggtctgcatatggatttctggtgcgcacgcctcgccacaaaggggtgtgaggacgtgagagtcagtgggtggctgcagaccgagtttctctctttccaggatggcgattttccgacgaaaatatgtgacacagattatatacagtatcccaattactgtagttttaagtcacaacagtgtctgatgaggaacaggaatcggaaggtgagtagaatgcgctgcctccagaacgagacttactccgccctgtcacctggcaagtccgaggacgtagtgcttcgatggagccaggagttctccacccttaccctcggccagttcggttag

SEQ ID NO: 27327 - DNA, 666 bp, synthetic construct
  source 1..666: mol_type = other DNA; note = Synthetic coding sequence
atgtcgggatgggctgacgagagaggcggtgaaggcgacggaaggatttacgtcggcaatctgcccaccgatgttagggagaaagaccttgaagaccttttttataagtatggaaggatcagggagattgagttaaaaaatagacatggcctcgttcccttcgctttcgtcagattcgaagatccacgcgatgccgaggacgcgatctatggtcggaacggatacgactatgggcagtgtcgtctccgggtggagttccctagaacctatggcggtcgaggtggatggcctaggggtggtagaaatggcccacctacgaggcgatctgactttcgggttcttgtctcagggctgccgccatccggaagttggcaagacctgaaggaccacatgcgcgaagcaggagacgtctgctatgcagatgtccaaaaagacggggtcggcatggtcgagtatctgaggaaggaagacatggagtacgctttacgtaaactcgacgatacgaagttcagatcccacgaaggagaaacatcatatatacgcgtctaccccgaacggagtacctcctatggctattcgagatctagaagcggtagcagggggagggatagtccctaccagtccagaggctcaccgcactatttctctcctttcagaccctattag

SEQ ID NO: 27328 - DNA, 2523 bp, synthetic construct
  source 1..2523: mol_type = other DNA; note = Synthetic coding sequence
atgagcgctttccgcctttggccgggacttctgattatgctcgggtctttgtgccaccgtggatccccatgcggtttgtccacacatgtggaaattggtcatcgcgctctggagtttctccagcttcataacggtagagtgaactatagagagctgttgctggagcatcaggatgcatatcaagccggaattgtttttcctgattgcttttacccttctatctgtaaaggcggaaagtttcacgatgtgtccgagtccacgcattggacacctttcctcaacgcaagcgtccattatatcagagagaattatccactgccatgggagaaagatactgagaagttggtggctttcctgtttggaatcacttcccatatggccgcagatgtttcttggcattcattaggactggagcagggcttccttagaacaatgggcgctatcgactttcacggcagctactccgaggcgcatagcgctggggacttcggcggagacgtcctgagtcagttcgaattcaatttcaactacctggcgcgacgatggtatgtgcctgtgaaggacctccttgggatttacgagaaattgtatggcaggaaggtaataaccgagaacgtgatagtagactgctcccatatacaattcttagaaatgtacggcgaaatgttggcagtaagcaaactgtaccctacttacagcaccaagtcgcccttcttggtagaacagtttcaggagtacttcctgggtggtctggacgacatggcgttctggagtacgaacatctatcatctgacgagttttatgcttgaaaatggcactagtgattgtaacctccctgagaaccctctgttcattgcctgtggtgggcagcagaaccatacccaagggtcaaagatgcagaagaacgactttcaccgaaatcttaccactagccttacagagagcgtcgatcgcaatattaactacacagagcgcggtgtttttttcagcgtgaactcttggacccccgattcaatgtcttttatctacaaagccctggagcgcaacattcgcacaatgttcatcggagggagtcaactgtcacagaagcacgtgagttctcctctggcctcatacttcctttcctttccatacgcacgcttgggatgggccatgacaagcgctgacctgaatcaggatggccatggcgatctggttgtcggcgctcccggttatagcagaccaggccacatccatattggcagggtgtaccttatctacggaaatgacttggggctaccacctgtcgacctggacttggataaagaagcccataggatcctcgagggattccagccctctgggagattcgggtcagccctggccgtgctggactttaacgtggacggcgtgcccgatttggccgtaggggctccttctgtaggaagcgagcagctgacatacaagggggctgtgtacgtgtattttgggtctaaacagggtggaatgtcaagctcacccaacatcactatctcatgccaggacatctattgcaacctgggctggacccttctcgctgccgacgtaaacggtgacagcgagcccgatctcgttatcgggtcaccttttgcaccagggggagggaaacagaaggggatagtcgccgcattttatagcggcccttctttaagcgacaaagaaaagctgaatgttgaggccgcaaattggaccgtccggggtgaagaggatttttcatggttcgggtacagcttacacggagtgacagttgataacaggaccttgcttctggtcggctcccctacatggaagaatgcaagtcggttgggccacctcctgcacatcagggatgagaagaagagtctgggccgagtgtatggctattttccacccaatgggcagagctggttcaccatcagtggcgacaaagcaatgggcaagctggggacctctctctcgtcagggcacgttttgatgaatggcaccctgaaacaggtgctgctggtgggggctccgacatacgacgatgtgagcaaggtggctttcctgacagtcaccctccaccagggcggagccacgcgaatgtatgctctgacaagcgatgcccagcccctgctcttgagtaccttctctggggaccggagattctccagattcggaggagtcctgcatctatctgacctggatgacgatgggctggatgaaataatcatggccgctcccctgcgcattgctgatgtgaccagcggcctcatcgggggagaggatggcagagtttacgtttacaatggcaaggagacgacactgggcgatatgactggcaagtgcaagagctggatcacaccttgcccagaggagaaggcccaatatgtgttgatctcacctgaagctagtagtcgctttggcagctctcttataaccgtaaggtccaaagcgaagaaccaggtcgtcattgctgccggtcgttcctctctaggagccaggctgagcggagcgctgcacgtgtactccctcggcagcgactag

SEQ ID NO: 27329 - DNA, 972 bp, synthetic construct
  source 1..972: mol_type = other DNA; note = Synthetic coding sequence
atgaagtcggcattgttcaccaggtttttcattctattaccgtggattcttatcgtgatcataatgctagacgtcgacacccggcgtccagtgccccctttgacgcccagaccgtactttagcccatacgccgtcggcaggggtggcgctcgcctacctctgcggcgaggtgggccagcgcacggaacccaaaaacgcaatcagagccgcccacaacctcagcctgaacctcagttgccaacaatctacgcaatcacacccacctacagccgccctgtccagaaagccgagcttacacgactggccaatacttttcgccaggttgcccagctccattggatccttgtcgaggatgctgctgccaggtctgagttggtatcgcggttcctggcacgtgcgggtctccctagcacccacctgcacgtgcctacgcctcggagatacaagaggccaggactcccgagagctaccgagcagagaaatgcaggtctggcatggttgcggcaaaggcatcagcaccagcgggcacaacctggcgttctgttttttgctgatgacgacaatacctattctttagagctgttccaagagatgcggacaacacgaaaggtgagcgtatggcctgttggcctagtcggtggacgcaggtatgagaggccactggttgaaaacggaaaggtggtcggctggtacaccggatggagggcagaccgccctttcgcaatcgatatggctggattcgctgtgtccctgcaggttattctgagcaatcccaaggccgtgttcaagaggaggggaagtcagcccggaatgcaggagtcagatttcttgaagcaaataacaacagttgaagaattggagccaaaggccaataattgcacaaaggtgctggtgtggcacacgcgcactgagaaggtgaatctggccaacgagccaaagtatcacctggatacagtgaaaatagaagtttag

SEQ ID NO: 27330 - DNA, 3213 bp, synthetic construct
  source 1..3213: mol_type = other DNA; note = Synthetic coding sequence
atgggagccgctcggggttctccagccaggccccgaaggctacctctgctgtctgtcttgctgttaccgcttcttggagggacccagacggctatcgtgttcataaaacagccttctagccaggatgctttacagggccgacgggcattacttcgctgtgaagttgaagcacccggacccgtccacgtctactggctattagatggtgcgccagtgcaggataccgagcgtaggttcgctcagggcagttcactgtccttcgccgctgtagacaggcttcaagattcaggaaccttccaatgtgtggctcgagatgatgtgactggcgaggaggccagatctgccaatgcctcttttaatatcaagtggattgaagcaggccctgtagtcctgaagcatcctgcgagtgaggccgagatccagcctcaaacacaggttactctgagatgccatatcgacggtcacccccgtcctacttaccaatggtttagggacggaactcctctctcggacggccagtctaaccatacagtttcttctaaagaacgcaacctaacgttgagacccgcaggtccagagcattctggcctgtattcttgctgtgcccatagtgcctttgggcaggcgtgttcatcgcagaatttcaccctgagcattgcagacgagtcttttgctcgggtggtgctggcccctcaggatgttgtggtcgctaggtacgaagaggcgatgttccattgtcagttttccgcccagccccctccctctctacagtggctatttgaggacgaaacacctatcacaaaccgctcacgcccaccgcatctgaggagagccactgtttttgccaatggctccctgctgctcactcaggtcaggccccgaaatgccggaatctacagatgcattggccaggggcagcgcggaccgcctatcatcttagaggcaacactgcacctggcggagatcgaggatatgccgctgttcgagcccagggtgttcacggccggttccgaggaaagagtcacgtgcctgccacctaaagggctgcctgagccatctgtttggtgggagcatgctggagtgaggctgccaacccacggcagagtataccagaagggacacgagctggtgctggctaatatcgcggagtcggatgcaggggtgtatacctgccatgccgctaaccttgctggacaaagaagacaagacgtaaacatcaccgtggccaccgtgccctcatggctcaaaaagcctcaagactcccaactcgaggaaggaaagcccggataccttgattgtctcactcaggctactccaaaaccgaccgttgtatggtataggaaccaaatgctgatctctgaggacagcagatttgaagtgttcaaaaacgggaccttaaggatcaactcagtagaggtttacgacggaacttggtatcgctgtatgtcttccaccccagctggtagtattgaggcacaggccagggtgcaggtgctagaaaaacttaagttcacacccccaccccagccacagcagtgtatggaattcgacaaagaagcgaccgtgccttgtagtgccaccggcagggaaaagccaacaattaagtgggaacgtgcagacggctcatccctccctgaatgggtaacagacaacgccggaactctgcactttgcgagggtgaccagggacgatgcaggcaattacacctgcatagcatccaacggaccacagggtcaaatccgagcccatgttcagctaaccgtagccgtttttattacgttcaaagtcgagccagagcgcacaaccgtttaccaggggcacacggccctgctccagtgcgaggctcagggcgacccgaagcccctgattcagtggaaggggaaagatcgcattctagaccctacaaaattgggtccaagaatgcatatattccagaatggttcactggtcattcacgacgtcgcaccggaagactcaggaaggtatacatgcatcgctggcaattcctgtaatatcaaacataccgaggctcccctgtatgtggtagataaaccagtgcctgaggaatctgaggggccaggcagcccaccaccttataagatgatccagacaatcggactgtcagtcggtgctgcagtggcctatattatcgccgtgcttggcctcatgttctattgcaagaagaggtgcaaggccaaacgcttgcaaaagcagccagagggcgaggagcccgagatggagtgcctgaatggcggtccactgcagaacggccaaccgtctgctgagatccaggaagaagtcgccttaaccagcttgggctctggacctgcggcaaccaataagagacactccacctctgataaaatgcatttcccaaggtcatctttgcagcctatcaccaccctcggcaagagcgaatttggggaagtgtttttggcgaaggcacagggtctggaagagggggtagcagagaccctggtcctggtaaagagcctgcagagcaaggatgagcagcaacaactggacttccgtcgggagcttgaaatgttcggtaaactcaaccatgcaaacgtcgtgcgtttgttggggttgtgtcgggaggccgagccccattatatggttctagagtacgtcgacctgggtgacttgaaacagtttttacgtattagtaagtccaaggatgaaaaacttaagtcgcaacctctgtcgaccaagcagaaggtggcactgtgcacacaggtggctctgggtatggagcacttgtctaacaacaggttcgtgcataaagacctcgctgctcggaactgtctcgtgtctgcccagaggcaggttaaggtaagcgctctcgggctctcaaaggacgtctacaacagcgagtactaccactttcgccaagcctgggtccctctccggtggatgtcccccgaagccatcctagagggagacttctcaaccaagagcgatgtgtgggcattcggcgtgctgatgtgggaggtgttcacacatggcgagatgccacacgggggtcaagccgacgacgaggtcctggccgatctccaggcgggaaaggctcggctccctcagcccgagggctgccctagcaaactctacagactgatgcagcgatgctgggccttgagtcccaaggacagaccatcatttagcgagattgcatccgctctcggcgactctacagtcgactcaaaaccctag

SEQ ID NO: 27331 - DNA, 1521 bp, synthetic construct
  source 1..1521: mol_type = other DNA; note = Synthetic coding sequence
atgccactgttgggacttctccctcgacgcgcttgggccagcctcctgtcccagcttctccgtcccccttgtgcttcatgtaccggggctgtcagatgccaatctcaggtagccgaggccgtgctcacatcacaactgaaggcacaccaggagaagccgaacttcatcatcaagactccgaaagggacacgggatcttagcccacagcatatggtcgttcgcgagaaaattttagacctggtgatttcttgttttaaaagacacggagccaaggggatggatacccctgcctttgaattgaaggaaactctcacagaaaagtacggagaagactccgggctgatgtacgatctcaaggaccagggaggcgagttgctgtctctgcgatacgatctgactgtgccattcgcccgttacctcgcgatgaataaagtgaagaaaatgaaacggtatcacgttgggaaggtgtggcgcagagagtccccaaccattgtccaaggcagatacagagagttctgccagtgtgatttcgacattgcaggccaattcgatccaatgatccccgacgctgagtgtctaaagatcatgtgcgagatactctctggcttgcaactgggcgatttcttaataaaggtgaatgataggcggatagtggatggtatgtttgcagtctgcggcgtgcctgaatctaagtttagagctatctgctctagcatcgacaaattggataagatggcttggaaagacgttaggcatgagatggtcgttaagaagggcctggctcctgaagttgctgatcggattggggattacgtgcaatgtcacggaggcgtctctcttgtcgaacagatgttccaggacccaagattgtctcagaacaagcaggcactggaggggctcggtgatctgaagctgctgtttgagtacttaactttattcgggatcgctgataagatcagtttcgatctgagccttgctcgcggattagactattacaccggcgtcatttacgaggcggtgctgcttcagacacccacccaagcaggcgaagagccactgaatgttggatcagttgcagccggtggtaggtacgatgggctggtaggcatgttcgacccaaaaggacacaaggtcccttgtgtaggcctcagcatcggcgtggagagaatcttctacatcgtggagcaaagaatgaaaaccaagggggagaaggtgcgcaccacagaaacccaggtctttgtggcgacgcctcaaaagaacttcctgcaggagcgcctaaaattgattgccgagctgtgggactcagggatcaaggcagagatgctctataagaataaccccaagctccttacacagctgcactattgtgagagtactggcattcctctggtggtgatcataggggagcaggagctgaaggaaggggtcattaagattagatcagttgcaagtcgagaagaggtggcaatcaaacgcgaaaatttcgttgccgagattcaaaaacgattatccgaatcttag

SEQ ID NO: 27332 - DNA, 912 bp, synthetic construct
  source 1..912: mol_type = other DNA; note = Synthetic coding sequence
atgcgcgcatggatatttttcctcctctgtctggctgggcgtgcactagccgctccccagcaggaagctctgcccgacgaaaccgaggtagtggaggaaacagttgccgaggtgaccgaagtatccgtgggagctaatccagtgcaggttgaagtaggcgagttcgacgatggagccgaggagaccgaggaggaggtggttgctgagaatccttgtcaaaatcaccattgcaaacacggcaaggtgtgcgagctggacgagaataacacccctatgtgtgtgtgccaagatcctacttcctgtcctgcacccattggggaatttgagaaggtctgttccaatgacaataaaaccttcgactcatcgtgccatttcttcgccaccaagtgcacgcttgagggaaccaagaaaggccataagttacacctggattatataggaccttgtaaatatatacctccctgtttagactctgagctcacggaatttcccttacgcatgcgcgattggctcaagaacgtactggtcaccttgtatgagagagacgaggataataacctgttgactgagaaacagaagctgcgagtgaagaagatccacgagaacgaaaagcggcttgaggcaggtgaccatccagtggagctgttagcccgtgacttcgaaaagaattataacatgtatattttccccgtccactggcagttcgggcagctagaccagcaccctatcgacgggtatctgtcccacacagagctcgcaccactgcgcgctccgttaatacccatggagcactgtacaacccggtttttcgagacttgtgatctggacaatgataagtacatcgccctggatgagtgggccggatgtttcggaataaagcagaaggacattgacaaggacctcgtaatttag

SEQ ID NO: 27333 - DNA, 2634 bp, synthetic construct
  source 1..2634: mol_type = other DNA; note = Synthetic coding sequence
atggctcgacctcgtcgggctcgggaaccactcctagttgcactgcttcctctggcttggttagctcaagcaggccttgcccgagcggctgggtccgtccgcctagccggtgggttaactttaggaggtctgttccccgtgcatgctcgcggtgccgcaggccgagcttgcggccaacttaaaaaagagcagggagtgcaccggttagaagccatgctgtatgcactcgaccgggttaacgcagacccggaactgctgcctggtgtgcgacttggggcacgcttgctggatacatgtagtcgggacacttatgccctagaacaggccttgtcttttgtgcaggctctgattcgtggccgtggtgacggggacgaggtgggcgtccggtgcccaggaggggttccgccactgcgcccagccccaccggaacgagtcgtggcagttgtgggcgctagtgcaagctctgtaagtattatggtggccaacgtcctgcggcttttcgccatccctcagattagctacgcctccactgcccctgaactctccgatagcactcgatatgatttcttcagtagagtggttcctcccgatagctatcaggcccaggctatggtcgatatcgtcagagcactcggttggaactacgttagcacactggcctccgaaggtaactatggcgagtccggggtggaggcctttgtacaaataagccgtgaggcgggaggagtctgtatcgcccaaagcattaaaatccccagggagcccaagccaggggagttctccaaggttattaggcgcctgatggaaacgccgaacgccagaggcatcatcatcttcgccaacgaggacgatattcgccgagtcctggaggccgcaagacaggcgaatttaaccgggcacttcctctgggtggggtccgatagctggggcgctaagacgagtcctatcctgtcacttgaggacgtagccgtgggggctattacaatcctccccaagagagcctctatcgacggctttgaccaatactttatgacaagatcattagaaaacaaccgacggaatatctggttcgccgagttttgggaagagaatttcaattgtaagctgacgagctcggggactcagtctgatgacagtacaagaaaatgcactggtgaggaaagaatcgggagggattcgacgtacgagcaggagggcaaagtccaattcgtaattgatgccgtgtacgccattgcacacgcactccactcaatgcatcaggctctgtgcccgggacatacagggttgtgcccggctatggaaccaacagatggacggatgctgctgcagtatatcagggccgtaaggttcaatggctctgccggtacacccgtgatgtttaatgagaatggggacgcccctggccgttatgatattttccagtaccaggcaacaaacgggtcggccagcagcggaggatatcaggccgtggggcagtgggcagagaccctccgcctggatgtcgaagccttgcagtggtccggagaccctcacgaagttcccagcagtctatgctccctcccatgcggtcccggtgaacgcaaaaaaatggtaaagggagtcccttgttgttggcattgcgaagcatgcgatggctataggttccaggtggatgagttcacgtgcgaagcttgcccaggagatatgaggccaacaccaaatcataccgggtgccggccaaccccggtggtccgcctctcatggagcagtccatgggccgctccccctttactgctggcagtcctggggatcgttgcaaccaccaccgtggtggctacctttgtacggtacaacaacaccccgatcgtgcgtgctagcggcagggagctttcctacgtcctgttgacaggcattttccttatctacgcaatcacgttccttatggtggccgagcctggtgccgcagtttgcgcagccaggcgcctgtttttgggactgggtactacgctgagctatagcgctctcctgaccaagactaaccggatttaccgcatctttgagcaaggaaagcgatccgtgacccctccccctttcatttctccaacttcccagctagtcatcactttctccctgacatctctgcaggttgttggcatgatcgcttggctgggtgcgaggccccctcactctgtaatcgattacgaggagcagagaaccgtggaccccgagcaggctagaggggtgctcaaatgcgacatgagtgacctgtctttaattggttgtctggggtactcattgctcctgatggtgacctgtacagtgtacgctatcaaagcccgaggggtaccggagacttttaacgaagcgaagcctatcggttttacaatgtacacgacttgcattatctggctcgcttttgtccccatcttttttgggactgcacagtctgcggaaaagatttatatccagactacaacgctgacagtgtctctctcgctttccgctagcgtcagtctcggtatgctttacgtgccgaagacatacgttatactctttcatccagaacaaaacgttcagaaacgaaaacgtagcctcaaagctaccagtactgtcgcagcccctcctaaaggagaagatgccgaagcacacaagtag

SEQ ID NO: 27334 - DNA, 798 bp, synthetic construct
  source 1..798: mol_type = other DNA; note = Synthetic coding sequence
atggccgcagctgtgccaaagagaatgcgcggtcccgcacaggccaagcttctccccggatctgccatccaggctctggtgggcctggcgcgacctttggtcctggctctgcttctggtctccgcggctctgagctcagtggtgtcacgcacagactccccatcacccacagtgttaaactcacatatctccactcccaatgtgaacgctctgacccatgaaaatcagaccaaaccatcgatcagccagatctctaccactctgcccccaacgactagtacaaaaaagagcggaggagcttctgtggtgccacatccaagtcccactcccctgtctcaagaagaagctgacaataacgaggacccttcaatagaagaagaggatcttctgatgcttaacagttccccctctacagctaaggacaccctggataacggagactacggggagccagattatgactggaccactgggccaagagacgacgacgaaagcgacgataccctggaggaaaatcgcggttatatggaaattgaacagtccgttaaatcgtttaagatgcccagcagtaatatcgaggaggaagactcgcattttttcttccacttgataattttcgcattttgcatcgctgtggtgtatatcacctaccacaataaaaggaaaatctttctcttggtccagtcccggaagtggcgtgatggcctatgtagtaaaaccgtggagtaccacaggctcgaccagaacgtgaacgaggctatgccatctttaaaaattacgaatgattatatcttttag

SEQ ID NO: 27335 - DNA, 2349 bp, synthetic construct
  source 1..2349: mol_type = other DNA; note = Synthetic coding sequence
atggcgccttctgcctgggcaatctgttggctgctgggagggcttctgctccatggagggagttcaggccctagcccgggaccttctgtgcccaggctccggctttcgtaccgagatctcctctccgccaaccgtagtgccatatttctagggcctcagggctctctgaatttacaagccatgtacctggacgaatacagggacagactgtttttaggaggcctagacgcactttattctctgaggttggaccaggcctggcctgaccctagggaggtcctgtggcctcctcaacccggacagagggaagaatgtgtacgaaaagggagggacccacttaccgagtgcgcgaatttcgtccgagtgctgcagcctcacaacaggactcacctcctggcttgcggtactggagcattccagcctacttgtgccctgataaccgttgggcataggggcgaacatgttctgcatctcgagcccggaagcgtagagtcaggcagggggcgatgtccgcatgagccaagtcgccctttcgccagtactttcattgacggtgagctatatacggggcttaccgcggacttcctagggagggaggcaatgatcttcagatccggagggcctcggccagcactccgatccgattcagatcagagcctactgcacgacccacgatttgtcatggccgctcgcatacccgagaatagcgatcaggacaatgataaggtgtacttcttcttcagcgaaactgtgccttctcctgatggtgggtcaaaccatgttaccgtcagccgcgttgggcgagtgtgcgtgaacgacgccggaggacagcgggtcctcgtcaacaaatggtctacatttctaaaggcgagacttgtgtgtagcgtcccaggccctggcggagccgagactcatttcgatcaactggaggacgtattcctcctgtggcccaaagccggaaaaagccttgaggtttatgccctgttttctaccgtgagtgcggtttttcagggtttcgcggtgtgcgtgtaccatatggcagatatctgggaagtctttaacggcccttttgcccaccgagacggcccacagcatcagtggggcccttatggcggtaaggtgcctttccctcggccaggcgtgtgccctagcaaaatgacagcccagccaggaagaccattcgggtccacaaaagattatcctgacgaggtgcttcagttcgcgagagcccaccccctgatgttttggcctgtgcggcctcgccatggtagacccgtcctggttaagacacaccttgcccagcagctgcaccagattgtggtcgatagggtagaggcggaagatgggacttacgatgttatttttctcggcactgactccgggagtgtgctgaaagtaattgcgctgcaagctgggggatctgcagagcctgaagaggttgtgctcgaagagcttcaggtctttaaggtccccaccccaatcacagagatggaaatctccgtcaaacgtcagatgctgtatgtcggaagtagactaggagtggcccagctgcgactgcatcagtgcgagacctatggcactgcgtgtgccgaatgctgtctcgctagggatccctactgtgcatgggacggagcttcctgtactcattatcggccttcacttggcaaaagacgcttccgacggcaggatattagacatggaaaccctgcactacagtgtttggggcagtcgcaagaagaggaagctgtgggtttggtggctgcaacgatggtgtacgggactgagcacaactccaccttcctggaatgtctcccgaagtctccccaggccgctgtgcgttggttacttcagcgtcccggagatgaaggccctgatcaagtaaagacagatgaacgggtgcttcataccgagagaggtctactctttagaagattaagtagattcgacgccggaacatacacgtgcacaacattggaacacggtttctcccaaactgtggtgcgcctggccctggtggtgattgtcgcctctcagcttgataatctgtttccgcctgagcccaagcctgaagaaccacccgcaagaggaggcctcgcatctaccccacccaaggcgtggtataaggacatcctccagctaataggcttcgctaatctaccccgtgtagacgagtactgtgaacgggtatggtgccggggtaccacagagtgcagtggctgttttcgatcacgctcaagaggcaagcaggctagagggaagtcatgggccggtcttgaactcgggaagaagatgaagagtagagtccacgccgagcacaaccgaaccccgagagaagtagaggccacatag

SEQ ID NO: 27336 - DNA, 1725 bp, synthetic construct
  source 1..1725: mol_type = other DNA; note = Synthetic coding sequence
atggtcgaggacggggctgaagagttggaagatctagtgcacttttctgtcagtgagctgccaagccgtggttacggagtcatggaagagatacggcgacaggggaaactgtgtgacgtcacccttaagataggagatcacaagtttagcgctcacaggattgttctcgcagcctcaatcccttactttcatgcgatgtttactaacgatatgatggaatgcaaacaggatgaaattgtcatgcagggcatggatcctagtgctttggaggctctaatcaacttcgcatacaatggtaacctggctattgaccagcaaaatgtgcaatctctgctgatgggcgcatcatttctgcagcttcaaagcatcaaagatgcctgctgtactttcttgcgagaacgtctacaccctaaaaattgtctgggagtgcgccagttcgccgaaacaatgatgtgcgccgtattatatgacgctgcgaatagtttcatccatcagcacttcgtcgaggtaagtatgtcggaagagttcctagctttgccactagaggatgtgttagagttagtttctcgggacgaactgaatgtcaaaagcgaagagcaggtgtttgaggctgctttagcgtgggtccggtacgatagggagcagagggggccttatctcccagagctactgtctaacatcaggctccctctgtgtaggccacaattcctttcagacagggtgcaacaggatgacctggtcagatgctgccataagtgccgtgatctcgtggatgaagctaaagattaccacttaatgcctgagaggaggccgcacctgcccgcatttcgcactagacctcgatgttgcacctcaatcgccggtctgatctacgcagttggtggcctgaactcagctggtgattcccttaatgtcgtagaagtgtttgatcctattgccaactgttgggaaaggtgccggcctatgactactgcgaggagcagagtgggagtcgccgtcgtgaatggtctgctgtacgcaattggcggatacgacggccagctcagactgagcaccgtagaagcatacaaccccgagacagacacctggactcgggtaggcagcatgaacagcaagcgtagcgctatgggcaccgttgtgcttgacggacagatttacgtctgtggcggttatgacgggaacagttccctttccagtgtggagacttactctcccgagaccgacaagtggacggtggtgacatctatgagctcaaataggagtgccgcaggcgtaactgtgtttgaggggaggatttacgtctcgggcggtcatgacgggctacagatttttagcagcgtggagcactataatcatcacacggcaacatggcatcccgctgctggaatgctcaataagcggtgtagacacggagcagcctccttgggctccaaaatgttcgtgtgcggcggttatgatgggagcggatttctgagcattgccgagatgtacagctccgtcgccgatcagtggtgcctgatagtgcccatgcatacccggaggtcgcgagtttcactggtggcctcctgcgggagactctatgcggtgggcggatacgatggacagagcaatttgagcagtgtggagatgtacgatcccgagactgactgctggacgttcatggcaccaatggcttgccatgaggggggagtgggagtgggatgcataccactcctgaccatatag

SEQ ID NO: 27337 - DNA, 486 bp, synthetic construct
  source 1..486: mol_type = other DNA; note = Synthetic coding sequence
atggctaaggaagagcctcagtcaatctccagagacttacaggagttacagaaaaagctgtctttgctcatcgactcttttcagaacaactcgaaagtggtggcttttatgaagagcccagtgggccaatacctggattcccaccctttcttggctttcaccctcctcgtgtttatcgtgatgtcagcggtcccagtcgggttctttctcttgatagtggtgttgacaactctggcagctctgctaggtgtgataattttagagggtctggttatctctgtaggaggcttttctcttttatgcatcctctgcggattgggattcgtatccctggctatgtccggcatgatgatcgcctcatacgtggtcgtgtccagcctgatctcgtgttggttctcccctaggcccctgactcagcagaacactagctgtgattttcttcccgcaatgaaaagcgccgaattcgagggcctttatcaggagtag

SEQ ID NO: 27338 - DNA, 4503 bp, synthetic construct
  source 1..4503: mol_type = other DNA; note = Synthetic coding sequence
atgactcgtatcctgactgcctttaaagttgtgcgaaccttgaaaacaggtttcgggttcacaaatgtcaccgcccatcaaaagtggaagttctctcgccctgggatcaggctgctgagcgtgaaggcccagactgcacacatagttctggaggacgggactaaaatgaagggctactcatttggccatccaagttctgtggccggagaagtggtctttaatacagggctgggcggatatcctgaggcgatcactgaccctgcctataaggggcagatcctcactatggctaacccaatcatcgggaacgggggtgctccagatacgacagcactggacgagctcggcctgagcaaatacctggagtccaacggcattaaggtgtccggcctgttagtgctcgattacagcaaagactacaaccactggctagccactaaaagtttgggtcagtggctgcaggaagagaaagtaccagcaatttacggggtcgatactcgtatgttgactaaaatcatacgggacaagggcacaatgctcggaaagattgagttcgaaggacaaccggtggactttgttgatcccaacaagcaaaacctgatcgctgaggtgtccacaaaagacgtcaaagtctacggcaagggcaatccaactaaagtggtggccgtggactgtggaatcaagaacaacgtgatccggttgcttgtgaaacgcggagcagaggtgcatctagtgccttggaaccatgacttcaccaaaatggagtacgatggaattttaatcgcaggagggcctggaaaccccgcattagctgagcctctaatacagaacgtgaggaagatactcgagagcgatcggaaagaaccactctttggtatatccacagggaacttgataactggcctcgctgctggcgcaaaaacgtataagatgtccatggctaacaggggtcagaatcagcccgtgctgaatattactaacaagcaagcatttatcaccgcacagaaccacggttatgccctggataacactctgcctgccggttggaaacccctgttcgtcaacgtgaatgatcagaccaatgagggaatcatgcacgagtctaaacctttctttgcggtgcaattccaccccgaggtgaccccaggtccaatcgacactgaatatctgttcgattccttcttctccctgataaaaaaagggaaggctaccaccataacctccgtcttgcccaaacccgctctggtggcctctagagtagaggtgtccaaggtgctcattctggggagcggtggcctgtccatcgggcaggctggagagttcgattactctggtagccaggctgtgaaggccatgaaagaagaaaacgtcaagactgtgctcatgaaccccaatatagcatcggtccagacgaatgaggtaggtctgaagcaagcagacaccgtgtacttcctgccaatcacacctcagtttgtcaccgaggttattaaagctgagcagccagatgggctgatattgggcatgggcggtcagaccgctctgaactgtggggttgagctgttcaagcgcggtgtcctaaaggagtatggagtaaaggtgctcggtactagcgttgagagtatcatggcaacggaagatcgccagctcttcagcgataaactgaatgaaattaatgagaagattgcccctagttttgctgtggagtccatcgaagatgccctaaaagccgcagacactatcggatatcctgtgatgataagatcagcatacgccctcggagggctagggagtgggatttgccccaaccgagaaacactgatggatctgtccacaaaagcattcgcaatgaccaaccagattttggtcgaaaagagcgtgaccggttggaaggaaattgaatacgaggtagttagggatgccgacgacaactgcgttactgtctgcaacatggaaaatgttgatgccatgggggttcatacaggcgactctgtggtggtggcgccagcccagaccttgtcaaacgctgagtttcaaatgctccggcgtacaagtattaacgtagtccggcatctgggcatagtgggggaatgcaatattcaattcgctttgcaccccacttctatggaatactgtatcattgaggtgaacgccagattgagtagaagttccgctttagcttccaaggccactggttaccccctcgcatttattgcagccaagatagccttaggaatccctctccccgaaattaagaatgtggtgagcggaaaaacttccgcgtgcttcgaaccctccctcgattacatggttacaaagataccccgatgggatctggatcgatttcacggcacctctagtcgcataggatcctccatgaaatccgttggtgaggtgatggctatcgggagaacttttgaggagtcattccagaaggccttgcgcatgtgtcacccaagtatcgaagggtttactcctaggctaccgatgaacaaggagtggccgtcaaacttagatcttcggaaagagctgtcggagccaagttctacacgaatttacgcaatagccaaggctatcgatgacaatatgtctctcgatgagatagaaaagctcacatacattgataagtggttcctttataagatgcgggacatcctgaacatggagaaaacacttaaaggcttgaacagtgagtcaatgacagaggaaaccctcaagagagcgaaggaaattggtttttcagacaaacaaatcagcaaatgcctgggccttacagaggcccagaccagggaacttaggctgaaaaagaacattcatccgtgggttaaacagatagataccctcgcagccgaatatccctcggttacaaactacctgtacgtgacttacaacggacaggaacacgatgttaacttcgacgatcacggaatgatggtcctcgggtgtggcccttaccacattggcagttcagtggagtttgactggtgcgccgtttctagtatcaggactctgcgacaactgggaaagaagaccgtggtggtgaattgcaatcccgaaaccgtgagcacagatttcgacgagtgtgacaaactttacttcgaggagctgtccctcgagagaattctcgatatctaccatcaagaggcctgtgggggttgcatcatatcagtgggcggacaaattccgaataacctggccgtcccattgtacaaaaacggcgtgaaaattatgggaacttcaccattacagattgatcgagccgaggaccgcagtattttctctgccgtgctggacgaactgaaggtggcccaagccccttggaaagcagtgaatacactgaatgaggcactcgagttcgcaaaaagcgtagattatccatgcctcctgcgccctagctacgtgctgtcaggatccgctatgaatgtggtgtttagcgaagacgagatgaaaaagttcctggaagaggccactagagtgagtcaggaacatccagtggtgcttacaaagtttgtggaaggagcacgcgaggttgaaatggacgccgttggcaaggacgggcgagtaatctctcacgcaatctctgagcacgtggaggacgctggcgttcattctggcgacgctaccctgatgctgccgacacagactatcagccagggtgctatcgaaaaagtgaaagatgccacgcggaagattgcgaaggcctttgccatcagtggtccgttcaatgttcagttcctcgtgaaaggaaacgatgtgctggtgattgaatgtaacctccgcgcatcgcggtcgtttccttttgtatccaagaccctgggagtagactttattgacgtggccacgaaggtcatgataggggagaacgtggatgaaaaacacctgccaactctggatcacccaataatacccgctgattacgtggccataaaggcccctatgttcagctggcctcgtctgagggatgctgatcctattcttcgatgtgagatggcctccaccggagaggtagcttgcttcggggagggcattcacaccgccttccttaaggcaatgctctccactggctttaagattcctcagaaaggaatcctcatcggaattcagcagtcattccggcctagattcttgggggtggcggaacagctgcacaatgagggcttcaagcttttcgccactgaggcaacctctgattggctgaatgccaacaatgtgccggctacacccgtcgcatggccttctcaggagggccagaacccctccttgtcatcaattagaaaattgatcagggacggcagcatagatctggtcatcaacctccccaacaataataccaaattcgtacacgataattacgtcattagacggacggcagtggatagcggaatcccactcctgacaaactttcaggtcacgaagttgtttgcagaagccgtccagaaatcaaggaaagtggactctaaatctctgttccactataggcagtatagcgccggaaaggccgcatag

SEQ ID NO: 27339 - DNA, 846 bp, synthetic construct
  source 1..846: mol_type = other DNA; note = Synthetic coding sequence
atggcagtgaacgtctattccacctccgtcacaagcgagaacctgtccagacacgacatgttggcttgggtcaacgattccctgcatctgaactacacgaagattgagcagctctgttctggagcggcttattgccaattcatggatatgttgttccctgggtgtgtgcatttgaggaaagtcaagttccaggctaaactcgaacatgaatatatacataacttcaaagtgcttcaggccgcattcaaaaaaatgggcgtggacaagataatccctgtggagaagcttgtcaagggaaagttccaggacaattttgaatttattcagtggtttaaaaagtttttcgacgcaaactacgatggcaaagactacaatccgctactagctcgtcaggggcaagacgtagcgccacccccaaacccaggggaccagatcttcaataagagtaagaaactcatcggcacggcagtgccgcagcgaacatcgccaacagggccaaaaaacatgcaaacatctggcagattgtctaatgtagctccaccctgtattttgcgaaaaaaccctcccagcgcccgtaatggaggacatgagacagatgcccagatcctagagctgaatcagcagctcgtggatctgaagctcacagttgatggcctggagaaggaaagagatttttatttttccaagttgcgcgacatagagctgatttgtcaagagcatgagtctgagaactctcccgttattagtgggattattggcattctgtatgctacagaggagggatttgcgccaccagaggacgatgaaatagaggagcaccagcaggaggaccaggacgagtactag

SEQ ID NO: 27340 - DNA, 531 bp, synthetic construct
  source 1..531: mol_type = other DNA; note = Synthetic coding sequence
atggctctctggagagcttaccagagagccctggccgcacacccttggaaagtgcaggtactgactgcaggtagcctgatggggttaggcgacattatctcccaacagctcgtggaacggcgtgggctgcaggagcaccaaagggggagaaccttaacgatggtgagtctcggctgtggtttcgtgggacccgtcgtgggaggatggtacaaagtcctggacaggtttatcccaggaactacaaaagtcgacgctctgaagaagatgctactggatcaggggggtttcgcgccatgtttcttaggctgctttctccccctggtgggcgcactgaacggcctatctgcccaggataactgggcgaagctgcagagagattaccccgacgctctgattactaattactacttatggcccgcagtccagcttgctaacttctacctcgtccccctacattaccgtctcgctgtggtccagtgcgtcgccgtgatttggaactcttacctgtcctggaaagctcaccggttgtag

SEQ ID NO: 27341 - DNA, 1143 bp, synthetic construct
  source 1..1143: mol_type = other DNA; note = Synthetic coding sequence
atggccagcctccctgtactacagaaagagagtgtgtttcagagtggagcccacgcatacaggatccccgcacttttatacctgccagggcagcaaagccttcttgcttttgccgagcagcgagcctctaagaaagacgagcacgcagagctcatagtcttgcgacgcggtgactacgatgccccaacacaccaagtgcagtggcaagctcaggaagtggtcgcccaggccaggttggacggccatcggtccatgaacccttgccccctctatgacgcgcaaacgggcactttgtttctgttcttcattgccatcccgggtcaggtgaccgagcagcaacaactgcaaacccgagccaatgtcacccggctgtgtcaggtgaccagcaccgaccatggcaggacttggagcagccctcgggacctcaccgacgccgctatcggacctgcttacagggaatggagcacatttgccgtcggcccaggccactgcctgcagcttcacgatagagccaggtctctcgtggtgccagcctacgcgtataggaagttgcaccctatccagagaccgatccctagcgctttttgtttcctatcacatgatcatggacgaacttgggccagaggccattttgttgcccaagacacccttgagtgccaagtcgccgaggtcgaaaccggcgaacagcgcgtagtgaccctcaacgcccgatctcacctgcgggctagagtgcaggctcagagcacgaacgacgggctcgacttccaggaatcccaactcgtgaaaaagctcgtggaacccccacctcagggctgtcagggttctgttataagcttccccagccctagatccggaccgggatccccagcccagtggcttctgtacactcatccaacgcactcttggcagagggccgacctaggagcctacctcaatccccgaccccctgcaccggaagcctggtcagagccggtgctgctggccaagggcagttgtgcctactctgatctacagtccatgggcacgggacccgatgggtccccgctgttcggatgcctgtacgaagcaaacgactatgaagaaatcgtttttctgatgttcacactcaagcaggcatttcctgctgaatacctgcctcagtag

SEQ ID NO: 27342 - DNA, 3165 bp, synthetic construct
  source 1..3165: mol_type = other DNA; note = Synthetic coding sequence
atggccgctgtgaaggagcccttggaattccacgctaaacggccatggaggccagaggaagccgtggaagatccagacgaggaggatgaggataacacttcagaggcagagaacggctttagcttagaggaggtcctgcggctggggggaacgaaacaggactacctgatgctagcgaccctggatgaaaatgaggaagtgattgatggaggcaaaaaaggagccatagacgatttgcagcaaggagaactggaggctttcatccagaaccttaatctggctaagtacactaaggcttctttagtagaggaagatgaacccgcagaaaaagagaattcatccaaaaaggaggtcaaaatacccaagatcaacaacaagaacactgccgaaagtcagcggacatctgttaataaagtcaagaataagaaccgcccagaaccacacagtgacgagaacggctccaccactccgaaggtgaaaaaagataagcagaacatcttcgaattctttgaaaggcagacccttcttctgagacctggtggtaagtggtacgacctggaatactccaatgaatacagtctcaagcctcagcctcaagacgtggtttctaagtacaagaccttagcccaaaagctgtaccaacacgagattaacctgttcaaaagcaaaaccaacagccaaaagggagcctcatctacatggatgaaggccatcgtgtcgtccgggaccctcggggatcgcatggcagccatgatcctgctcattcaggatgatgccgttcatactttacagtttgtggaaacgctggtgaatctggtgaaaaaaaaagggtctaaacaacagtgtttaatggctctggatacgttcaaggagttactcatcacagacctgttgccagacaatagaaagctcagaatattctcccaacgtcctttcgataaactcgaacagctgagcagcggaaacaaggactcgcgggaccgacggcttatactgtggtattttgagcatcagctgaaacacctggtcgccgagttcgtgcaggtgctcgaaactctcagtcatgacaccctcgtaaccaccaagacacgcgcactgacggtcgctcatgaactgctttgcaataaaccggaagaggaaaaggcccttttagtgcaagtcgtcaataagctcggtgacccgcaaaatcgcatagctacgaaggcctcccacctactcgaaaccctcctctgcaaacaccctaatatgaagggtgtggtgtccggggaggtggaaaggctgctgttcagatcaaatatcagctctaaggctcagtactacgctatatgcttcctcaaccagatggctcttagtcatgaagaaagcgaactggcaaataagctgataaccgtgtacttctgtttctttaggacgtgcgttaaaaagaaggatgtggagtctaagatgctttccgctctgctgactggagtgaaccgggcttatccgtactctcagaccggcgatgacaaggtccgagaacaaattgacaccctcttcaaggtccttcacattgtgaatttcaataccagcgtgcaagcacttatgctgctattccaagttatgaactcccagcagacgatctctgataggtactacacggcactttaccggaaaatgcttgatcccggactgatgacttgtagcaagcaggctatgtttctgaacctcgtgtataagagtcttaaagccgatattgtactccgaagagtcaaagcttttgttaaacggcttctccaggtgacttgccagcagatgccaccctttatctgtggcgcactctatttggtcagcgaaattcttaaagcaaaaccgggtctgagaagccagctggatgaccatcctgagtctgatgatgaagagaacttcatagatgcgaatgacgatgaggatatggagaagttcaccgacgcagacaaagagacagagattgtgaagaagttagagactgaggagactgtacccgagacagacgtggaaactaagaaacccgaagtggccagctgggtgcacttcgataatctaaagggaggaaaacagctaaacaagtacgatccattcagcaggaatccgttgttctgtggtgccgaaaatactagcctttgggagctgaaaaaactgtcagtccacttccacccaagcgtggctctgttcgcaaagaccattctgcaaggcaactacatccagtactccggcgaccccctacaagacttcacactgatgaggttcctagataggtttgtgtaccgaaaccctaaaccccacaaaggaaaggagaacactgacagtgtggtaatgcagccaaaaaggaagcacttcatcaaagatatcagacatttgccggtaaactcaaaggaatttcttgctaaggaggaaagccagattccagttgacgaagtgttcttccatagatattataagaaggttgccgtcaaggaaaaacagaagagggacgcagacgaagagtcaatcgaggacgttgatgatgaagagttcgaggagctgatcgacacattcgaggatgataactgttttagttccggcaaagacgatatggacttcgccggaaatgtgaaaaagaggactaagggggctaaagataatacccttgacgaagatagcgaggggagtgatgacgagctggggaacctggacgacgacgaagtcagcttgggcagcatggatgatgaagagttcgcagaggtggatgaggatgggggaacgttcatggacgtgctagatgacgagtcagagtccgtgccagagctggaggttcactcaaaggtttccacaaaaaaatctaaaaggaagggcaccgacgattttgacttcgcaggtagtttccaggggcctcggaagaagaagcgtaatctgaatgattctagtctttttgtatccgctgaggagtttggtcatctccttgatgagaacatgggcagcaaattcgacaatatagggatgaacgctatggccaataaagacaacgcctctctgaaacagcttagatgggaagctgagcgggacgattggctccacaatcgagatgcgaagagcattataaaaaaaaagaaacattttaaaaaaaagagaatcaagactacacagaagactaagaaacagcgaaaatag

SEQ ID NO: 27343 - DNA, 1107 bp, synthetic construct
  source 1..1107: mol_type = other DNA; note = Synthetic coding sequence
atggagcccggacagccccgagagccacaggagccacgagagccgggtcccggagcggaaacagcagcggctcctgtctgggaagaggccaaaatcttctatgataatttggccccaaagaagaagcctaagtcaccaaaaccacagaatgcagtcaccatcgccgtgagttctcgcgcattattccggatggacgaggagcagcagatttacactgaacagggggtcgaagaatacgttcggtatcagctcgaacatgaaaacgagccctttagccccggacctgctttcccttttgtgaaggccttggaagcagtcaatagaagactgcgggaactgtatcctgattctgaagatgtctttgatatcgtcctcatgactaacaaccatgcccaggtcggtgttagactgatcaacagcatcaaccactacgacctgttcatcgagcgattttgtatgaccggcggaaatagcccaatctgttacctgaaggcctaccataccaatctatacctcagtgcagacgccgagaaggtgagggaagctatcgacgagggcatcgccgctgccactatcttttccccctccagggatgtcgttgtttcccaatctcagctccgtgtggccttcgacggagatgccgtcctttttagtgacgagagcgagcgaatagtgaaagctcacggtctggaccgcttttttgagcatgaaaaggcccacgagaacaagcctttagctcagggtcccttgaaaggttttctggaggccctcggccgacttcagaaaaagttctactcgaagggcctgaggctggagtgcccaatccggacgtacctggtgaccgcgagatctgccgcatcgtcaggtgcacgcgcactcaagactctgcgtagctggggcctcgagacggatgaagctctgtttctggccggagctcctaaaggtccactgttggagaaaattcgccctcatattttcttcgacgaccagatgttccatgtggccggtgctcaggagatgggcaccgtggccgcacacgtgccatacggggtggcccagacccctaggaggacagcccctgctaagcaagcaccttcggcccagtag

SEQ ID NO: 27344 - DNA, 1080 bp, synthetic construct
  source 1..1080: mol_type = other DNA; note = Synthetic coding sequence
atgctgtcagctgcctctcgcgtggtgtcacgggcagcagtgcactgcgcgctgcggtctcctcctccggaggccagagccctggctatgagccggccaccccctccacgagttgccagcgttctgggaaccatggagatggggaggcggatggacgccccagctagtgctgccgctgtccgcgcttttctagaacgcggtcacacagagcttgatactgctttcatgtattcagacgggcagagtgaaacaatcctgggcggacttggcctgggcctcggaggaggggattgtagggtgaaaattgccaccaaggccaatccctgggacggtaagagtctgaaacctgactctgtcaggtctcagctagaaacttcactaaagaggctgcaatgtccgcaggtggatctgttctacctgcacgcacccgaccacggcactcccgtcgaagagactctgcacgcctgccagagattacaccaagagggcaagtttgttgagctgggcctgagcaattatgcatcgtgggaggtcgcagagatctgtactctgtgcaagtctaacggttggatcctgcccaccgtctatcaggggatgtacaacgccacaacccgtcaagtcgagactgaattgttcccatgtctgaggcacttcggcctgcgcttttatgcatataatcccttggccggaggcctgcttacaggaaagtacaagtacgaggacaaggatgggaaacagcctgtggggaggttcttcggcaacagttgggctgagacctaccgaaaccggttttggaaggagcaccactttgaagcgatcgccctggtagaaaaggctttgcaggctgcctatggtgcgtcagccccatcagtcacgagcgccgctctacgctggatgtaccaccattcacagctgcaaggcgctcatggagacgctgtgattctgggaatgtcatccctcgaacagctggagcagaatctggcggcaacagaggagggccctttagagcccgcagttgtagatgctttcaaccaagcctggcaccttgtggctcacgagtgtcccaactacttccgctag

SEQ ID NO: 27345 - DNA, 561 bp, synthetic construct
  source 1..561: mol_type = other DNA; note = Synthetic coding sequence
atggacgcagattccgatgtcgccttagatatacttataactaacgtcgtttgtgtatttcgcactagatgccacctgaatctgaggaaaattgctctggagggcgcaaacgttatttataaacgtgatgtgggcaaagtgcttatgaaattgagaaagcctcgaattactgccactatatggtcttcaggcaagataatttgtaccggcgcaacctcagaggaggaggccaagttcggcgcaaggagactcgccagaagcctgcagaaacttggcttccaggttatctttacagatttcaaagtggtcaatgttcttgcggtgtgtaacatgcccttcgaaatacgtctgccagaattcaccaagaacaacaggcctcacgcgtcttacgagcccgagctgcaccctgccgtctgctataggataaagtctctccgggctacactgcaaatcttttccactgggtccataaccgtcactggcccaaatgttaaagctgtagccacggccgtcgagcagatctacccctttgtattcgagagtaggaaggagattctttag

SEQ ID NO: 27346 - DNA, 537 bp, synthetic construct
  source 1..537: mol_type = other DNA; note = Synthetic coding sequence
atggctgcgcctttgggaggcatgttcagcggacagcctcctggcccaccacaggccccacctggactgcctgggcaagccagccttctgcaagcagctcctggggctcctaggccttctagctccactctcgtcgacgaactcgagagttcctttgaagcgtgcttcgcgagcctggtgtctcaggattacgttaacggaacggaccaggaagagatacggaccggcgttgatcaatgtattcagaaattcctcgatattgctcgccagaccgagtgcttttttctccagaaacgccttcagctctccgttcaaaagcctgagcaagtcataaaggaagatgtcagcgagttgcgaaacgagcttcagcggaaggatgctctcgtgcaaaagcacttgaccaagctgcgacactggcagcaggtgctggaagatattaatgtgcagcacaagaaacctgccgacatcccccaggggtcgctggcctatttggagcaggctagcgcgaacattcccgctcctctgaagccgacctag

SEQ ID NO: 27347 - DNA, 738 bp, synthetic construct
  source 1..738: mol_type = other DNA; note = Synthetic coding sequence
atggaaaaaacagagctgatccaaaaggctaaactggctgagcaggcagagcgttacgatgacatggcgacttgcatgaaagctgtgacagagcagggcgcagagctgtcgaacgaagaaaggaacctgctgtctgtcgcgtacaagaacgtggtgggcggtcgccgaagcgcatggcgtgtgatatcttctattgagcaaaagactgacaccagtgacaagaaactgcagctgatcaaggattacagggaaaaagttgagtccgaattgaggagcatttgcaccacagtactggaacttctggacaaatatctgatcgcaaatgctactaatcccgagtccaaagtgttctacctgaaaatgaagggggattatttcagatatttggcagaagtcgcctgtggagacgaccgcaaacagacgatagacaactcccagggcgcataccaagaagccttcgatatctctaagaaagagatgcagcctacacatcctatacgcctgggccttgccctgaatttctccgtgttttattatgagattttaaacaaccccgaactggcttgcactctggccaaaaccgctttcgacgaggctatagccgagctggatacactcaacgaggattcctacaaagacagcacgctgatcatgcagctgcttagagacaatctgacattgtggacttccgattctgcaggagaagaatgtgatgctgccgaaggcgctgaaaattag

SEQ ID NO: 27348 - DNA, 534 bp, synthetic construct
  source 1..534: mol_type = other DNA; note = Synthetic coding sequence
atgcccggactcaccgcctattttgggctcctggaaatttgtggagtcaaaggaggggagacagttatggtaaacgccgctgcaggagcagttggctctgtggtcggacagattgctaagctcaagggttgtaaggtggtgggagcagtgggctctgatgagaaggtggcatatttacagaaattaggcttcgacgtggtctttaattataagactgttgaaagtctggaggaaaccctgaagaaggccagccctgatggctatgactgctatttcgacaatgtaggcggagagttctcaaatacagtcataggccagatgaagaagttcggccgaattgctatttgtggagctatatctacatacaaccgcaccggtccactgccccctgggccacctcccgagattgttatttatcaagaactgagaatggaagcattcgtggtctaccggtggcagggcgacgccaggcagaaggccctgaaggatctgctcaagtgggttttagagctgccatactttgtgatcgactag

SEQ ID NO: 27349 - DNA, 3660 bp, synthetic construct
  source 1..3660: mol_type = other DNA; note = Synthetic coding sequence
atgttcggggctggagatgaggacgacaccgatttcctgtctcctagtgggggagcgagattagcgagtctgtttggcctggaccaggcggcagcgggacacggaaacgagtttttccaatataccgcaccaaaacagcccaagaagggccagggcacggcggcaacgggcaatcaggcaactcccaagacagcccctgccaccatgtcaaccccaaccatcctggtggcaaccgccgttcatgcttaccgctatactaacgggcagtatgtcaagcaaggaaaatttggcgctgcagtactcgggaaccatacagcacgggagtatagaatcttgctgtacatttcacaacagcaacccgtgacggtagctaggatccacgtcaatttcgagctgatggtcaggcccaataattattccaccttttacgatgaccagcgccaaaactggtcgataatgtttgaaagtgagaaggctgccgtggagtttaataagcaagtgtgcatcgctaagtgcaattcaacaagtagcctggatgccgtccttagccaggacctgattgttgccgacggcccagccgtggaagtgggagactccttagaagtggcttatacgggctggcttttccagaaccacgtgctggggcaggtctttgactccaccgcgaacaaggacaaactgctgcggctgaaattgggaagcggtaaggtaatcaaaggctgggaagatggcatgctaggaatgaagaagggcggaaaacgcctgctgattgtgccccctgcttgcgcggtaggttcagagggcgtcatcggatggacccaggctacagactcgattctcgtgtttgaagtagaagtccgcagggtaaaattcgctcgagacagtggtagcgatggacactctgtgagcagccgggacagtgccgctccctccccaatcccaggcgctgataatctctccgctgaccccgtcgtgtccccccctacaagtatcccattcaaatccggggagcctgccctgcgaaccaagagcaactcgctctctgagcagttggcgataaacacaagtcctgacgctgtcaaggcgaagctgatctctaggatggctaagatggggcagccgatgctgccaatcctgcctcctcagctcgatagtaatgactcagagattgaagatgttaacacactgcagggcggagggcagccggttgttaccccatccgtccaaccatcactgcatcctgcacaccccgcactgccgcagatgacatcccaggcaccacagccatccgtgacagggctccaggccccaagcgccgctttgatgcaagtgtcctcactggacagccatagtgccgtgtccggaaatgcccagtccttccagccctatgcaggcatgcaagcttacgcctatccacaggcctctgctgtaacctcccaactgcagcctgtgagaccactgtacccagctccattgtcccagccaccccacttccagggatccggggatatggcatctttcttgatgactgaagcacgccagcacaatactgagatacgcatggctgtgagcaaagttgccgacaagatggaccacttaatgactaaagttgaggagttgcagaagcactctgccggtaatagcatgctgatcccgagtatgtccgtcacgatggaaaccagcatgattatgagtaacattcagcggattatccaggaaaatgagaggctgaagcaggaaattctagaaaaatccaacaggattgaagaacaaaacgataaaatttcggagctcattgagcggaatcaacggtacgttgagcagtcaaatcttatgatggagaaacggaataacagtttacagactgccaccgagaatacccaagcaagagttcttcatgcagagcaggagaaagcaaaggtcacagaggagctggctgctgctacagcacaggtcagccacttacagctaaagatgacagctcatcaaaaaaaagaaactgaactgcagatgcagcttacagaatctcttaaggagaccgatctcttgcgcggacagctgacgaaggttcaagctaaactgagcgaattacaagaaacttcggagcaggcccagagtaagtttaagtctgaaaaacaaaatcgaaaacagctggagctgaaagtgacctctctcgaagaagagctgaccgacctccgggttgaaaaggagtcactagaaaagaatctctctgagcgaaagaaaaagagcgcccaggagcgctctcaggctgaggaagagattgacgagattaggaaaagctatcaggaggagttagacaaacttcgccagttgcttaagaaaactcgcgtctctacagaccaggccgctgcagagcagctctctctcgtgcaggccgaactgcagacccaatgggaagctaaatgtgagcatctgctagctagtgcaaaagatgagcacctccaacaataccaggaagtttgcgcccagagggatgcctaccagcagaaactagtccaactgcaggagaagtgcctggctctgcaggcccaaattacagccctgactaagcaaaatgaacagcatattaaagagttggagaaaaataagtctcagatgtcgggtgtagaagcggctgccagtgaccctagcgagaaagtgaagaaaatcatgaaccaagtgtttcagagcctcagaagagagtttgagctagaagagtcatataatggtaggaccatacttggaacgatcatgaataccataaagatggtcactctgcaacttctaaatcagcaagaacaggagaaggaagaatctagtagtgaggaagaggaggagaaagctgaagagcggccacgacgtccttctcaggagcagtcggctagtgcgagtagtggacaacctcaggccccactcaacagagaaagaccggagagccccatggttcccagcgagcaggtggtcgaggaggccgtccccttgccaccccaagccctaacaacctcacaagacggccatcggagaaaaggggattctgaggccgaagccctcagcgaaattaaggatggatcccttccaccggaactgagttgtattccttctcaccgtgtactaggccctccgaccagcatcccaccagaaccgctgggaccagtctcaatggactccgagtgcgaggaaagcttagcagcaagtcctatggcagcgaaaccagacaacccctctgggaaagtgtgcgtgcgagaggttgcacccgacggacccctacaggagtcctccacaagactgtccctgacatctgatccagaggagggtgatcctcttgcccttggtccagaaagccctggtgaaccgcaacctccgcagctaaaaaaagatgatgtgactagctctactggtcctcacaaggagctgtccagtaccgaagccggaagcacagttgcaggcgctgctttgcgcccttcccatcactcgcagcggtcctccctgagcggcgacgaggaagacgagctctttaaaggtgccacgctcaaggctctgagacccaaagctcagccagaggaagaggacgaggatgaggtctctatgaagggaaggcccccaccaactccactctttggagatgatgatgatgatgacgatatagattggcttggctag

SEQ ID NO: 27350 - DNA, 6978 bp, synthetic construct
  source 1..6978: mol_type = other DNA; note = Synthetic coding sequence
atgaaaaagggttcgcagcagaagatcttctctaaggcaaaaatcccaagctcctctcacagtccaattcccagtagcatgtcaaacatgaggtccaggagtctcagtccgctgataggatccgagactctgcccttccacagcggcggacagtggtgcgaacaggtcgagatagctgatgaaaacaatatgctgctggattatcaggatcataagggtgccgacagtcacgccggagttcgatacatcacagaggcccttataaaaaaactgaccaaacaggataacctagctctgatcaaaagcttaaatttgagcctgtccaaggacggtggtaaaaagttcaaatacatagaaaacctcgagaagtgcgttaagctagaggtgctgaatttgtcgtacaatctgatcggaaaaattgagaagctcgacaaactactcaaattgcgtgaattgaacctctcatataacaagatctcgaaaattgaaggaatagagaacatgtgtaatctgcagaagctaaatctggctgggaacgaaatagagcatattcctgtctggttaggtaaaaagcttaagtccctcagagtcctcaacctgaaaggcaacaagataagtagtctgcaggatataagcaagctgaagccgctccaggacttgataagcctgatacttgtggaaaacccggttgtcaccctgccacattatctccagttcacaatctttcaccttcgctcactggagtccctggaagggcagcccgtgaccacccaggatcgccaggaagcattcgaacgtttttcacttgaggaggtggagagactagaacgagacctagaaaaaaaaatgattgagaccgaagaactcaagagcaaacagactcgatttctggaagaaatcaagaatcaggataaactaaataaaagcctgaaggaggaagccatgttgcagaaacagtcatgtgaggaacttaaaagtgacttgaatacaaagaacgagctcctcaaacagaaaacgatcgagctgacccgagcatgtcagaaacagtatgagctagagcaagaattagccttctacaagattgacgctaagtttgagcccttgaactattatcccagcgaatacgccgagatcgataaggccccagatgagtccccctatataggaaagagtcggtataaacggaacatgtttgcgactgaaagctacatcattgattctgcacaagccgtacagatcaagaagatggaacccgacgaacagctgcgtaacgaccacatgaatctgcggggacacactcctctagacacccagctggaggacaaagagaaaaaaatctcagccgcacagactcggctgtctgagctgcatgatgaaatagagaaagcagagcagcagatactccgagcgacagaagagttcaaacagctggaagaagccattcagctcaaaaagatcagcgaggccggtaaggacttgctgtataagcagctcagtggaaggctgcagctggtgaacaagctgcgccaggaagcgctggacctggagcttcagatggagaaacaaaaacaagaaatcgccggaaagcagaaagagatcaaggatctgcaaatagcaattgactcactcgattccaaggatcctaaacatagtcatatgaaggcccagaagtccggaaaggagcagcagcttgacatcatgaacaagcagtaccaacagctggaaagcagactcgatgagattctgagccgcattgccaaagaaaccgaggaaatcaaggaccttgaagagcagttaaccgaaggacagatcgccgcaaacgaagccctgaaaaaagacctggaaggtgtgatctcgggactccaggaatacttaggcaccatcaaaggtcaagccacccaagcacagaatgagtgcaggaagctcagggatgaaaaagaaaccctgctgcaaagactcacagaggtcgagcaggagcgcgatcagctggagatcgtcgcaatggacgcagaaaacatgaggaaggaactggctgagctggagtcagccctgcaggaacagcacgaagtgaacgctagtctccaacagacccagggcgacctgtctgcgtacgaggccgaacttgaagcacgattgaacctccgcgacgcggaagccaaccagctgaaagaagaactcgagaaggtcacccggttgacccagctggagcagagcgcactccaggccgagttagagaaagaacggcaggctctaaaaaatgccttgggaaaagcccagttttctgaagaaaaagagcaggaaaacagcgagctgcacgcaaagttgaagcacctccaagatgacaacaacctcctcaagcaacaactgaaggacttccagaatcacctgaatcatgtcgtggacgggctcgtccggcctgaggaggtagcagctcgggtggatgaattgcggcgtaagctgaaattgggcaccggagagatgaacatccacagtccatcagatgttttagggaaaagtcttgcggacctgcaaaaacagttcagcgaaatactagccaggagcaagtgggagcgggatgaggcccaggttcgcgagcgcaaacttcaggaggagatggccttgcagcaggagaaactggctaccggacaggaggaattcagacaggcttgcgagcgtgcccttgaagcacgcatgaattttgataaacgccagcacgaagcgcgaatccagcagatggaaaatgagatccattacctccaggagaatctgaagtccatggaggaaatacagggcttgaccgacctccagctgcaggaggcagacgaagaaaaggaaagaatcctggcccagttaagagaattagaaaagaagaaaaaactggaagatgccaagtcacaggagcaggtctttggcctggataaagagctgaagaaactgaaaaaggccgttgctacaagcgacaagctggcaacagccgaactgaccatcgcgaaagatcagctgaaatctttgcatggcacggtaatgaaaatcaaccaggagcgagcagaagaattacaggaagctgagaggttcagcaggaaggcagcgcaggctgctcgtgaccttacaagggccgaggcagaaattgagctcctgcagaacttgcttagacagaagggcgagcaattccgactggagatggagaagaccggcgtgggtacaggcgcaaattcccaggtcctggaaatcgagaagctaaacgaaaccatggagcgacagaggacagagatcgcgagactacagaatgtgctagacctgactgggtctgataacaaagggggattcgaaaatgttctggaagagatcgctgaacttaggcgggaagtgtcttatcagaacgactacatatcatctatggcggatccatttaagcggagaggctattggtattttatgccccctccgccttcttccaaggtttcttcccatagctctcaggcaaccaaagattcaggagtaggcctgaagtactcggcaagcaccccagtgaggaaacccagacctggccaacaagacggcaaggaaggctcccagccgccacctgcctccgggtactgggtttactcgcctatccgatccggactgcataagttattcccttcacgggacgctgattccggcggagacagccaggaagagtctgaattggatgaccaggaggaaccaccttttgtgccgcctcccggatatatgatgtacaccgtactccccgacgggagccctgttccacaggggatggctctgtacgcgccaccacccccactgcctaataatagcagacccctcacccccggaacggtggtgtacggcccacctccagctggagctcccatggtgtacggaccacctccaccaaacttcagcatcccattcataccaatgggagtgctgcactgtaacgtaccagaacatcacaacctggagaacgaagtctcacgcttagaggatatcatgcagcatcttaagagcaaaaaacgggaggaaaggtggatgagggcaagtaaacggcagtccgagaaagaaatggaagagctgcaccacaacattgatgaccttttgcaggaaaagaagtccctggaatgcgaggtggaggagttacataggactgttcagaagcggcaacaacagaaggacttcatcgacggtaatgtggagagcctaatgactgaactagagattgagaaatcgcttaagcaccacgaggatatcgtcgacgaaattgagtgcatcgagaagacccttctcaaacggagatcggaattgcgggaggctgataggctattggcggaagccgaatctgagctctcttgtactaaggaaaaaacgaagaacgccgttgaaaagttcaccgatgctaagcgaagtctgctgcagacagagtctgacgccgaagaactcgagaggcgtgcacaggaaactgctgtcaacctggtaaaagctgaccaacaattgcgaagccttcaggcggacgccaaggatttggaacagcataagattaaacaggaggaaattctgaaggaaattaataaaatagttgcagcgaaggactctgactttcagtgtcttagtaaaaagaaggaaaagctgactgaggaactgcagaaactgcagaaggatatcgaaatggccgaaagaaacgaagatcatcacctccaggttctgaaggaatctgaggtccttctgcaggctaaacgggcagaacttgagaaacttaagagccaagtgacctcccagcagcaggaaatggccgtcctggacagacaactgggtcacaaaaaggaagagctgcatctgctgcagggttctatggttcaagccaaagctgatctccaggaagctctgcggttgggagagaccgaggtaactgagaaatgtaatcatatccgcgaagtgaaaagcctgctcgaggaattgagctttcagaaaggcgaattgaatgtgcagatctctgaacgcaagacacagttgaccctcattaaacaggaaattgagaaagaagaggagaatttgcaggtggtcctgcgccagatgtctaaacataagaccgagctgaaaaacattctggacatgttgcagctggaaaatcatgagctgcaagggttgaagttgcaacacgatcagagggtcagcgaactagaaaaaacacaggttgccgttcttgaagaaaaactagagcttgagaatttgcagcaaatttctcagcagcagaagggtgaaattgagtggcagaagcaactgttggagcgagataagcgggaaattgaacgcatgactgccgagtctcgggcactccagagctgcgtcgagtgcttgagtaaggagaaggaggacctgcaggaaaaatgcgacatatgggagaaaaaacttgcccaaactaaacgtgtgctagctgccgctgaggaaaactctaagatggagcagagcaacttggagaagctggagctcaatgtcagaaagctgcagcaggagttagatcagttgaaccgggataaactgagtctgcataacgacatcagcgcaatgcaacaacagctgcaggagaagagagaggccgtgaactcactgcaggaagaactggccaacgttcaggatcacttgaacttggctaaacaggaccttctgcatacaacaaagcatcaggatgtgctgttatctgagcagacccgcctgcagaaggacatctccgagtgggcaaatcgttttgaggattgtcagaaggaggaagaaaccaaacaacaacagctgcaggtgctacagaacgagattgaagagaacaagctgaaactcgtacagcaggagatgatgttccagagattgcagaaggaaagagaaagcgaagagagcaagcttgaaacctctaaggtgactctaaaggaacagcagcatcaattagaaaaagaactgaccgaccagaagtccaaactggaccaggtcctgtctaaagtgcttgcagctgaagagagagtccgaaccttgcaagaggaagagcgttggtgcgagtccttggagaaaaccttgagtcagaccaagcgtcagctgtctgaacgcgagcagcagttggttgagaaatcaggggaactgctggcattgcaaaaagaagctgattccatgcgggcagattttagtcttttgcgcaatcagtttctgacagaaaggaagaaagccgagaaacaggtcgcaagtttgaaagaggccttaaagattcagagaagccagcttgaaaagaacttgctggagcagaaacaagagaattcctgcatacagaaggaaatggccactatcgaactggtggcacaggacaatcacgaacgtgctaggagactgatgaaggagctgaatcaaatgcagtacgaatacacagaactgaaaaagcagatggccaaccagaaggatctggaaagacggcagatggaaatttccgatgcaatgcgtacgctgaagagcgaagtaaaggacgagatccgtacctcgctgaaaaatctcaatcagttcctacccgaactcccagccgacttggaagccattctggaacgcaacgaaaacctggaaggcgagctggagtcgctaaaagaaaacttacctttcaccatgaatgagggaccatttgaggagaaactcaacttctctcaagtacacatcatggacgaacattggcgcggagaggctctgagggagaaactccgacacagagaggataggctgaaagcacagctaaggcattgtatgtccaaacaggctgaagtgctgatcaagggcaagaggcagacggaaggaactctccatagtctgcggagacaggtggacgcgcttggagaactggtgacctcgactagcgctgattctgccagcagtccatctctttcccaactggaatccagcctgactgaagactcccagctgggtcagaatcaggagaaaaacgcctcagcaagatac

SEQ ID NO: 27351 - DNA, 2811 bp, synthetic construct
  source 1..2811: mol_type = other DNA; note = Synthetic coding sequence
atggaacctgacatcattaggatgtatagcagtagtccacctcctctggataacggagccgaagatgacgatgacgatgagtttggggagttcgggggttttagcgaggttagtccgtcaggggtgggtttcgtagactttgacaccccagactatacacggcctaaggaggagtttgtgcccagcaaccatttcatgccaattcacgagtttagcgagaacgtggatagcctgacttctttcaaatccatcaagaatggtaatgataaagatataacggccgaactgagcgcacccgtcaaaggccagagcgacgttctgctgagcacaacctcaaaggaaatcataagctcagagatgctggcaacaagtatagatggcatggagaggccaggaaacctaaataaagtggttgaacagcgacagaatgtggggaccttagagtcattcagtcccggtgacttcaggactaatatgaacgtagtccaccagaacaagcagttagagtcctgtaatggggagaagcccccttgtctggaaattctaactaacggttttgccgtgttggagactgtaaacccccagggaacggacgatttggataacgtagcagactccaagggtaggaagccattgtcaactcactctacagagtataatctggacagcgtgccatcccccgctgaagagttcgccgattttgcaaccttcagcaagaaggagcgcatccagctggaggagatcgagtgcgccgtgcttaatgatcgggaggctctgacgattagggagaacaacaaaattaacagagtcaacgagctgaatagcgtgaaagaggtcgccctgggaaggagtttagataataagggtgacaccgacggcgaggaccaggtctgtgttagcgaaattagtatcgtgaccaaccgcggattcagcgtcgagaaacagggactacctacacttcagcaggacgaatttcttcagtccggcgtccagtccaaagcctggtcactcgtggatagcgccgataacagcgaggccatcagacgcgaacagtgtaaaacagaagagaagctggacttactcacctctaaatgtgcccacttatgcatggactcagtgaagactagcgacgatgaggtgggcagccccaaggaagagagcagaaagtttaccaatttccagtctcccaatatcgatcctacggaagaaaatgacctggacgatagtcttagcgttaagaacggcgatagttccaacgattttgtcacatgtaacgacattaacgaagatgatttcggcgacttcggggatttcggctctgcgagcggtagcactcctcctttcgttacgggaacgcaggactctatgtccgatgccacgttcgaagagtcgtcagagcacttcccccatttcagtgagccaggggacgacttcggggagttcggagatatcaacgcggtgtcttgtcaagaggagaccattcttaccaagtccgacctgaagcaaacatctgataatctttcggaagagtgtcaactggcccgtaagtcctccggaactggtactgagcccgtcgccaagctcaaaaatggccaagagggagaaataggccacttcgactcggtcccaaatattcaagacgactgtaatggatttcaggactccgacgatttcgctgatttctcttctgccggtccaagccaggttgtcgattggaacgccttcgaagacgaacagaaagacagctgtagctgggctgcctttggtgaccagcaggccacagagtcacaccacagaaaggaagcatggcaatcacatcggacagacgaaaacattgacaccccaggtactcccaaaacacactcagtgccatctgcgacatctaagggggcagtcgcaagcgggcatctccaggaatcagctacatccgtgcagaccgccctgctgaaccgcctcgagcggatctttgaggcctgctttccaagtattctggtccccgacgccgaagaggaggttacctccctgaagcatcttctggagaccagcaccctgcccattaagacccgcgaggccctgccggagagcggagaactgctcgacgtatggacagagctccaggacattcatgacgcccacggcctgagataccaatggggaggctcacacagcaataagaagctcctgtcttccttgggcatagatacccgtaacattcttttcactgggaacaaaaagcaaccagtcatcgtgcctatgtacgcagctggcctgggaatgctggaacctacaaaggaaccactgaaaccactctccgcagctgagaaaatcgcgtccatcggccagacagcaactatgtccccagacatgaatacgtgcactagcgatcagttccaggaaagcctacccccagtgcagtttgattggagctctagcggcctgacaaaccctctggacgcctccggaggttctactttgctgaacttggacttcttcggaccggtggatgacagtagctctagctcgagtacaactatcccaggggtcgatcctgaactatatgagctcacaacgtccaaactggagatttccacatctagcttgaaggtgacagacgcatttgcaaggctgatgagcacagtagagaaaacctctacgtcaacgcggaagcccaagcgagaggagcacctgagcgaggaagccataaaggtgattgccggattacccgacttgactttcatgcatgctaaagtactcatgtttccggcaaccctgactccctctacttcgtcgcaggaaaaagctgacgggtag

SEQ ID NO: 27352 - DNA, 2730 bp, synthetic construct
  source 1..2730: mol_type = other DNA; note = Synthetic coding sequence
atggagcctgatatcattaggatgtatagttcttcacccccacccttggataacggggctgaagacgatgacgatgatgaatttggcgagtttggtggtttttccgaagtctcgcccagcggtgttggcttcgtcgatttcgacacaccggactataccagaccgaaggaagaattcgttccatcaaatcactttatgcccattcatgagttttctgagaacgtggattcattgacaagcttcaaatccataaaaaatggtaatgacaaagacatcaccgcagaactgtccgccccagtgaaggggcaatcagatgttcttctgagcaccacgtcgaaagagataatctcttctgagatgctggctacaagcattgatggcatggagcggccaggtaacctaaacaaggtcgttgagcagagacagaatgttggaactttagagtctttctcccccggagacttccgaactaacatgaatgttgttcaccaaaataagcagctagagagctgcaacggcgaaaaaccgccatgtctcgagatcctgactaatggctttgccgtgctcgaaaccgtgaacccccaaggtacagacgacctggataacgtcgccgatagtaagggacgcaagccgctcagcacgcacagtacagagtataacctggactctgttccaagccccgctgaggaattcgccgattttgccacattcagtaaaaaggaacggattcagctggaggaaatcgagtgcgctgtgctaaatgaccgggaggcactgaccatccgcgaaaacaacaagatcaatcgggtgaatgagttgaatagcgtgaaagaggtcgctctcgggaggagtctcgataataaaggtgacacggatggcgaggaccaggtgtgtgtgtccgaaataagcatcgtcacaaacagagggttttctgtggagaaacagggactgccaaccttgcaacaggatgaattcttacagagtggggtgcagtctaaagcatggagcctggtcgattcagctgataattcggaggcgattaggagggaacagtgcaaaacagaagaaaagttggatctcctaacctccaagtgcgctcacctatgcatggattcagtgaaaacctcagacgatgaagtgggatctccgaaagaagagtcaaggaagttcactaactttcagtcacctaacatcgatcccaccgaagagaatgatctggatgattccctgagtgtcaaaaatggcgattccagtaacgatttcgttacatgcaatgatatcaacgaagatgattttggcgattttggcgactttggtagcgcctccggaagcactcccccatttgtaaccgggacccaggactctatgtccgacgctacctttgaggaaagctctgagcactttccacatttcagcgaacccggagacgattttggggaattcggcgacattaatgcagtgtcatgtcaggaagaaactattctgactaagagcgacctgaagcaaacttcagacaatctctctgaagaatgccagctggccagaaaatcgagcggcacagggacggaaccagtggccaaactgaagaatggccaggagggggagataggtcatttcgattctgttccgaacatccaggatgattgcaacgggtttcaggactcagacgactttgctgacttttccagtgctggcccatctcaagtagtggactggaatgccttcgaggacgaacagaaggattcctgctcctgggctgctttcggcgatcagcaagccacagagtctcatcatcgtaaagaggcgtggcaatctcacaggactgacgagaacatagatactcccggaactccgaaaactcatagcgtgccctcggccacctcgaagggggctgtagcatccgggcacctgcaagagagcgcgacaagtgtgcagaccgccctgctcaaccggttagagcgaattttcgaggcatgctttccgagcattctggtgccagacgccgaagaggaggttacctccttaaagcacttactggagacaagcacactgcccatcaagacgagggaggctcttccagagtcaggtgagctgctggatgtctggactgaacttcaggacattcatgacgcccatggcctgcggtaccagtggggtgggtcccactctaataaaaagctattgtcctccctgggcattgatactagaaacatcttgttcactggtaacaaaaaacagccagtaatcgtgcccatgtacgcagccggtttggggatgttggagcctactaaagaaccactaaaaccactctccgccgcagaaaaaatcgcctcgatcggtcaaacagctactatgtccccggatatgaacacttgcacctccgatcagttccaagagtccctgccacccgtgcaattcgactggtcttcgagtgggctgaccaacccacttgacggggtggaccctgaactttacgagctgactacatctaagctggaaatttcaacatcctctctcaaggtgactgatgcctttgcgagactgatgagtacagtagaaaagacatcaacttcgacctcaagaaagcccaagagggaggagcatctctctgaggaggcgatcaaagtcattgccggacttcccgacctcactttcatgcatgcaaaagtactgatgttccccgctaccctcacaccgagcacgtcgtcccaggagaaggctgacggctag

SEQ ID NO: 27353 - DNA, 306 bp, synthetic construct
  source 1..306: mol_type = other DNA; note = Synthetic coding sequence
atggtgtgcgaaaagtgcgaaaaaaagctgggtaccgtgatcacacctgatacttggaaggacggggcacggaataccaccgagtctggcggacgcaaacttaatgaaaataaagcactgacatcaaaaaaggcaagatttgatccgtacggcaagaataagtttagtacctgtcggatctgcaaaagtagtgtccatcagcccggttcacattactgccagggatgcgcttataaaaagggaatttgtgcgatgtgtgggaagaaagtgctggacacgaaaaattataagcagacttctgtctag

SEQ ID NO: 27354 - DNA, 1467 bp, synthetic construct
  source 1..1467: mol_type = other DNA; note = Synthetic coding sequence
atgaattttactcccacccacaccccggtttgtaggaagcgcacagttgttagtaaacgtggagtggccgtctcaggaccaacaaagagacggggaatggccgacagcctggagagtacccctctcccttctccagaagataggcttgctaagctgcacccgtcaaaggagctgctggaatactatcagaagaaaatggccgagtgcgaggctgaaaacgaagacctgctgaaaaaactcgagttatacaaggaagcatgcgaaggccagcacaagctggaatgtgatctgcaacagagagaggaggagatcgccgagttacagaaagccctctcagacatgcaggtatgtctattccaggagagggaacacgtgctgcgcttgtatagcgaaaatgatcgactccgcatcagggagctcgaggacaagaaaaaaatccagaatctcctggcactggtcggcacagacgctggggaggttacatacttctgcaaagaaccacctcacaaggtgacaattctgcagaagacaatccaggcagtaggagagtgcgagcagtccgagagcagtgcattcaaagctgatcccaagatcagtaaaaggcggccttctagagagaggaaagagtcatcagagcattaccagagggatatccaaaccctgatcctccaggtggaggccctccaggcccagctcggtgagcaaaccaaactgagtcgcgagcagatcgaggggctaattgaagatagacggatccacctggaggagatccaggtccagcatcaacgaaatcagaacaagattaaggaactaacaaagaatctgcaccatacccaagagttactctacgaaagcacaaaagatttcttacagctcaggagtgagaatcagaataaggagaaaagttggatgctggaaaaggataacctcatgtccaaaattaaacagtacagagttcagtgcaagaagaaggaggacaaaattggaaaggttctgcccgtgatgcacgagtcccatcatgcccaaagtgagtatattaagagcctcaaggataaactcgtgcaagaaaaaaaactgtctaatatgtaccaggagcagtgcataagtctcgaagaagaactggcaagaatccgtgaagaagaagggatgaggcgggagattttcaaagaccggactaacaaaatggggaagcgtttgcagatcatgacgaaacgctatgaagcactagaaaggaggcgaattctggaagtggaaggtttcaagaccgacatcaaagtgcttcggcagaagctgaaagacctggagcagatgttgtataaggctaccgttaacgccagggcaaatcaggatttggctctgctgtgcgaggtgagggatagcaacaggagggcccataagatacaaggagaacttaagaacctgaaatctaaggtgtttgggcttgaaaatgagctcagattgtgctag

SEQ ID NO: 27355 - DNA, 258 bp, synthetic construct
  source 1..258: mol_type = other DNA; note = Synthetic coding sequence
atgtcaaaggttagcttcaaaatcaccctgacttctgatcctagactgccatataaggttctgagtgttccagagtccacaccctttaccgccgtgctgaagtttgcagcggaagagttcaaagttcctgccgctactagtgctatcataacaaatgacgggatcggcattaatccggctcaaacagcaggaaacgtgttcctgaagcatggcagcgagctgcggattattccacgcgaccgggttggctcatgctag

SEQ ID NO: 27356 - DNA, 585 bp, synthetic construct
  source 1..585: mol_type = other DNA; note = Synthetic coding sequence
atggatgaagacggcctcccactcatgggcagcgggatagacctgacgaaagtcccggctattcaacaaaagagaactgtagcctttctcaatcaatttgtagtacacaccgtccagttcctaaataggttttccacagtctgtgaggagaaactggcagacctgtccctcagaatccagcagatcgagactacattaaacatcctggatgctaaactaagttcaattccgggactcgacgatgtaaccgtcgaagtctccccccttaacgtgaccagtgtgactaacggggctcaccccgaggccacttcagagcagcctcaacaaaatagtactcaagattctgggctgcaggaaagtgaagtgagtgccgagaatatcttaacagtcgccaaagaccctaggtacgccagatacctgaagatggtgcaggtcggcgtgccggttatggccatacggaacaagatgatctctgaaggccttgatcctgatcttctcgagcggccagatgctccagtccccgacggggagagtgaaaagacagtcgaagagtctagtgactctgagtcttcatttagtgattag

SEQ ID NO: 27357 - DNA, 2226 bp, synthetic construct
  source 1..2226: mol_type = other DNA; note = Synthetic coding sequence
atgggccctccaggaccagcattgcccgcaactatgaataattcttccagtgaaactcgaggacatccccactccgcctcttctccctccgaacgggtttttcctatgcccctgccaaggaaagctcctctcaatatccctggcacgccagttttagaggacttcccgcagaatgatgatgaaaaagagagacttcagaggaggcgttcaagggtgttcgatctgcagttctcaaccgactctcctcgactgctggcctcacccagctcccggagcatagatatctccgccactataccaaagttcacaaacacccagatcactgaacattattcgacctgtattaaactctcgactgaaaataaaatcactaccaagaatgctttcggactgcacctgatcgattttatgagtgagatcctaaagcagaaggacactgaacccaccaacttcaaggtcgctgcgggaaccctggatgcctccacaaaaatttacgcagttcgggttgacgctgtccacgccgacgtgtatcgcgtgctcggcggactaggtaaggacgctccttcattagaagaggtcgagggccacgtggcagacggatctgcaacagaaatgggcacgaccaagaaggccgtcaagcctaagaagaagcatctgcaccggaccatcgagcagaacattaacaacctgaatgtgtctgaggctgatcgcaaatgtgagattgatccaatgtttcagaagacagcagcaagctttgacgagtgctccacagcaggcgtgttcttaagcacactgcattgccaggattataggtctgaactgcttttcccatctgacgtccagacactgtctaccggcgagccactagagcttcctgaactgggatgcgttgagatgaccgacctcaaggctcctctgcagcagtgcgcagaggatagacagatatgcccctcacttgcgggttttcagtttacccagtgggatagcgaaacccacaacgagtccgtctccgctctggtagacaaattcaagaagaacgaccaggtctttgacattaacgcagaagtggacgagtctgactgtggagacttcccggatgggagcttgggggacgatttcgacgccaacgacgagcccgatcatacggcagtcggggaccatgaggaatttcggtcatggaaggaaccctgccaggttcaatcctgtcaggaagaaatgatatccctcggggacggggacatcaggactatgtgccctttgctctcaatgaaacctggcgaatacagctatttctcaccccgaacaatgtccatgtgggctgggccagatcactggagattcaggcccaggagaaaacaagacgcgccatcccagagcgagaacaaaaaaaaatccacaaagaaggacttcgaaattgacttcgaagatgacatcgattttgatgtgtactttcgcaaaacaaaggctgccaccatcttgaccaaaagtacattggagaaccagaattggcgtgctaccacacttcccactgactttaattacaacgtggatacattggtgcagctgcaccttaaaccaggcacccgcttactgaaaatggctcagggacatagagtcgagacagaacattacgaggaaattgaggattatgactataataaccccaatgacacttcaaacttctgcccaggcctgcaggccgcagattcggacgatgaggatctggatgacctgtttgttggcccagtcggcaacagcgatctctcaccgtacccttgccacccacctaaaaccgctcagcaaaacggagacacacctgaggctcaaggtctggacattacaacctatggagaaagcaacctggtggcggagccccaaaaggtgaacaagattgagatacactacgcgaaaaccgcaaagaagatggacatgaaaaaactcaagcaaagcatgtggagccttctcaccgcactgtctgggaaagaagccgatgcggaggccaaccaccgcgaggcgggaaaggaagcagcattagcagaggtcgccgatgaaaagatgctgtctggtctgactaaagacctgcagcgttccctgcctccggttatggcgcaaaatctgtcaatccctttagctttcgcctgcctactacaccttgccaatgaaaagaacctaaaattagaaggtaccgaagatctgtctgatgtactggtgaggcagggggattag

SEQ ID NO: 27358 - DNA, 510 bp, synthetic construct
  source 1..510: mol_type = other DNA; note = Synthetic coding sequence
atgaaaggcagtcggattgaactgggcgatgtgaccccacacaacatcaagcagctcaaaagactaaatcaggtgattttcccagtgagttataatgacaaattctacaaggatgtgcttgaggtgggcgagctcgcgaagttggcatacttcaatgacatagcggtgggggctgtttgttgccgagtcgatcattctcaaaaccagaaaagactctatattatgaccttaggttgtttggcaccctatcggcgattgggtattggaactaaaatgctgaatcatgtgctcaacatttgtgagaaagacgggactttcgacaacatctatctgcacgttcaaatttcgaacgagtctgccattgatttttaccgtaagttcggttttgagatcattgaaactaaaaagaattattataagcgaattgaacccgcagacgcgcacgtgctacaaaagaaccttaaggtgccgtccggccaaaatgccgacgttcaaaaaacagataattag

SEQ ID NO: 27359 - DNA, 1245 bp, synthetic construct
  source 1..1245: mol_type = other DNA; note = Synthetic coding sequence
atggcagccgcacctcctagttactgcttcgtggcgttcccgccacgcgctaaggatggcctggtggtcttcggtaagaactcagcacgtccacgcgacgaagtccaggaagttgtgtatttttccgccgcagatcatgaacccgagtcgaaagttgaatgcacttatattagtattgaccaggtcccaagaacttacgcaataatgatttcacggccagcctggttgtggggggctgaaatgggcgctaatgagcatggcgtctgcatagccaatgaagcgataaacacccgggaacctgcagctgaaatcgaggctttgctgggaatggatctcgtccgcctcggcctggaaaggggagagactgccaaggaagcattggatgttatcgtgtccctcctggaggagcatgggcaggggggtaactattttgaggacgcaaatagctgtcattcttttcagtcagcatatctgattgttgacagggatgaggcctgggtgcttgaaactataggcaaatattgggcagctgagaaggtgacggagggcgtgaggtgtatttgttcccaacttagcctgaccacaaaaatggatgccgagcatcccgagctgcggtcctatgcacagtcacagggttggtggaccggggaaggagagttcaacttttcagaggtgttctccccagttgaggaccacctggattgtggtgctggcaaagactccttggagaagcaggaggaaagcatcacagtccagaccatgatgaatactctccgcgataaggcatccggtgtgtgcattgattcagagttcttccttactactgctagcggcgtgtccgtgttaccccagaatcggtcttcaccttgcatccactactttactggcactccagatccaagccggtctattttcaagccttttattttcgtggatgacgtgaaattggtgccgaaaacgcaatctccctgtttcggagatgatgatccggcaaagaaggaaccacgattccaagaaaagccagacagaaggcacgagctctacaaggcccacgagtgggcccgagccattattgaatctgaccaggaacaaggcaggaaattgagaagcactatgctggagcttgaaaagcaggggctggaggccatggaggagattctgacctcatctgagccactggacccagcggaagtgggggacctgttctatgattgtgtcgatactgaaattaagttctttaaatag

SEQ ID NO: 27360 - DNA, 2031 bp, synthetic construct
  source 1..2031: mol_type = other DNA; note = Synthetic coding sequence
atgtcggatcagatcaaatttataatggactctttaaataaggaaccctttcgtaagaactacaatcttatcaccttcgattcactggaacctatgcagctgttacaagtgctgagtgatgtgctagcagaaattgatcctaaacagctcgtggacatcagggaagagatgcccgaacagactgcaaagaggatgctctcactcctgggcatcttaaaatataaacctagtggcaatgcgaccgacatgagtacctttagacaaggacttgtaattgggagcaagcctgtgatatatcccgtactgcactggctgttacagcggaccaacgaacttaagaaacgagcctacttggcccgtttcctcattaaacttgaagttccaagcgagttcctgcaggacgaaactgtggctgatacaaataagcagtatgaggagcttatggaagcgttcaaaacgctccacaaggagtacgagcagctgaagataagcggcttctccaccgcagagataagaaaagatatttcagcaatggaggaggagaaagaccagctcatcaaaagagtcgaacatctgaaaaagcgggtcgagacggcgcagaatcaccagtggatgttaaagatagccagacagctgcgggtcgaaaaagagcgagaagaatacctggcccagcagaagcaggagcagaaaaatcaacttttccacgccgtacaacgcctacaaagagtgcagaatcagctgaaatccatgcgccaggcagccgcagacgcaaaacctgagagcctcatgaagcggttggaagaagagataaagtttaacttgtatatggtcaccgaaaaatttcccaaggagcttgaaaataagaagaaagagttgcactttctgcagaaagtggtgtctgaacctgccatgggccatagtgacctgttggaactggagtctaaaattaacgagatcaacaccgagattaaccaattgatagagaaaaagatgatgcgcaatgagccgatagaggggaagctgtcactttataggcagcaggcaagcattatatcccgcaaaaaggaagccaaggcagaggagctgcaagaggctaaggagaaactcgcgagtcttgagagagaggcgtctgtcaagaggaaccagaccagggagttcgacggcaccgaggtgctcaaaggagatgaatttaagcgctacgtaaacaaactgaggagcaaaagcaccgtctttaaaaagaagcaccagataatcgccgaattgaaagccgaattcggtctgctccaaagaacagaggagctactgaagcagagacacgagaacattcaacagcaactacagaccatggaggagaagaaggggatctccggctactcttacactcaagaagagctggagagagtgagcgcactgaaaagcgaagtggatgaaatgaaaggccgaactttggacgacatgtctgagatggtgaagaagctgtacagtctggtcagcgagaagaaaagcgctcttgcctcagttatcaaggagcttcggcaactccgccaaaaataccaggaactcacacaggaatgtgacgagaagaaaagccagtacgattcgtgcgctgcaggactggagtctaatcgcagcaaattagaacaggaggtgcgaaggctgcgagaggaatgcttgcaggaggagtcccgctatcattacaccaactgtatgattaagaacctcgaggtgcaactgcggagggcaactgacgaaatgaaagcctatatctcctctgatcagcaggaaaagaggaaggctattagggaacagtacacaaaaaacaccgcagaacaggagaacttaggcaaaaagttgcgagaaaagcagaaagtgatccgcgagtctcacgggcctaacatgaaacaagccaaaatgtggagggacctcgagcaactgatggaatgcaaaaagcaatgttttctaaaacagcaatcacagaccagcatcggacaggtcatccaggagggcggtgaagatcggctgattctgtag

SEQ ID NO: 27361 - DNA, 948 bp, synthetic construct
  source 1..948: mol_type = other DNA; note = Synthetic coding sequence
atggctttcccagagccaaagcctagaccaccggagctcccacagaaaagacttaaaaccctggattgtggacaaggagcagtgcgggctgtcagattcaatgtggacggcaattactgccttacatgcggctctgacaagactttgaaactgtggaatcctctgcgcggtactctgctgcgcacctactccggacacggatatgaggtattggacgcagccggaagctttgacaattctagcctgtgtagcggtggaggtgataaggctgtggttctctgggatgtagcatcaggtcaggtggttaggaaatttagaggacatgccggtaaggtgaatacagttcagttcaacgaggaagctaccgtaatattgagtggtagtatcgatagcagcatccgctgctgggactgtcgatcaaggagacccgaaccagtgcagacattagatgaggccagggacggagtgagctcggtgaaagtgagtgaccacgagattcttgcaggatccgtggatgggcgagtcaggagatacgatttgcgcatgggtcagctgttctcagactatgtgggaagcccaatcacatgtacgtgtttctcaagggatggtcagtgcacactggtctcatcgctcgacagtaccctgcgacttctggataaggataccggcgagcttctcggcgagtataagggccataaaaaccaggagtataagctcgactgctgcctttccgaacgcgacacccatgtggtctcttgctccgaagacggtaaagtgttcttttgggacctggtggaaggagctctcgctcttgcactccctgtcggttctggtgtggtgcagtccctagcctatcaccctacggagccctgcctgctgaccgccatgggcggaagtgtccaatgttggcgggaggaggcttacgaagccgaagatggcgcaggatag

SEQ ID NO: 27362 - DNA, 1803 bp, synthetic construct
  source 1..1803: mol_type = other DNA; note = Synthetic coding sequence
atggttcttatcctgggtaggcgcctgaacagagaggacctgggggtcagagatagccctgccacaaaaaggaaggttttcgaaatggatcctaaatctctaacggggcacgagttctttgacttttccagtggctcttctcatgcggaaaacatcctgcagatatttaacgagttccgggacagcaggctgtttacagatgtcatcatctgcgttgaaggcaaagagttcccttgtcatcgcgcagtcctgtccgcatgcagcagctattttcgcgctatgttctgtaacgatcacagggaatccagagaaatgctggtagaaattaacggaattttagctgaggcgatggaatgtttcttgcagtatgtgtacaccgggaaggtaaagatcactacagaaaatgtccagtaccttttcgaaaccagttccctgttccagatcagtgtgctgagagacgcctgtgccaaatttttggaagagcagctagacccctgtaattgcctgggaatccaacgctttgccgatactcacagcttgaagacactcttcacaaaatgtaagaatttcgccctgcaaacttttgaagatgtcagccagcacgaagagttcctcgaactcgacaaagacgagctgatcgattatatatgctcagacgagttagtgatcggaaaggaggaaatggttttcgaggccgtgatgcgctgggtgtatcgagcagtggacctgcggaggcccctgctgcacgaactcttaacgcacgtgagattacctttactgcatcctaattactttgtccagacagtcgaagtggaccagttaatccagaattctcctgagtgttaccaactgttgcatgaagctagacggtatcatattttgggtaatgaaatgatgagccctagaacccggcctcgccgtagcacaggatactcagaggttattgtggtggtcgggggttgcgaacgcgtgggtgggtttaatctgccctataccgaatgttacgacccagtgaccggcgaatggaagtcccttgcgaagctgccagagttcacaaagagtgaatacgccgtctgcgcccttcgaaacgatatcttagtctccggtggccgaatcaattccagagacgtctggatttacaactcacagttgaacatttggatacgagtagcaagcctgaacaagggccgatggaggcataaaatggctgtgctcttgggaaaggtctatgttgtgggaggttacgacggtcagaatcggttgagctccgtggaatgctacgattcgttttcaaacaggtggacagaggtggcccctctcaaggaagccgtgtcatcaccagctgtgacgagttgcgtagggaagttgttcgttattgggggtggtcccgatgacaacacatgtagtgacaaagtgcagtcgtatgaccctgaaactaattcatggctcctacgcgctgccatccctattgctaagcgctgtattacagcggtaagtctgaataatctcatttatgtagcaggcggtctcactaaagcgatctattgctacgatcccgtggaggattactggatgcatgtgcagaatacattttccaggcaggaaaattgcgggatgagtgtctgtaacgggaaaatctacattctcggaggcaggagggagaacggggaagcgactgacaccattctctgctatgatcctgcaacttccattatcacaggggtagcagctatgccgagacccgtgagttaccacgggtgtgttacaatacatcggtataatgaaaagtgttttaagctgtag

SEQ ID NO: 27363 - DNA, 810 bp, synthetic construct
  source 1..810: mol_type = other DNA; note = Synthetic coding sequence
atgaaccaagaggatctggatccagactctacaaccgatgtgggcgacgtgaccaatacggaagaggagctaatccgggagtgcgaagagatgtggaaggacatggaggaatgtcagaacaaactgagcctcatcgggaccgaaacccttaccgactctaacgctcagctcagccttctgataatgcaggtgaaatgcctcaccgcagaactgagccagtggcagaaaaagacaccagagaccattccactaactgaggacgttctgatcactctgggcaaggaagaattccagaagctccgccaggatttagagatggtactctctaccaaagaatcaaagaatgagaagctgaaggaggatttggagcgggaacagagatggctcgatgagcagcaacagatcatggagtctctgaacgtgctccatagcgagctaaagaataaggtggagacatttagtgagtctcgaatttttaatgagctgaagacaaagatgttaaatatcaaggagtacaaggagaaattgctgtctacccttggggaattccttgaagatcactttcctctcccagacagaagtgtgaagaaaaaaaaaaaaaatatccaggaatcgtccgtcaacctgatcacactgcacgaaatgttggaaatccttatcaataggcttttcgacgtccctcacgatccatatgtgaagattagcgacagcttctggcccccttatgtagagctgcttttgcggaatggaatcgccttacgccaccctgaagaccccacccggatcaggctggaggcctttcaccagtag

SEQ ID NO: 27364 - DNA, 1041 bp, synthetic construct
  source 1..1041: mol_type = other DNA; note = Synthetic coding sequence
atgtgtgaagggccatccagaatttccgggcctatcccaccagaccctacattatgcccagataattataggaggccaacatccgcccagggtagactggaggggaatgcattaaaactggacctgctaacttcagatcgcgcactggatacaacagcaccacggggtccctgcatcgggcctggagctggcgagattctagaacgcggacagcggggagtcggagacgtgctattgcaactggagggtatatcattaggccctggggcatcccttaagcggaaggaccccaaggatcacgaaaaagaaaatttgagacggatcagagagattcagaaacggtttcgcgagcaagaaaggtctagggagcaaggccagccacggcctctcaaggcgttatggcggagcccgaagtatgacaaggttgaaagtagggtcaaggcacagctccaggaacccggaccagcttctgggactgaatctgcccatttcctgcgtgcacattctaggtgtggtcctgggttacctccccctcacgttagcagtccacagccgaccccccctggaccagaagcaaaggaaccaggactgggagtggacttcatcagacacaatgctagggccgctaaacgagcccctaggagacactcgtgcagtctgcaggtgctggctcaggtcctggaacagcagaggcaggctcaggagcactacaacgccacccagaaggggcacgttccacattacctgttagagcggcgagacctctggcgaagggaggcagaggctagaaagcagtcacaaccagaccccgctatgcccccagggcatacacgtatgccagagaaccagcgacttgaaactctgacaaaactcctgcagagccagagccagctgctccgcgaattagttctgctgcccgcaggagccgatagtctccgcgcacaatcccaccgggcagagctggatcgcaaactggtccaggttgaggaggcaatcaagatattctcccgccctaaggtgttcgtgaaaatggacgattag

SEQ ID NO: 27365 - DNA, 1824 bp, synthetic construct
  source 1..1824: mol_type = other DNA; note = Synthetic coding sequence
atggccgctaatgtattcccctttcgggacgctagagctgctcccgatcccgtcttggaagccggaccggtagctcatggacccctcccagtgccgctcgttctcgataatgggtcattccaggtacgggctggttgggcctgtccgggtcaagatccaggacctgaacctagattgcagtttcgagccgtgtgtgcacgcggtcggggaggggctcgcggagccagcgggcctcaggtgggtaatgctctcggaagtcttgagcccctaagatggatgctgcgtagtccttttgaccgcaacgtccccgtcaatttggaactccaagagctgctgttggattactcattccaacacctaggggtttccagccagggatgtgtggatcacccgatcgtgctcaccgaagccgtgtgtaaccccctttactctcggcagatgatgtcagagctgctcttcgagtgctatggcatccccaaggttgcctacgggatagattctctcttcagtttctaccacaacaagcccaagaactcgatgtgtagcggcctcataattagctcagggtaccagtgcacccatgttctgcccattctggagggcagactggacgcgaagaactgtaagagaataaacttaggaggttcccaggccgctggctaccttcagcgtttactgcaactgaagtatcccggacacctggccgctataacactttcacgcatggaggagatcttgcatgaacacagttacatcgccgaagactacgtggaggagcttcacaaatggcgatgccctgattactatgaaaacaatgtgcataaaatgcaacttccgttttcatccaagttgttggggagcacactcacatctgaggagaaacaggagcgacgccaacagcagctccggcgactccaggagctaaatgcaagacgccgtgaggagaagttgcagctagatcaggaaagacttgataggctgctctacgttcaggagttgctcgaggacggtcagatggatcagttccataaagccctgattgagttaaatatggacagccctgaggagctccagtcatatatacagaagctgtctatcgccgtggagcaagccaagcagaaaatcttacaggcagaggtgaacctggaggtcgacgtggtcgactccaaaccagagaccccagacctagaacagctggaacccagcctcgaagacgttgaatctatgaatgactttgatcctctgttttcggaggagaccccgggagtggagaaacctgtcaccaccgtgcagcctgttttcaacctggccgcataccaccagttgttcgttgggacggaaaggattagagcccctgagatcatcttccagccctctttgatcggcgaggagcaggccggaatcgccgagacgctccagtacatcctggatcggtacccaaaagacatacaagagatgctcgttcaaaacgtgtttctgacagggggaaacacaatgtaccctgggatgaaggcacggatggagaaagaacttctggaaatgaggccgttcagatcttccttccaggtgcagctcgcctccaaccccgtgttagacgcctggtacggcgcaagagattgggcgttgaaccacctcgacgacaacgaggtgtggatcacacgcaaggagtatgaggagaagggaggcgagtacttgaaggaacattgtgcttccaacatctacgtaccaatcagacttcccaaacaagcgagcaggagtagcgacgcacaggcaagctctaagggtagcgcagccggaggaggtggcgctggcgaacaggcttag

SEQ ID NO: 27366 - DNA, 1383 bp, synthetic construct
  source 1..1383: mol_type = other DNA; note = Synthetic coding sequence
atggcctcgagggaggaggttctggccctacaggctgaggtggcgcaacgtgaagaggagctgaattccctgaagcagaaactggcttcagcgctgctggccgaacaggagccccaacccgaacgcctcgtgcccgtatcccctcttccacccaaggcagccctttcaagagacgagatcctgcgctactctcgacagctggttctcccagagcttggtgtgcatggccagttaagattaggcactgcttgcgtgctgatagtcggctgtggcggtctggggtgtcctctggcccagtaccttgctgctgcaggcgttgggcgtcttggactcgtggactatgatgtcgtggaaatgagtaacttagccagacaggttctccacggggaggctctggctggccaggccaaggctttttcagcggcagcttcgctgcgcagactcaatagtgctgtagagtgtgtcccctatacacaggctctgacccctgcaactgcgttggacttggtccgccgttacgacgtcgtcgccgattgctccgataatgtccccacccgatacctggtgaacgatgcctgcgtgctggccggaagaccgcttgtgtccgcttctgcgctacggttcgaaggacagattacggtgtaccactatgatgggggaccgtgttaccgctgtatttttccccaaccccctcccgcagagacggtgaccaattgtgccgacggcggagtgttgggagttgtgaccggcgtgttgggatgccttcaagccctcgaagttctgaagattgcggcaggccttggtccttcctactccggaagcttgctcctcttcgacgcactcagaggccacttccggtctatacggctgcggtctagaagactggattgtgctgcctgtggagagcggcctaccgtgacggacctgttggattatgaagccttttgtggctccagtgccacggacaaatgtcggagtttgcagctgctttcaccggaagaacgcgtctccgttacggactacaagcggctccttgactccggagcttttcacctacttcttgatgtgcgccctcaggttgaggtggatatatgcagactgccccacgccttacatattcccttgaagcacctcgagagaagagatgcagagtctctcaaactgttaaaggaggccatatgggaggagaaacaaggtacccaggagggtgcagcggtccccatatatgtaatctgtaagcttggtaatgattcacaaaaggctgtgaagatcctgcagagcctgtccgccgcacaggagctggacccccttaccgtaagggacgttgtgggcggattgatggcctgggctgcaaagatcgatggcacattcccacaatactag

SEQ ID NO: 27367 - DNA, 1041 bp, synthetic construct
  source 1..1041: mol_type = other DNA; note = Synthetic coding sequence
atggaatctgtctcgtgcagtgctgctgccgtgaggactggcgacatggagtcacagcgggatctttccctagttcccgaaagactccagaggagagagcaggagcggcagctcgaggttgaacgcaggaagcagaagaggcagaaccaggaagtcgagaaagaaaacagccattttttcgtggccacattcgtgcgtgagcgggcagctgtcgaggaactgctggagagggctgagtccgtggaaagattggaggaagctgcctctcggctccaggggctacagaaactgatcaatgattcagtctttttcctcgccgcttacgatttgcggcaggggcaggaagccctggcgaggcttcaggccgctttagcggaacgtcgtaggggactccagccaaagaagagatttgcatttaaaacaagggggaaagacgctgcttccagcaccaaggtggacgccgctccaggcattcctccagccgtcgagtccattcaggattcacccttgcctaagaaggcagagggtgacctcggtccctcttgggtctgcgggttctcgaatctggagtcacaggtgcttgagaagagagcgtcggaactgcatcagcgggacgtactcctgactgagctgtctaattgcaccgtgcgtctgtacggaaacccgaatactctccgtctaactaaagctcactcctgtaaacttttatgcgggcctgtcagcactagtgtgtttctggaggactgctcagattgtgtgctcgccgttgcctgccaacagttaagaatccacagcaccaaagatacccgcattttcctgcaggtgactagtcgggcaattgttgaggactgttctggcatccagttcgctccctacacatggagctatcctgagatcgataaggattttgaatcctccggtctcgacaggtctaaaaacaattggaacgacgtagatgattttaattggctggccagagacatggccagccccaactggagcattttacccgaagaagaaagaaatatccagtgggattag

SEQ ID NO: 27368 - DNA, 747 bp, synthetic construct
  source 1..747: mol_type = other DNA; note = Synthetic coding sequence
atgacgcctaagggtccggcaatgtgtagtatgccactcacttcagccgactgtttcagcaacgatattcataagctagatacatctactatgacctggactctaatctgcacgaaggggagcccagcccgatggagggattttcactctgctaccatgctggggtctcacatgtatgtgtttggcggacgcgcagaccggtttggcccatttcactccaataatgagatttactgcaaccgaatccgcgtcttcgacacaaggaccgaggcatggctggactgtccgcctacacccgtgctcccagagggccgtcggagccacagcgcgttcggctacaacggagaactgtacatattcggcggatacaatgcacgactgaatagacactttcacgatctctggaagttcaaccctgtgtcctttacgtggaaaaaaatagaaccaaagggcaaaggtccttgtccacgcaggcgacagtgctgctgtatcgtgggggataagatcgtcctgttcggcggtactagtccctccccagaggagggactgggggatgagtttgacctgatcgaccattctgacctgcacatcttggacttttcaccttctctgaaaacgctttgtaagttggctgtcattcagtacaatctcgaccagagctgcctgccacatgatatccgctgggagctcaatgccatgacgacaaacagcaatatctctaggcctatagtcagctctcacggttag

SEQ ID NO: 27369 - DNA, 1401 bp, synthetic construct
  source 1..1401: mol_type = other DNA; note = Synthetic coding sequence
atggagtacgaatcatattatttcgtgaaattccagaaatatcccaaaatcgtgaaaaaaagttcagatacggctgaaaataacttgccccagagaagcagaggaaaaaccaggcgaatgatgaacgatagctgtcaaaacttacccaaaataaatcagcagcgcccacgcagcaaaacaactgcaggtaagactggtgatacaaagagtctaaataaagagcaccccaatcaggaggttgtggataacacccggctggaaagcgcaaacttcggacttcacatctctcgcataaggaaagactcaggcgaggaaaacgcccaccccagacggggacaaattatcgactttcagggcctccttacagacgccattaagggcgctaccagcgagctggctctcaatactttcgatcataacccagatccgtccgagcgacttcttaaaccactcagcgcgtttattggaatgaattcagagatgcgcgaacttgctgctgtcgtgagcagagatatctatctgcataatcctaatatcaaatggaacgacatcattggtttagacgccgcaaagcagctggtcaaagaagctgtggtctacccgatcagatacccacaattgttcaccggaattctgtccccctggaagggcctgttattgtacggaccacctggcacgggtaagaccctgctcgctaaggccgtcgccacagagtgcaaaacaacattttttaacatttccgcctcaaccatcgtttccaagtggcggggagattcggaaaagctggtgcgtgtgctgttcgagttagcaagatatcatgcccctagcaccatatttctcgacgaacttgaatctgtgatgtcacagagaggaacagccagtggtggggagcatgaaggctctctgcgcatgaagactgagctgctggtgcaaatggacggcctggccagaagcgaggacctggtcttcgtgcttgcggcatccaatctgccatgggagctggactgtgccatgctgcggcgattagagaaaaggatactcgtagatcttcccagccgcgaggcgcgacaagcaatgatataccactggctgcctcctgtgtccaaatccagagcccttgaactacacacagagctggaatacagcgtgctgtcacaggagacagaaggttattcaggttctgacattaagctggtctgtcgagaggccgctatgcggcctgtgaggaagatcttcgacgccctggagaatcaccagagcgagtcttccgacctgcccaggatccagcttgacattgtgactacagcagactttctcgacgttctgactcataccaagccctccgcaaaaaacttggcacaaaggtactccgattggcagagagagttcgaatcggtttag

SEQ ID NO: 27370 - DNA, 6402 bp, synthetic construct
  source 1..6402: mol_type = other DNA; note = Synthetic coding sequence
atggatgaggtagaacaggaccaacacgaggccagactgaaagagctctttgactcttttgacacaaccggaaccgggagcttgggtcaggaggagttgacagatctctgccacatgctgtctctcgaggaggtcgcccctgttctacagcagacactcctccaggataacctccttggccgagtgcattttgaccagttcaaagaagctctcatactgatactctctcggactctttctaacgaggagcattttcaggagccggactgcagtctcgaggcacaacccaagtatgtgagagggggaaagcgatacggcaggaggagtctacccgagtttcaagagtctgtagaagaattccctgaagtcacagtgattgagccccttgacgaggaagccaggcctagtcatatccccgctggcgactgttcagagcactggaagacccagcgctctgaagagtacgaggctgagggccagctaagattctggaatcctgatgatcttaatgcgagtcagtctgggtctagtcccccacaggattggattgaggagaaactgcaagaggtatgtgaggatctgggcatcacacgcgacggacatttaaaccgcaaaaagctggtttccatttgcgagcagtatggccttcagaacgtggacggcgagatgctggaagaagtgtttcataatcttgatccggatgggacgatgagtgtggaagacttcttttatgggctcttcaagaacggcaagagtctcactccgagcgcctcaacaccctatcgccagcttaagcgtcacctgagcatgcagagttttgatgagtcgggcaggagaaccacaacgtcctctgccatgacctcaacaatcggcttccgggtgttcagttgtttagatgacggaatgggccacgccagcgttgaacgcattctggacacttggcaggaggagggcatcgaaaactcccaggagatccttaaggcccttgatttcagcctggacggaaatattaatctcaccgagctgacattagccttagagaacgaactgctggtaacaaaaaattcaattcaccaggcagccctggccagttttaaagccgaaatcagacacctactagagagagtggatcaggttgttagggagaaggaaaaactaaggtcggatctggataaggccgaaaagttaaaatcgctaatggcgtctgaagtggacgatcaccacgctgccatagaacgccgaaacgagtacaatttgcggaagttggatgaggagtataaagaacggatcgcagcattgaagaacgagctcaggaaggaacgggaacagatactgcagcaagctggaaaacaaaggctggaactggaacaggaaattgagaaggccaaaaccgaggagaactatatcagagaccgacttgcactgagcctgaaagagaactcacgactggagaacgagctgttggagaatgccgaaaagctggcggagtatgagaacttaacaaacaagctgcaaaggaacctggaaaatgtactggcggagaagttcggcgatctcgacccaagcagcgcagagtttttcctgcaggaagagaggttaacccaaatgaggaatgagtacgaacgacagtgtcgggtgctgcaggatcaagttgacgagttgcagtctgaactggaagaatatagggctcaagggcgagtgctcaggctcccactcaaaaattccccaagtgaagaggtggaggcgaatagtgggggtatcgagccagaacatggactgggctcagaggagtgcaatccacttaacatgtccatcgaggcagagctcgttattgagcagatgaaagagcagcatcacagggacatctgttgtctcaggcttgagctggaggataaagtcagacactacgagaagcaacttgatgagacagtcgttagctgtaaaaaagcccaggaaaatatgaagcagagacacgaaaacgaaacacacaccttggaaaaacagatttctgacctgaagaatgagattgccgagctccaagggcaggctgccgtgctgaaggaggcacatcatgaagctacttgtcgacatgaggaagagaagaaacagctccaggtgaaattagaggaagagaaaacacatctccaagagaagctgcgattgcaacatgagatggagctcaaagcgaggctgacacaggctcaggcaagttttgaacgcgaacgcgaaggactgcagtcttcggcctggactgaagagaaggtccgcggtctcacacaggaactcgaacaattccaccaggaacagttgacctccttagtggagaagcatacgctcgagaaggaagagctgcgcaaagaactccttgagaaacatcaacgggagcttcaggaaggacgggagaaaatggaaaccgagtgtaatcgaagaacttctcaaatcgaggcccagtttcaatcagattgtcagaaggtcaccgaacgctgtgaatccgccttgcaatctctggaagggcgataccgacaggagctcaaggacctccaggagcaacagcgcgaggagaagtcccagtgggagtttgaaaaggacgaactgacacaggaatgcgccgaggctcaggagctgctgaaggaaaccctgaagagagaaaagactacctccctagttctgacacaggagcgtgagatgctggagaagacttacaaggagcatctgaattctatggtagttgaacgacagcagctcctgcaggacctagaagacctgaggaacgtgtcagagactcagcagtctctgctatcagatcagatcttagagctgaagagttctcacaaaagggaactgagggaacgggaggaagtgctctgccaggccggagcaagtgaacagctggcgtcgcagcgtttggaacgcttggaaatggagcacgaccaggagcgacaagaaatgatgtcaaagttactagcaatggaaaatatacacaaagctacgtgtgaaacagctgacagggaaagggctgaaatgtcaacagagatttccaggctgcaatctaaaatcaaagagatgcagcaagctacctcccccctgtccatgctccaatcgggctgtcaagtgatcggagaggaggaagtggagggtgacggagccctcagcctgttacaacaaggggagcagttgcttgaagagaatggcgacgtactcttgagcctgcagagagcccacgaacaggcagtcaaagagaatgtgaagatggctaccgagatcagtagactccagcagaggttgcagaagctggaacccggactcgtgatgtcttcatgcctggacgagcctgccacagaattcttcggaaacacagctgaacagactgaacagttcttgcagcagaataggacaaaacaggtcgagggggtgacaaggaggcacgtcttgagcgacttagaagacgacgaagttcgagatctgggttcgactggaacatcttcagtgcaacgccaggaagtgaagatcgaggaatccgaggccagcgtagaggggttcagcgagctcgagaattccgaggaaacacgaaccgaatcatgggaattgaagaaccagattagccagttacaggaacagctgatgatgctgtgtgccgactgcgacagggccagtgagaagaaacaggacttgctgtttgatgtgtccgtgctgaagaaaaaactcaaaatgctggagcgaatccccgaagccagtcctaagtataaactactctacgaagacgtgagccgagaaaacgactgccttcaggaggaactgcgaatgatggagacaagatacgacgaggctctggaaaacaacaaagagctgaccgcagaagtcttccggctgcaggacgagttgaagaaaatggaggaggttaccgagacgttccttagtctggagaagagctatgatgaagtcaaaattgaaaatgaggggctgaatgtcctggtactgcggctgcagggaaaaattgagaaactgcaggagtccgtggttcaaagatgtgattgttgtctgtgggaagccagtctggagaacctggaaatcgagccagacggtaatatcttacaactgaatcagacgctcgaggagtgcgtcccacgagtgagatccgtccaccatgtcatcgaagaatgcaagcaggaaaatcagtacctagaggggaatactcaactgctagagaaagttaaggcacatgaaattgcctggttgcatgggaccattcaaactcaccaggaaaggcctagggttcagaaccaggtaatcctggaagagaatacaactctactaggttttcaagacaaacacttccaacatcaggccactatagcggaactcgagctggaaaagacaaaattgcaagaactgacaaggaaattaaaggaacgcgttaccattctggtgaaacaaaaagatgtactatcccatggagagaaagaagaagaactgaaggcaatgatgcacgacctgcagattacgtgttcagagatgcagcagaaagtcgaactcctgagatacgaatcggaaaagctacagcaggagaattcaattttgcggaatgaaatcactaccctgaatgaagaggattccataagcaaccttaaactgggtacactcaatggcagccaggaggagatgtggcagaaaaccgagacagtaaagcaggagaacgcagccgtccagaagatggtggagaatctaaaaaaacagatctctgaactgaagatcaagaatcagcagttagatctggagaacacggagctgagccagaaaaactcccagaatcaggaaaagcttcaggagctcaaccagcgcctgactgagatgctttgtcagaaagagaaggaacccggaaattctgctttagaagagcgcgaacaggagaagttcaacctcaaggaggagctggagcggtgcaaggtgcagtctagtaccctagtcagctctttagaagctgaattgtccgaggtgaaaattcagacccacatcgtccagcaggaaaatcacctgctcaaagacgagctcgagaaaatgaagcagctgcaccgctgtccagacctgtccgattttcaacagaagatcagtagtgtgttgtcctacaatgagaagctcctgaaggaaaaggaggcattatcagaagagctgaacagctgcgtggataagttagctaagtcatccctgttagagcataggatagcgacaatgaagcaggaacaaaagagctgggaacaccagtcagcttctcttaagtctcagctggtcgcctcccaggagaaggtacagaacctggaggatacagtgcaaaacgtgaacctccagatgtcgagaatgaaatctgacctgagggtcacacaacaagaaaaggaagctcttaaacaagaggttatgagcttacataagcaactgcagaatgccggaggaaagtcgtgggcaccagagattgctacgcacccatcaggacttcacaatcaacagaagcgcctatcttgggataagctggaccacctcatgaatgaagaacagcaactgctgtggcaggaaaatgaacggctccaaaccatggtacagaacactaaggccgagttgactcactccagggaaaaagtacggcagttggagagtaatctgctgccaaaacaccaaaagcacctgaacccttctggaaccatgaatcctacagaacaggaaaaattgagtctcaaaagagaatgcgaccaattccaaaaggaacagtccccagccaaccggaaggtttcgcaaatgaacagcctcgaacaagagctggaaactattcacttggaaaacgagggtctgaaaaaaaagcaggttaaactcgatgagcagctgatggagatgcagcatctgagatcaaccgcaacgcccagcccgagccctcacgcctgggacctgcagcttctgcagcagcaagcctgcccgatggttccacgtgaacagtttctacagttgcagcgacagctgctgcaggctgagcgcatcaatcagcatttacaggaggagctggagaatagaacatccgagaccaatactccccagggtaaccaagaacagctcgtcaccgttatggaggagaggatgatcgaagtcgagcagaaactaaagctcgtgaagagactccttcaggagaaagtgaaccagttaaaggagcagctgtgcaagaacacaaaagcagatgcaatggttaaagatctttacgtggagaacgctcagttgctaaaagcactggaggtcacagagcagcgccaaaagaccgctgaaaaaaaaaactatcttctcgaggaaaagatcgcaagcttgagtaatatcgtccgtaatctgacgccggctcccttgacctctaccccaccccttcggtcttag

SEQ ID NO: 27371 - DNA, 1713 bp, synthetic construct
  source 1..1713: mol_type = other DNA; note = Synthetic coding sequence
atggcaggcggagcacgggaggtcctgacgttacagttgggccacttcgccggatttgtgggggcacattggtggaatcaacaggatgcagccctgggcagagctactgatagcaaggagcctcccggagaattgtgtcctgacgtcctttaccgtacgggtagaacactgcatggacaagagacctacactcccaggctgattctcatggacctgaaggggagcctgagctcattgaaggaggaaggtggactgtaccgagataagcagcttgacgcagccatagcatggcagggaaaactgaccacccacaaggaagagctttacccaaaaaatccctacttacaagatttcctatccgcagaaggtgtgctgtcttccgatggagtctggcgagttaaaagtatccctaacggaaaagggtcgtcaccactgccaacagctacaacccccaagccactgatcccaactgaggcctctataagggtttggagcgatttccttcgcgtccacctgcaccccaggtccatttgcatgattcagaagtacaaccatgatggagaggcaggacggctagaagctttcggacaaggtgagtcggttcttaaggaaccaaaatatcaagaagagctggaggacaggctgcatttttacgtggaggagtgtgattacctgcaaggcttccaaattctgtgcgacctgcacgatggcttcagtggcgttggcgctaaggccgcagagctcctccaggatgagtacagtggtcgcggtattataacctggggcctgctgccgggaccgtatcatcgaggtgaagcccagcgcaacatttaccgactattgaataccgcttttgggttggttcacttgaccgctcactctagcctcgtctgccccttgtccctgggcggtagcctgggattgagaccagagcccccagtgagtttcccctatcttcattacgatgcaactcttccttttcattgcagtgctatactggccactgctttagacacagttacggtaccataccggctgtgtagtagccccgtctctatggtacacctcgctgacatgctgtctttttgtggtaaaaaggtggtaactgcgggagccatcattccgtttccgctcgccccaggccaatctctgcctgatagtctgatgcagtttggcggagctacaccctggactccactgagcgcatgtggcgagccgtcagggactcgctgctttgcccagagtgtggttctccggggaatcgaccgcgcttgtcatacttcacagctcacccccggtactcccccaccgtcagctctccatgcatgcacgaccggcgaggagatactggcccagtatctgcagcagcagcagccaggagtgatgtcatcaagtcacctcttactgactccttgtcgcgtggcccctccatatcctcacctgttttcttcgtgttcccccccaggcatggtgctggacggtagcccaaagggcgcagcagtggaatcaatcccagtgttcggggctctttgcagctcatctagtctccaccaaacactagaggcccttgcaagagacttgacgaaattggatctgcgcaggtgggcgtcttttatggatgccggagtggagcatgacgacgtcgctgagctgctgcaagagctccagtcgctcgcccaatgctaccagggtggtgactccttggtggattag

SEQ ID NO: 27372 - DNA, 1791 bp, synthetic construct
  source 1..1791: mol_type = other DNA; note = Synthetic coding sequence
atgaacaggacctggcccaggagaatctggggaagctcccaggacgaggcagagctgatccgagaggacatccagggggctctgcacaattataggagcggaaggggggaacggcgagcagctgccctccgcgctacgcaggaggagctgcaacgtgaccgatccccggcagctgaaacccccccactgcaacggagaccctccgtgcgcgctgtcatcagcacggtggagcgtggggcaggcagagggcgtccccaagcgaaacctatacccgaagcagaggaagcccagaggcccgaacccgtcggaacaagttctaatgcggactccgcttctcccgatttagggcctagaggacctgatcttgccgtgctgcaggcagagagagaggtcgatatcttgaatcacgtttttgatgatgtggaatcattcgtctcccggctccagaagagcgcagaagctgcaagggtcctggagcatcgtgaaagaggacgtaggagccgacggagggcagcaggtgagggacttctaacactgcgtgcaaagccaccatccgaagctgagtacacagatgtgttacagaaaattaagtatgccttctcccttttggccagactcagaggcaatatcgctgatccgtcttctcctgagctccttcattttctgttcggcccactgcagatgatcgtgaacacatctggagggcctgagtttgcgtcttccgtgaggagaccgcacctcacttccgacgctgtagccctgctcagagataatgttaccccccgagaaaacgagctttggacatcactgggagactcctggaccagacccggactggagctttctcctgaggaggggcctccttataggcctgaatttttctccggctgggaaccacctgtcaccgatcctcagagtagggcctgggaggaccctgtcgagaaacagctgcagcacgagagaaggaggagacaacagagcgctccccaggtcgccgttaacggtcacagggatctggaacccgagtcggaaccgcagctcgagtcagaaacagccggaaaatgggtactttgcaattatgacttccaggccaggaacagcagcgaactgagcgtaaagcagcgagacgtgctcgaggttctcgatgattcacgcaagtggtggaaggtgagagacccagcaggccaggagggctatgtgccctacaatattctcactccataccccggtcccagactgcaccattcccagagccctgcaaggtcattgaacagcacacccccaccgccacccgctccagctccagctccaccccctgccctggccaggcctagatgggatcgccctaggtgggactcttgcgatagcctgaacgggctcgaccctagcgagaaggagaaattttcacagatgctgattgtaaatgaagagctgcaggcacggctcgcccagggacgttctggcccttcgcgagctgtgcctggccctcgcgcacccgagccacagctcagcccaggatcagacgcaagtgaagttcgggcatggttacaagcaaagggattcagctcgggtacagtggatgcactgggcgttctgacaggcgctcagctgttttctctccagaaggaggaactgcgggcagttagtcccgaagaaggggcacgggtgtattctcaagttactgttcagaggagtctgctcgaagacaaagagaaggtgtccgagttagaggccgtaatggagaagcaaaagaaaaaggtagagggagaggtggagatggaggttatctag

SEQ ID NO: 27373 - DNA, 1950 bp, synthetic construct
  source 1..1950: mol_type = other DNA; note = Synthetic coding sequence
atgagcagttttggcgctggcaaaaccaaggaagtgatcttttccgtggaagacgggtctgttaaaatgtttcttagaggtcggcctgttcctatgatgattcctgatgagcttgctcccacgtatagcttagacacacgtagtgaattaccatcctgcaggctcaaactcgagtgggtatacggttaccggggacgcgactgcagagctaatctatatctcctccccaccggagagattgtctacttcgttgccagcgtcgctgtgctttattcagttgaggagcagcgacagcggcactatcttgggcacaatgatgacataaagtgcctagccattcatcccgacatggtgactatcgccactggccaggttgccggaacaacgaaagagggcaagccgttaccacctcatgtacgtatctgggactcagtctccctgtccacactgcacgtgctgggcttaggagtgtttgatcgggctgtctgctgcgtgggcttttcaaaatctaacggaggaaacctgctgtgcgctgtcgacgaaagtaatgaccatatgctatccgtctgggactgggctaaggaaactaaagtagttgacgttaagtgtagcaatgaagcggtgctcgtcgcaacttttcaccccacagacccaacagtcctgattacatgtggcaaatcacatatctatttctggaccttggaggggggatcccttagcaaacgccagggattgtttgagaagcacgaaaaaccaaagtatgttctttgtgtgacatttttagaagggggtgacgttgtcaccggggattccgggggaaacctatacgtgtggggcaagggcggtaatcggatcactcaggcagttctgggcgcacacgacggtggtgtgttcggtttatgtgctctgcgcgacggcaccttagttagcggcggaggcagagaccgccgagtggtgctctggggctccgattattcaaaactgcaagaagtggaggttcccgaagactttggacctgtgcggacagtggctgaagggcacggcgacactctttacgtaggcaccacccgtaatagcattctgcagggatcggtgcataccggattctccctgttagtgcagggtcatgtcgaggaactatggggactggccactcacccgagcagagcacaatttgtgacatgcggccaggacaagctcgtccatttgtggtcatcagacagccaccaacctttgtggagccgtatcatcgaggatcccgcacggtccgccggattccatccctcaggtagtgttctggccgttggaacggttactggcaggtggttgcttttggatactgaaactcatgaccttgtagccatccacaccgacggcaatgagcaaatctctgttgtgtcgttcagcccagatggagcctatctggccgtcggatcccacgacaatctcgtttatgtctacaccgttgatcagggcggtcggaaagtttcccgactcggaaagtgcagcggccactcgagttttattacccacctggactgggcccaggattcatcctgtttcgtcacaaattctggcgactacgaaattctctattgggatcccgcaacctgtaagcagattacgtcagctgacgctgtgcgcaacatggagtgggccacagcgacatgcgtgctggggtttggtgtgtttggcatctggagcgagggtgctgacgggactgatattaatgctgttgcccgatcacatgatggaaagctgctcgcttccgccgacgatttcggcaaggtacacctattttcatatccatgctgtcagcctcgggctttgagccataagtatgggggacatagttcccatgtgaccaacgtggccttcctatgggatgattcaatggccctgaccacaggcggtaaggatacttccgtgctgcagtggcgcgttgtttag

SEQ ID NO: 27374 - DNA, 792 bp, synthetic construct
  source 1..792: mol_type = other DNA; note = Synthetic coding sequence
atggccggactggaagtacttttcgcgagcgccgctcctgccattacatgtagacaggacgcgcttgtgtgtttcctacactgggaagttgtcactcatggttactttggattgggagtgggagaccagcctggaccaaatgacaaaaaatctgaattactgcccgctgggtggaataacaacaaggatctgtatgtgctgcgatacgaatacaaagatgggtcacggaaattattggtgaaagccatcaccgttgaaagctccatgatcctgaatgttctcgagtacggaagccagcaagtagcggacctgacgctgaatttagacgattacatagacgcagaacatcttggcgactttcatcgtacgtacaagaactcagaggaacttcggagtcggattgttagcggaattatcacaccaatacatgagcagtgggagaaagcgaatgttagctccccacatagagagtttcctcccgcaactgctcgggaagtggatcctcttcgtattcctccccatcatccgcacacgagtcggcagcccccatggtgtgatccgctaggaccatttgttgtcggcggagaggatcttgatcctttcggccctcgacgtggtggcatgatcgtagatccacttcgtagcgggtttccacgggctctgatcgacccatcttccggcctcccaaacagattaccaccaggtgctgtgcctcctggtgccagattcgacccctttggacctattggcacaagccctccgggacccagaccagaccgacgcggtcaatag

SEQ ID NO: 27375 - DNA, 273 bp, synthetic construct
  source 1..273: mol_type = other DNA; note = Synthetic coding sequence
atggataacatgtcaccccgactcagagctttcctctcagaacctatcggtgagaaggacgtgtgttgggtggatggaatatcccatgagcttgccatcaatctcgtcacgaaggggataaataaggcttacatcctcttgggtcagttcctcctgatgcataaaaacgaagcagagttccagcgctggctgatttgctgttttggcgcaaccgagtgcgaagcccagcaaacgtcccattgtctcaaagagtggtgcgcctgttttttgtag

SEQ ID NO: 27376 - DNA, 888 bp, synthetic construct
  source 1..888: mol_type = other DNA; note = Synthetic coding sequence
atgccagttcacaccctgtcacctggcgcaccctctgcccctgccttgccatgcagactgcggaccagggttcctggatacctactccggggacccgcagatgggggagctcgcaagccttcagcagttgaacgtttagaggcagacaaggcaaagtatgtgaaaagccttcatgttgccaatacgcggcaagaacccgtacagcccctgctttctaagcagcccctgttcagtccagagacccggcgaacggtgctgacgccttctcgcagagccctccccggaccttgtaggaggccccagctggatcttgacatactctcgtctctgatcgacctttgcgattcccccgtttcacctgctgaagcctccagaaccccaggacgggcagaaggtgccggaaggccacccccagccacaccacctagacctccaccttcaactagtgctgtccgaagagtggacgtccgcccactgccagcatcacctgccagaccttgccccagtcccggacctgccgcagcaagttctcccgctagacccccaggattgcagcggagcaagagcgacctttcagaaaggtttagcagagccgctgccgaccttgagcggttctttaatttttgtggcttggaccccgaggaagccagaggcttgggggtagcgcaccttgctagagcctcctccgacattgtgtctctggctggtccctcagcgggaccagggagctctgaggggggatgctctaggaggtctagtgtgactgttgaggaacgcgctcgggagagggtcccatatggggtgagcgttgtcgaacggaacgcaagagtgatcaaatggctttatgggttgcggcaggcccgagaatcaccagctgcggagggttag

SEQ ID NO: 27377 - DNA, 582 bp, synthetic construct
  source 1..582: mol_type = other DNA; note = Synthetic coding sequence
atgcctactacatcccgtccagctctcgatgttaaaggcggaaccagccctgccaaggaagacgccaaccaggagatgtcatccgttgcttatagtaacctagctgtcaaggataggaaggccgtagccatattgcattaccctggtgttgcttctaatggcaccaaggctagcggcgctccaacttctagttctgggtcccccattgggagtccaacaacgactccgccaacgaagccccctagcttcaacctgcatcctgccccacatctcctggcgagtatgcatcttcagaaactgaattcccagtatcagggaatggccgctgcaactcctgggcagcccggagaagccggtcccctccagaactgggactttggagctcaggccggtggagcggagtctctcagtccgtccgcgggtgctcagtctcccgctataattgattccgaccctgtggatgaggaagttcttatgagcctcgtagttgaattaggcttagaccgcgcaaatgaattgcctgaactgtggttggggcagaatgaatttgactttaccgctgacttcccatcttcctgctag

SEQ ID NO: 27378 - DNA, 1077 bp, synthetic construct
  source 1..1077: mol_type = other DNA; note = Synthetic coding sequence
atggccgctgtgctgaagcctgtgctacttggactgcgagatgccccagtgcacggctcacctacggggcctggtgcctggactgcttcaaagctcggaggcatacccgacgccctccccactgtggctgcgccaagaccagtttgccagcgctgcgggcaacctctggccctggtcgtccaagtgtattgtccattggaaggctctccctttcatcgcctcctgcacgtctttgcatgtgcctgcccaggatgcagcacaggcggagcccgtagctggaaggtgttccggagccagtgtctgcaggtacccgagagagaggctcaagacgcccagaagcagggaaactcattagcagcagaagattggtgcgagggcgctgatgattgggggagcgatacagaggaggggccttctccacagttcaccctggacttcggtaatgacgcttcaagtgccaaggacgtagattggacggccaggctgcaggacctccgacttcaggatgcggtactgggagccgctcatcccgttcctccagggctgccattatttctgccttactacatctgtgtagccgacgaagatgattaccgcgattttgtcaacctggaccatgcacactcgctgctgagggattaccagcagagagagggaatagccatggaccagctgttgtcacagtctctgccaaatgatggtgacgagaaatatgagaaaactatcattaaatccggagaccagaccttttataaatttatgaagaggattgccgcttgccaggagcaaattcttagatattcttggagcggcgagcccctgttcctgacgtgtcccacgagcgaggtgacagaactgccggcttgttcccagtgtgggggtcagcgaatattcgaatttcaactcatgcccgctctggtctcaatgcttaaatctgcgaatttagggctgagcgtggaatttggcaccatcctggtgtacacatgcgagaagagttgctggccccctaaccaccagacgcccatggaagaattttgtattattcaagaggaccccgatgagctgcttttcaaatag

SEQ ID NO: 27379 - DNA, 1779 bp, synthetic construct
  source 1..1779: mol_type = other DNA; note = Synthetic coding sequence
atggcctccgtggtggtgaagaccatctggcagagcaaggagatccatgaagcaggcgatactcccacgggtgtggagtcgtgcagtcaactggtgcctgaggcaccgcgacgtgtgactagccgtgccaaaggaatcccaaaaaagaagaaggcagtttcttttcatggagtggagccccagatgtctcatcaaccaatgcactggtgccttaacctgaagcggtccagtgcttgtactaacgtgagtctgctcaacttggcagccatggaaccaactgacagtaccggcacagactcaactgtcgaggatcttagcggacaactgacattggccggacctcctgcctctcccaccttaccttgggacccggacgacgctgacattaccgagatattgagcggcgtgaattctgggcttgtgagagctaaggacagcattacatctttgaaggaaaagacgaatagggtgaaccagcacgtacagtctctccaaagtgaatgcagcgtcctgtctgagaatctagagagaagacgtcaagaagctgaggagctcgaagggtactgcattcagctgaaggagaactgctggaaggttacccgatccgtggaagacgccgagatcaaaactaatgtgttaaaacaaaactcggctctgctagaagaaaaattgaggtatctgcagcagcagttgcaggatgaaacacccaggcgccaggaagcggagctccaggagccggaagaaaagcaggagccagaggagaagcaggagcccgaagagaagcagaagcccgaggccggactgtcctggaattcactgggccctgccgcaacctcccaggggtgccccggacctcccggaagccccgataaaccttcacgcccacacggcttggtgcccgctggttggggcatgggccctcgcgcaggcgagggtccatacgtgtctgagcaagaattacagaagttgttcacaggcattgaagagctgcggcgtgaagtctcttccctcaccgcccgttggcatcaggaggagggagcggtccaggaggcgcttcggctccttggagggctcggaggccgtgtggacgggttcttgggacagtgggagcgggcacagagggagcaggcccagaccgcccgagacctacaggagctgcgaggcagggcggacgaactctgcacaatggtagaacgttcagcggtgtctgtagcttccctgcggtctgaactcgaaggcctgggaccactgaaacctatactggaggagttcgggcgacagtttcagaacagcaggagaggccctgacctctcaatgaatttagatcgctctcatcagggcaactgtgcccgttgtgcctctcagggatcacagctaagtactgaatccctgcagcagctgctggatagagccctgaccagtctggtggatgaggtaaaacagcgaggccttacacccgcatgtcctagctgccagaggctgcacaaaaaaatcctggaactcgaacgacaggcattggctaagcatgtcagagctgaagccctaagctcgacactccgtctggcacaggatgaagctctgcgggctaaaaatttactgcttaccgataaaatgaagcctgaagagaagatggccaccctggaccatctccaccttaaaatgtgtagtctgcatgaccacctttcgaatctccctctagaaggatcaaccggaacaatggggggtggtagctctgccggaacacctccaaaacaaggaggatctgccccagaacaatag

SEQ ID NO: 27380 - DNA, 2541 bp, synthetic construct
  source 1..2541: mol_type = other DNA; note = Synthetic coding sequence
atgagctccagtcatttcgcgagccgccaccggaaggatatctcgaccgaaatgatacggaccaagatcgcccatagaaaaagcctctctcagaaagagaataggcacaaggagtacgagcgaaacagacatttcggcctcaaagacgttaatataccgacacttgaggggagaatcttggtggaactggatgaaacaagccagggcttagtgccagaaaagacgaacgtcaagcccagggctatgaagaccatactcggggaccagagaaagcaaatgctgcagaaatataaagaagaaaagcagcttcaaaagcttaaagagcagagagagaaggctaagcgcggtatctttaaggtcggccgatacagaccagacatgccttgtttcttactgagcaatcagaatgccgtgaaagccgaacccaagaaagccataccctctagcgtgcgcattactcgctctaaggcaaaggaccagatggagcagaccaagattgacaacgaatccgacgtccgggctatcagacccggaccaagacagacttcggaaaaaaaggtatcagataaagagaagaaggtggtgcaaccagtgatgccgacaagtctccggatgacgcggagtgccactcaggccgctaagcaagtcccaaggacggtgtcctctaccaccgcgcgaaaacccgtgacacgcgctgcaaacgagaatgagcccgaagggaaagtgccctccaaaggccgacctgccaaaaatgtggaaacaaagcctgacaagggtatctcctgcaaagtggactccgaggaaaatacactgaactctcagacaaacgccaccagcggtatgaatcccgatggagtcctttctaaaatggaaaacttgcccgaaataaatacagcgaaaatcaagggcaaaaatagttttgctccgaaggactttatgttccaacccttggacgggctgaagacataccaagtgacccctatgacacccagaagcgccaacgcgttcctcacgccatcatatacttggactccccttaagactgaggtcgacgagagccaggccactaaggaaatattggcccagaagtgtaagacctatagcactaaaacgatccaacaggactctaataagcttccatgcccgctgggaccactaaccgtatggcatgaggaacacgtcttgaacaagaatgaggcgaccacgaaaaacctgaatggtctgcctataaaagaggtgccctctctggagaggaacgagggcagaattgcacaacctcaccacggagtgccatactttagaaatattctacaaagcgagaccgagaaactgacatcgcattgcttcgagtgggataggaagctggagctggacatcccagacgacgctaaggatctgatacgcacagccgttggccaaacccgcctacttatgaaggaacgctttaagcagttcgaggggcttgtagacgactgcgaatacaagagaggcatcaaggagacaacctgtacggatctggacggattttgggatatggtatcatttcagattgaggacgtgatacacaaattcaacaatctgatcaagctggaagaaagcggttggcaggtcaacaacaacatgaatcacaatatgaacaaaaatgtctttcgtaagaaggtggtttctggaattgcaagtaaaccgaagcaggacgacgctggcagaatcgccgctagaaatcggctggcagcaatcaaaaatgctatgagggaaaggatacggcaagaagagtgtgccgaaacagctgtgtcagtcatacccaaggaggtggacaaaatcgtgtttgacgccggttttttccgggtagaatctcccgtaaagctgttcagtggcctgagcgtctcgtctgagggtcctagccaacggctcgggactccaaagtctgtgaataaggcagtcagccaatcacggaatgaaatgggtataccccagcaaacaacttctcctgaaaacgccggtccccagaacaccaagtctgagcatgtaaagaagactctttttctttcaatacccgagtcaagatctagtatcgaggatgcccagtgtcctggtttgcccgacctcatagaggagaatcacgtggtcaataaaaccgatctgaaggttgactgtttatcttcagagaggatgtccttgccccttctcgctggcggagtcgccgatgatataaatacgaacaagaaggagggcatctcagatgtagttgagggcatggagctcaactccagtattaccagccaggatgttttaatgtccagcccggaaaaaaacactgccagccagaattctatactggaagaaggagagactaaaatctctcaatccgaactgtttgacaacaaaagcctgaccaccgagtgccatttgctagactcaccgggattaaattgctccaacccgtttacccagctcgaacggagacaccaggagcacgcgagacatatcagctttggcggaaaccttattacatttagcccactccaacctggcgagttttag

SEQ ID NO: 27381 - DNA, 1128 bp, synthetic construct
  source 1..1128: mol_type = other DNA; note = Synthetic coding sequence
atggcttctgcaccctggccagaaagggttcctcgcttgctagcaccccgactgccatcctaccctccgccacctcccactgtaggactacggtctatggaacaggaggagacataccttgagctttatctggatcagtgtgccgctcaagacggactggccccaccacggagtcccttgttctctcctgtggtcccttacgatatgtatattctgaatgccagtaatcctgacaccgcctttaatagcaacccggaagtaaaagagaccagcggggacttctccagcgtggacctgtctttcttgcctgatgaggttactcaagagaataaagatcagcccgtaatttccaagcatgagacagaagagaatagcgagtcacagagtcctcagtcccggctccctagccccagcgagcaggatgtaggcctgggactcaattcatcgtcactgtccaatagccacagccagctgcaccctggggataccgactcagtccagccgagtccggagaaacccaactcggactcattatcccttgccagcatcacgccaatgaccccaatgacccccatctctgagtgttgcgggatcgtgccccaactccagaacatcgtttccacggtaaatttggcttgcaagctcgacctcaaaaagattgctctccatgcaaagaatgctgagtacaaccctaaaaggttcgccgcagttatcatgcggattagagaacccagaacaaccgcgctgatcttctcttccggcaagatggtctgcactggggctaaatccgaggagcagtcacgattggctgctagaaaatacgctagagtggtccagaagctcggatttccggctcgcttcctggacttcaaaatccagaacatggtcggcagctgcgatgtgaggtttcccatccgtctggaggggcttgtcttgacacatcagcagttttcctcctacgagccagaactcttcccgggtctgatctacaggatggtgaagcccaggatcgtactcctgatttttgtctccggaaaagtggtgctcactggcgcaaaagaacgatcagaaatctatgaagccttcgaaaacatttaccctatcctgaaaggcttcaagaaagcatag

SEQ ID NO: 27382 - DNA, 633 bp, synthetic construct
  source 1..633: mol_type = other DNA; note = Synthetic coding sequence
atgcaggcggagggccaaggtaccggagggagcacgggagatgcggatggaccgggtggtccaggtatacccgacggtcctgggggtaatgctggtggcccaggagaagccggagccaccggagggagggggccacgcggagcgggagcagcccgtgcctccggaccccgtggtggcgcacctcggggaccgcatggaggagcggcatccgcccaggatggcaggtgtccatgcggcgcacgcaggcccgattcgaggctcctacagctccacataacgatgcccttttccagtcctatggaggcagagctcgttagacgtatcctttccagggatgccgcacccttaccgagaccaggggctgtccttaaagactttaccgtgagtggaaatttactgttcatgagcgttagggatcaggatagagaaggagctgggagaatgcgtgtggtcggctgggggctgggctccgcctcacccgagggacaaaaagccagggatcttcgcactcccaaacacaaggtgtccgagcaaaggcctgggaccccagggccacctcctcccgagggggcacagggggacgggtgtcgcggagtggccttcaatgtcatgtttagcgcaccacacatttag

SEQ ID NO: 27383 - DNA, 582 bp, synthetic construct
  source 1..582: mol_type = other DNA; note = Synthetic coding sequence
atggtggtcctgcgcgcaggcaaaaagacgttccttccccctctatgccgagcttttgcatgtcgcggttgccagcttgcccctgagaggggcgcagagcgtagagatactgcccctagtggcgtctcccgcttctgtccccctcgcaagtcctgtcatgattggattggaccccctgacaagtatagcaacctacgacctgtccacttctacattccagaaaatgagtcccctctggaacaaaagctgcgtaagctacgacaggaaacccaggagtggaatcagcaattttgggcaaatcagaatcttacattctccaaggaaaaggaggagtttatccatagtcgactcaagaccaaggggctaggactcagaactgaaagcggacagaaagccacactgaacgcagaggaaatggcagatttctataaagagttcttgagcaagaactttcagaagcacatgtattacaaccgtgattggtataagcgcaactttgccataaccttctttatgggcaaagtagcccttgagcgaatctggaataaacttaagcaaaaacaaaaaaaacggtctaactag

SEQ ID NO: 27384 - DNA, 1383 bp, synthetic construct
  source 1..1383: mol_type = other DNA; note = Synthetic coding sequence
atggcaaatgacccactcgaggggtttcatgaggttaacctggcctcacccacctcaccagaccttttaggtgtatatgaaagcggcacccaggagcagaccacgtccccctcagtgatctaccgcccacatccatccgccctgtcctccgttcccatacaggccaacgctctcgacgtgagcgaactgcctactcagccagtatattctagccctcgccgacttaattgtgccgaaatctcatccatctcctttcacgtgaccgatccggcaccatgcagcacttcgggcgttaccgccggactgactaaacttacaacgaggaaggacaactataacgcagaacgagagtttctgcagggagcaacaatcaccgaggcgtgtgatggttccgatgacatctttggactgagcactgactctctgagcagactgcggagcccttccgtgctcgaagtccgggagaaggggtatgagcggctgaaggaagagctcgctaaagcccagcgggaacttaaactgaaggacgaggaatgcgaacggctatctaaagtgagagaccagttaggacaggaacttgaggagctgaccgcctctttgttcgaggaggcccataagatggtacgggaggccaatatcaagcaagccacagctgaaaaacaacttaaggaggcacaagggaagattgatgttctgcaggctgaggttgccgctcttaaaaccctcgtgctgtcatcaagcccaacgtcacccacacaggaacccttaccaggcggtaagacccccttcaagaaggggcacaccaggaacaagtctacctcttccgctatgtcaggatcgcaccaggatttgtctgtgattcagcccatagtgaaagattgtaaagaggccgacctgtcactgtacaatgagttcagattatggaaagatgagcctactatggacaggacatgcccatttctggataaaatataccaggaggatatattcccttgcttaacttttagcaaatccgaactcgcctctgctgtcttggaggccgtggagaataacaccctcagcattgaacctgttggcctgcagcctatacgctttgtgaaagcctcagctgtcgagtgcggcggaccaaagaaatgcgctctgaccgggcaatccaagagctgcaaacatagaatcaagcttggcgacagttctaactactactatatctcccccttttgcaggtataggatcacgtcagtgtgtaatttcttcacatacattcgatacatccagcaaggtcttgttaaacaacaggacgttgaccagatgttctgggaggtgatgcagcttcgaaaggaaatgtctcttgctaaactcggatattttaaagaggagctctag

SEQ ID NO: 27385 - DNA, 981 bp, synthetic construct
  source 1..981: mol_type = other DNA; note = Synthetic coding sequence
atggccaccttggtcgaattgccagattctgtcctgttggaaattttcagctacctcccagtgagagatcggatcagaatctccagagtctgtcatcggtggaagcgcctcgtcgatgaccggtggttgtggcggcacgtggatttaaccctgtacacaatgaggcccaaggtaatgtggcatctgctcaggcgctacatggcaagccgtcttcattctctgcggatggggggatatctgttcagcggatcccaggcccctcagcttagtccggcattgttaagagctctggggcaaaaatgtcccaacctgaagaggttatgtttgcacgtcgccgacctctctatggtgccgatcacctcactcccttccaccttgcgcaccctggagctgcattcttgcgaaattagtatggcgtggcttcataaacagcaggaccccaccgtcctacccctccttgagtgcatcgttctggacagggttcccgcattccgtgacgagcacctgcagggacttacacggttccgcgctctcagaagcctcgttctgggcggtacctacagagttactgaaaccgggctggatgcgggtcttcaggagctctcatacctgcagaggctcgaggtgttaggatgtactctcagcgcagatagcaccctgctggcgattagcagacacctcagggatgttcgcaaaatcaggttgactgtacgcggactgagcgcccctggactagctgtcctggaaggaatgcccgcactagagagtctgtgcctccagggacccctcgtcacaccagagatgccgagcccaaccgaaatcctctcctcctgtctgacaatgccaaagttgagggtgctcgaactccagggcttgggctgggaggggcaagaggctgagaaaatcctgtgtaagggactccctcactgtatggtgatcgtgagggcctgcccaaaagaaagcatggactggtggatgtag

SEQ ID NO: 27386 - DNA, 3090 bp, synthetic construct
  source 1..3090: mol_type = other DNA; note = Synthetic coding sequence
atggcaagcgaagcagtgaaggtggtcgtgcggtgtcggccaatgaatcagagagaacgggaactgaggtgtcagccggttgtgactgtagactgcgccagagcccagtgctgcatacagaatccaggagccgcagatgaaccccctaagcagtttaccttcgacggagcctaccacgtggatcacgttactgaacagatctataacgaaattgcttaccccttggtcgaaggcgttaccgaaggatataatggcactatttttgcgtatggccagacaggatctggaaagtcctttaccatgcagggactgcctgatccccctagccagcggggtatcattcctcgagcgttcgagcacgtttttgaatccgtgcaatgcgccgagaacactaaatttctggtgagggcctcatatttggaaatctataacgaggatgtgagggacctgctgggagccgacaccaaacagaagttagagttgaaagaacatcccgagaaaggtgtatatgtcaaaggtctctccatgcacacagtgcatagtgtcgcccagtgcgagcatattatggagaccgggtggaagaatagatcagtcgggtacacactgatgaacaaggactccagcagatcccactctatctttactatctctatcgaaatgagcgctgtggatgagaggggcaaagatcacctccgggctggcaagcttaatctcgtggatttggccggttccgaacgacaaagcaagactggtgccacgggggaaagactcaaggaagcaaccaagatcaacctgtccctgagcgccctcggcaatgtgatatccgccctggtggatgggagatgcaaacacgtgccgtacagagactccaaactgacccgcctccttcaggacagcctaggcggaaatacaaaaacactcatggtggcatgtctatcacccgcagataacaattacgacgagacccttagtaccttacggtacgcaaatcgcgcaaagaacatacgcaacaaaccacgaattaacgaggatccaaaggatgcattgttgcgcgaataccaagaggagatcaagaaactaaaagctatccttacacagcagatgagcccctcaagcctgtctgccctgctttcccgccaagtcccaccagacccagtgcaggtggaagagaaactgctgccacaaccggtcatccagcacgatgtggaggcagagaagcagctgattcgcgaagaatacgaggaacgactagctcgtcttaaggcagattacaaagctgagcaggaatctagagcaagactcgaagaggacattaccgccatgcgtaattcatacgatgtcagactttccacccttgaggaaaatcttaggaaggagaccgaggccgtgctgcaggtaggggtgttgtacaaggccgaggtgatgtcaagggcggaattcgcaagctccgctgaatacccaccagctttccaatacgaaaccgtcgtgaaacctaaagttttcagcaccacggatactttaccgtcagacgacgtaagcaagactcaggtatcatccagattcgcagagctgcctaaagttgagcccagtaaatctgagatcagtcttggttcgtccgagtcctcttcccttgaagaaacttcggtttctgaagcattccccggtcctgaggaacccagcaacgtggaggtgagcatgccgacagaagagtcgcgaagccggtacttcctggacgaatgcctgggccaggaagccgctggccacctgcttggggaacagaactacctgcctcaggaagaaccccaagaggtgcctttacaggggctcctcggcctgcaggacccttttgcggaagtagaagcaaaactcgcaaggctgtcttccaccgtggccagaacggacgcgcctcaagctgacgtgcccaaggtgccggtacaggtgccggcaccgaccgatctactcgaaccttcggatgctaggcccgaggctgaggccgcagacgattttccaccgagacctgaggtggaccttgcttccgaggtcgcgttagaagttgttcggactgctgaaccgggagtctggcttgaggctcaggccccagtggcacttgtcgcgcagcctgagccgttacccgctacagctggcgtgaaaagggaatctgtgggcatggaagtggcagttttaaccgacgatcccctgcctgtagtggatcaacagcaggtccttgcacggctccagttattggagcagcaggtggtgggtggagagcaggctaagaataaggatttaaaggagaagcataagcggaggaagcgctacgccgacgagaggaggaaacagctggtggccgctctgcaaaactcagacgaggatagtggcgattgggtgctgcttaacgtgtatgacagtatccaagaagaggtgagagcaaaaagcaagctcctcgaaaagatgcagagaaagctacgggcagcggaagtggagattaaggacttacagtctgagttccagctagaaaagatcgactacctggccaccatccgcagacaggagcgggacagcatgctgcttcaacagctgctcgaacaggtccagcctctcataaggagagattgcaattactcaaacctcgaaaaaattttgagggaaagctgctgggacgaagataatggattctggaagataccgcatccagtcatcaccaagacttccctccctgtggcggtgtctaccggccctcaaaataagcctgcacgcaaaacctccgctgccgacaatggcgagccaaacatggaggacgaccggtatagacttatgctgtccaggagtaatagcgagaacattgcatcaaattattttcgatctaaacgtgccagtcaaatcttaagcaccgacgctcgcaagtcactcactcatcataattcacctcccggattgtcctgcccactgagcaataactcggcgatccctcccacccaagcgcctgagatgccacagccacggccttttcggctggaatccctcgacattccttttacaaaagctaaaagaaagaagtccaaaagtaacttcggatctgagcctttgtag

SEQ ID NO: 27387 - DNA, 417 bp, synthetic construct
  source 1..417: mol_type = other DNA; note = Synthetic coding sequence
atgattctgcaacagcctctgcagcggggacctcaaggaggcgctcaacgactcccccgagctgccctgggagtgacctggggacttgatgcaagtagccctctacgaggagccgtgccaatgtccactaagagaaggctggaggaagaacaggagccacttcggaagcaatttctctctgaggagaacatggctacccactttagccagttgagtcttcataacgatcacccttattgtagcccccctatgactttctctccggcattgcccccacttcgaagtccctgcagcgaattattactctggagatatccagggagtctgatcccagaggcacttcggctgcttcgtttaggtgacacaccctcacccccataccccgcaactcctgccggagacatcatggagctctag

SEQ ID NO: 27388 - DNA, 573 bp, synthetic construct
  source 1..573: mol_type = other DNA; note = Synthetic coding sequence
atgttccaagtgcctgatagcgagggcggacgggctggcagcagggctatgaagccaccgggtggagagtcctcaaatctgttcggttcaccggaggaagctaccccctcgtcacgccctaatcgcatggcaagtaatatcttcggcccaactgaggaaccccagaacattccgaagcgtacaaacccaccaggaggtaagggcagtggcatctttgacgagagcacccccgtgcaaacgagacaacacctgaatccgcctgggggaaaaacttctgatatttttgggagccctgtcaccgcgacctccagactcgcacaccctaataaaccaaaggaccatgtttttctgtgtgagggagaggagccaaagtctgacctgaaggccgctcgttctattcctgcaggcgctgaaccaggcgagaagggcagtgcccgtaaagcagggccagccaaagagcaggagccgatgccaaccgtggacagtcacgaaccaagactgggcccacgcccaagatctcacaacaaagtcctcaatccccctggaggcaagtcttcaatctcattttattag

SEQ ID NO: 27389 - DNA, 690 bp, synthetic construct
  source 1..690: mol_type = other DNA; note = Synthetic coding sequence
atgacatgttgttcccaggttccccctcgcaggagacccagtctagcgttaagtccaaggctggactgcaacgggctgaatggcgtgccaggatcaatttgggactttgtgtctggatcattttcacctagtccgtcccctatcttatcagccggtccgccaagcagtagtagtgcttcacctaacggcgctgagctggctcgcgtgagacgacagctcgacgaagctaaacgaaaaattagacagtgggaggaatcgtggcaacaagtgaagcaagtctgcgacgcatggcagcgagaagcccaggaggctaaggagagggctagggtggccgactcagataggcaactggcactgcagaaaaaggaggaagtcgaggcacaggtcaagcagcttcaggaggagctggagggactgggagtggcctcaacactacccggtttgaggggatgtggcgatataggtactatcccactgcccaagttacatagcctccagtcacagttgaggcttgatctggaagctgttgatggcgtgatttttcagctgagagccaaacagtgcgtcgcttgtagggaacgcgctcacggcgctgtcctgcgcccttgtcaacaccacatattatgtgaaccatgtgcggctaccgcgcctgagtgcccctactgtaaagggcaacctctacaatggtag

SEQ ID NO: 27390 - DNA, 5460 bp, synthetic construct
  source 1..5460: mol_type = other DNA; note = Synthetic coding sequence
atggcctccattacacaactcttcgacgatctgtgtgaagcactgttgccggctgcaaagacgcacttgggacaacggtctgtgaataggaaaagagcaaagaggtcactgaagaaagtggcgtataacgctctttttacaaacctctttcaggacgagacacagcagctgcaaccagacatgtccaagctgcctgcccgaaacaagatcctgatgctgagcttcgatcttcgcgtgggaggtcttggacctaaggctgacagattagaagagctggtcgaggagctggaagcggctccatgttgtcctctcttggaggtcggctctgtgttggatctgctggtgcagttggccggttctggacctccgcaagtgctccccagaaagagggattacttcctgaataataaacacgtgggaaggaatgtgccatatagtgggtatgactgcgacgatctgtcagtgtttgaaatggacgtgcaatccctgatcagtcgggaggagtgtctctgtcactcaatgatccaggagaccctgcaggttatggaagccgcaccaggtaccggactgcctaccgtcgggctgtttagctttggcgatccttgtggagatcggtttgagagggacacaagggtttcactatttggagccctagtacattctcggacatacgatatggatgtcagactggggctacccccagtgcccgacaatgcagacctaagcggattggctattaaggtcccaccaagcgtggatcaatgggaagacgaggggtttcaatcggcttcaaatctgactccggattctcaatccgagccatctgttacccccgatgtggatctttgggaggcagccctcacatatgaggcatctaagcggaggtgttgggaacgggtgggttgtcctcctggacatcgggaggagccctatctgacagaggctgggcgagatgccttcgacaaattctgccggctgcaccaaggagaattgcagctgttagctggcggagtgctacaggcacctcagcctgtgctggttaaggagtgcgaattagtgaaagatgtgctaaacgtccttatcggcgtggtaagcgcgaccttttcactgtgtcagccagcacaggcttttgtcgttaagcgaggcgtgcatgtgtctggggctagcccagagtctatcagctccttgctgtctgaggttgccgagtacggaacatgctacacccggctgagtcactttagtcttcagcctgtgctggattcgctctacagcaagggcctggtctttcaggcctttacaagcgggctgagaagataccttcagtattacagggcatgtgtgctgtctactcccccaactcttagcctccttaccatcgggtttctgtttaaaaaactgggaagacagctgaggtatctggccgaactctgcggtgtgggggctgtgttgcctggcacctgtggcggaggtccgagggcagcctttcctaccggggttaaattgctgtcctacctgtaccaagaggcactgcacaactgctccaatgagcactaccccgttcttctaagtctgctgaagacttcgtgtgagccttataccagatttattcacgattgggtgtatagtggcgtctttcgagatgcttacggagagtttatgattcaggttaaccacgaatacctttcttttcgagataaactgtactggacccatggctacgtactgatttccaaggaggtcgaggattgtgtgccagtcttcctgaagcacattgcccacgacatttacgtttgtgggaagacgattaacctgttgaagttgtgctgcccacggcactatctttgttggtccgatgtgccagttccacgcatctctgtcattttttctttagaggagctgaaagagatcgagaaagattgtgccgtatatgtagggaggatggagcgcgtcgcccgacactcttccgtgtccaaggaggagaaagagctgaggatggagattgcgaagcaggagctgattgcacacgctcgagaagccgcttccagagtcctcagtgccctctcggatcgccaaatgagtgaaaggatggcactggacgcccgaaagcgagagcagttccagcgcctgaaagagcaattcgttaaagaccaggagagaagacaggctgctaggcaggaagagttagatgacgacttctcttatgcccgtgagttaagagaccgagagaggagactgaagtctctggaggaagagctagaacgcaaggctcgccaagctctggtggaccactatagcaaactcagcgcagaagccgcacgcagggaacagaaagctctgtggagaattcaacggcatcgactagagtccgcacgcctgcgcttcctcctggaggatgagaagcacatacaggaaatgctgaaggcagttagtgaagcccaccaacctcaggaacctcctgatgttctgctgagcgtgcaccctcaggtgaccagcccgggtcccgagcaccccgagggcggtcaaggctgtgacagtggatcagcagagcagcactcgcccgcttgggatgggtggaacaggccgggattactaactcctcagcccctgaagcccctggctgtaggagctgggggaaggggactgcagcaggccgagggggctagaccttttagcgactccttatctataggcgattttctccccgtggggccaggcgctgaaccatctgtccagactggcatggtccccctgcttgaagtcgccctccagaccataaacttagacctgccacccagcgccccaggtgaagcgcctgccgcagctagcacccagccttctcggcctcaagaatatgacttttcaactgtcctgaggcctgcagttgccacttccccagccccaggcccactccaagcagctgaatgttctctgggcagtagcgggctacagctgtgggaggacagctgcgggaagatggacgcctgtggaagcgcctctcgagagactctacttccctcccatccacctagaagagccgctctcgaggaagggtcaagtcagcccactgaaagattgtttggccaagtgtccggaggtggcctgcctactggtgattatgccagcgaaatcgcaccgaccaggcctaggtggaacacccacggccacgtgagtgatgcaagtatcagggtgggcgaaaacgtctctgatgtggccccaacccagcctcgctggaacacacatggacacgtaagtaacgcttccatatccttgggcgagtccgtcagcgacgtagctcctactcgccctcggtggaatatccacggtcatgtgtcaaacgccagcataagggttggcgagaatgtgtccgatgttgcccctacaaggcccaggtggaacacccatgggcacgtgagtaatgcatcaatccgagttggcgagaatgtctctgacgtcgcaccaaccaggccacgatggaacacacatggacatgtaagcgacgcctccatctccctcggggagtcagttagcgatatggcacctgctaggccaagatggaacacacacggccacgttagcgatgctagcatctcattgggtgagagtgtgagcgacatggctcctacacggcctcgttggaacactcacgggcacgtctcagatacatcaatacgcgtcggggagaacgttagcgatgtggctccaatccgatcccggtgcaatacccatggccatgtttccgacgcaagcataagccttggtgagccagtgtcagatgtggtcagtacccggcctagatggaatacgcacgtgccaattccaccaccccacatggtgttgggagccctgtcaccagaagccgagccaaacacccccaggcctcagcagtctccaccagggcatacatcacagtccgccttgagtttaggcgctcagagcacagtgcttgattgtggccctaggcttcctgtcgaggtgggtccatctctttcctccccctcttctggctgtggagaggggtcaatatctgtgggcgagaatgtgagcgatgtggctcccacccagccctggtggcccaatactcctggcgattcagtcagcgaagaactgggcccaggcaggtcaggcgataccgaggacctttcccctaattggccactgaattcccaggaagatacagccgctcaaagtagtccaggcagaggagaggaagccgaagcttcggccgcagaagctcagggtggcgaacaggcgtatcttgctggccttgctggacagtaccacctcgaacgatatcccgatagctacgaatccatgtcagagcctcccatcgcccacctgttgcgccctgttctgcccagagcattcgccttccccgtggatccccaggtgcagtcagccgctgacgaaaccgcagtgcaattaagtgaactgctcaccctgcctgtcttgatgaagcgcagcattaccgctcccctggcagctcacatctcgctggtcaacaaagccgcagttgattacttcttcgtggagctgcatctagaagcacattacgaagcactcagacactttctgctcatggaagatggcgagttcgctcaatccctgagcgatctgctgttcgagaaactgggggctgggcagacacctggagaactgcttaacccacttgtcttgaattccgtactctccaaagccctccagtgctcactccacggtgatacaccccatgcatctaatctctctcttgctctcaaatatctgcctgaagttttcgcacccaatgccccagacgtgctatcctgtctggaactcagatataaggttgactggcccctgaatatcgttatcaccgaggggtgcgtctccaagtactctggtgtattctcattcctgcttcagctgaagttgatgatgtgggccctgaaggatgtgtgtttccacctgaaacgcaccgcactcctatctcacatggccggaagcgtgcagtttcgacagctccagctgttcaagcacgagatgcaacatttcgtgaaggtcatacagggatacatcgcgaatcaaatcttgcatgttacttggtgtgaattcagagcacgtcttgctactgtaggtgacttggaggaaatccagcgggcacacgcggagtatttacacaaggctgtttttcggggacttttgacagagaaagctgccccagtgatgaacgtaatacactctattttctcactcgtgcttaaattccggtcgcagttaatctcacaggcctgggggccacccggtggaccaagaggcgctgagcacccaaatttcgccctgatgcagcaatcttataacaccttcaagtattattcccacttcctctttaaagtagtgacgaaactggtaaaccgaggataccaaccacacctggaggattttctcctgcgaataaacttcaataattactaccaggatgcttag

SEQ ID NO: 27391 - DNA, 2250 bp, synthetic construct
  source 1..2250: mol_type = other DNA; note = Synthetic coding sequence
atgagtggcagtcacacccccgcttgcggcccattctcagccctgacaccctcaatctggccacaagaaattttagccaagtacacccagaaagaggagtcagctgaacaaccagaattctattacgatgagtttggattccgcgtgtacaaagaggagggcgacgaaccagggtcctcacttctggcaaatagtcctctaatggaagacgcccctcagcgcctgaggtggcaagcccatctggagttcacacataatcatgacgtgggagaccttacatgggataaaattgctgtgagcctgccacgctccgagaaactccggtctttggtgttggccggtatacctcatggcatgcggcctcagttgtggatgcgtctgtccggcgcactgcaaaagaaacgaaactccgaattgtcctacagagaaatcgtgaagaacagctccaatgatgaaactatagccgctaaacagatcgagaaagatcttttgcgtaccatgccatccaatgcctgcttcgcctcaatgggaagtatcggcgtccctagactgaggcgagtactgcgggctctggcttggctctaccctgagattggatactgccaagggacaggcatggtcgctgcttgcttgcttctctttctggaggaagaagatgccttctggatgatgtcagctattattgaggacttgcttcccgcttcttacttttccaccacactgctgggcgttcaaacagaccagcgtgtgctccggcatctgatcgtgcagtatcttccgagattagacaaactactccaggaacacgatattgaacttagtttaatcaccctccactggttcctgactgcttttgcgagcgtggtggacattaagctccttctgcgtatttgggatctattcttctacgaagggagtagagttctctttcagctaacccttggtatgctgcaccttaaagaagaggagctgatccagtccgagaacagtgcctccatctttaacacgttgagcgacatccccagccagatggaagacgccgagctgctgcttggggtagcgatgaggctcgccggttcccttaccgatgttgctgtcgagacacaaaggaggaagcacctggcctacttgatcgcagaccaagggcagctccttggcgctgggaccctgacgaatctgtctcaggtggtacggaggagaactcagcgaaggaagtccacaattacagccctgctgtttggggaggacgatctggaggctttgaaagccaagaatatcaagcagacagaactcgtggccgacctgcgcgaggcgatcctgcgcgtcgcaaggcacttccagtgcacagatcctaagaattgctccgtggagctcacacctgactacagcatggaatcccatcagcgagaccacgaaaactacgtggcgtgtagcagatctcaccgaaggcgcgcaaaagctttgttagatttcgaacgtcatgatgacgacgagctaggattcagaaagaatgacattatcacaattgtgtcacagaaggacgagcattgctgggtgggcgagctaaacggcttgcgagggtggttcccagccaaattcgtcgaggtgctggacgagagatctaaggagtacagtatcgcaggcgatgacagtgttactgagggagtgaccgacctggtgcgtggcaccctctgccccgctcttaaggccctgtttgagcacgggctgaagaaaccctccttactgggcggtgcttgccacccatggctgttcatcgaagaagccgctggtagggaggttgaacgggacttcgcatcagtgtactcacggctggttctttgtaagacatttcgcctggacgaggatgggaaggtattgactcctgaggaactgttgtatcgggctgtacagtcagtcaacgtgacacatgatgccgtgcacgctcagatggacgttaagctgagatccctgatatgtgtgggactgaatgagcaggtgctccacctatggctagaggtattgtgctcaagtctgccaaccgtggaaaaatggtatcagccgtggagttttctcagatccccaggttgggttcagattaagtgtgagctacgagttctgtgctgcttcgcttttagcctctcacaagattgggagctgccagctaaacgtgaggctcagcagccccttaaggaaggagttagggacatgctggtaaaacaccacttgttttcatgggatgtagacggatag

SEQ ID NO: 27392 - DNA, 2097 bp, synthetic construct
  source 1..2097: mol_type = other DNA; note = Synthetic coding sequence
atgctgtcccccaaaatcaggcaggcgagaagggctaggtctaagtcattggtcatgggagagcagagccgttctcccggacggatgccttgtccccataggcttggaccagtgctgaaggctggctggctcaaaaaacagcggtcaatcatgaaaaactggcagcagcggtggtttgtgcttcgcggagaccaactgttctactacaaggataaagacgaaatcaagccacagggatttatttctctgcaaggtacccaggtcactgaacttccccctggccctgaggacccaggcaaacatttattcgagatctccccaggaggtgccggagaacgtgaaaaggtgccagccaacccagaggctctgttgttgatggctagtagccagagagacatggaagattgggttcaagccatccggagggttatctgggccccactgggaggaggaatctttggacaaagactggaggagaccgtgcaccacgaaaggaagtacggccctcgcttggctcctctgttagttgagcagtgcgtcgattttatccgcgaacgcggactgactgaagaagggctgttccgaatgccaggccaagcaaatctcgtccgtgacttgcaagacagtttcgactgcggcgagaaacccctctttgatagcactactgacgtgcatacggttgcaagtttactgaaactctatcttagagagctccccgaaccagtcgtgccgttcgccagatatgaggatttcctgagctgtgcacagctgcttaccaaagatgaaggcgagggtaccctggaactcgccaagcaggtcagcaaccttccccaggctaattacaatcttctgcggtacatttgtaaatttctggacgaggtgcaagcttattccaacgttaataaaatgtctgtccagaatttggccaccgtgttcggcccaaacattcttcgcccacaggtggaggacccagtaaccatcatggaggggacctccttagtgcagcacctgatgacggtgctgattagaaagcacagccagctgtttactgcaccggttcctgaaggccctactagtccgagaggcggacttcagtgcgctgttgggtgggggtctgaggaagttacacgggacagccagggcgagcctgggggtccgggactaccagctcacaggacaagctccctggacggcgctgccgttgcggttctttcacggaccgctccaactggaccagggtccagatgctctcccggtaaaaaagttcagaccctcccaagctggaagtcctcctttcgtcaaccacgcagcctctcaggctctcctaagggcggaggctcctcactcgaggtgcctattatctcgagtgggggaaactggctaatgaatggcctgtctagtctcaggggacaccgccgtgcatccagcggggaccgcctcaaggactctggttcagtgcaaaggctctctacttatgacaacgtgccagcaccaggcctggtgcccggtattccctctgtggcttcaatggcctggtcaggcgcaagctctagcgagagctctgtcggtgggagcctgtccagctgtactgcatgtagagccagtgattcttctgctcgatcctccctccacaccgactgggcccttgagccttcacccttgcccagtagctctgaggatccaaagagtctggatttggaccattccatggacgaagcaggggctggcgcttccaacagcgagccttctgagcccgactcacccactcgggagcacgcgaggcgctcagaggctttgcaaggattggtgacggaactacgggctgaactatgcaggcagcgcacggagtacgagagaagtgtgaagcggattgaggagggtagcgctgatcttagaaagcggatgagcaggctagaggaggagttagaccaggagaaaaaaaagtacattatgttagagatcaagctgaggaactcagagagggcccgagaggatgccgaacgacgtaatcagctcttgcagcgcgaaatggaagagttcttttcaactctgggcagcttaacggtgggcgcaaaaggggcacgagcgccaaaatag

SEQ ID NO: 27393 - DNA, 180 bp, synthetic construct
  source 1..180: mol_type = other DNA; note = Synthetic coding sequence
atgacaaggggtaatcagcgcgaactggccaggcagaagaacatgaaaaagcagtccgactccgtcaaaggcaagcgacgggatgatggcctgtctgctgctgctaggaaacagagagattcagagattatgcagcagaaacagaagaaggctaatgaaaaaaaggaggagcccaagtag

SEQ ID NO: 27394 - DNA, 372 bp, synthetic construct
  source 1..372: mol_type = other DNA; note = Synthetic coding sequence
atggccaggtacgaggaggtgtctgtctccggcttcgaagagtttcaccgcgcagtagaacagcataatggcaagactatctttgcatacttcactggctcgaaggatgctggcggaaagagctggtgccccgattgtgtccaggccgaacctgtggtacgcgagggacttaagcatattagcgaaggctgcgtgttcatctattgccaggtaggcgagaaaccttactggaaagaccccaacaatgacttccggaaaaacctaaaggtcaccgcagttcctactcttcttaagtacggtactcctcagaaacttgtggagagtgagtgcctgcaggccaatttagtcgagatgctgttcagtgaggactag

SEQ ID NO: 27395 - DNA, 1401 bp, synthetic construct
  source 1..1401: mol_type = other DNA; note = Synthetic coding sequence
atgggatggattactgaggaccttattagaagaaacgcagagcacaacgattgcgtgattttttcattagaggaactgtccttacaccagcaggaaattgaacgccttgaacacattgacaagtggtgtagagatcttaaaatactttatctccagaacaatctaattggcaagattgagaacgtgtctaagctgaaaaagcttgagtacctcaatctggcactcaataatattgagaagattgagaatctcgagggctgtgaagagcttgccaaactcgacctgaccgtgaactttatcggtgaattgagcagtatcaagaatcttcagcataacattcacctgaaggaactgtttctgatgggtaatccttgcgcctctttcgatcactacagggaattcgtggtcgccacgctgcctcagctaaagtggctcgatggcaaggaaattgaacccagtgagcggattaaagctctccaagattactctgtgatcgaaccccagattagggagcaggagaaagatcactgcttaaagagggcaaagcttaaagaggaggcacagagaaagcatcaggaggaggataaaaatgaagacaaacgctctaacgccggtttcgatggacggtggtacaccgatatcaacgcaacgcttagcagtctggagtccaaagatcatctacaggctcctgatacagaggagcacaataccaagaagcttgacaacagcgaggatgatctcgagttttggaataagccatgtttattcacccccgagtctcgattagaaacgctgcgacatatggaaaagcagcgcaagaaacaagagaaactcagcgaaaaaaagaaaaaagtgaaacccccacgcaccctaatcactgaagatggtaaagccctgaatgtgaacgagcccaagattgatttttccctgaaagataacgaaaaacagattatcctggacttggctgtgtacagatatatggataccagcctcatcgatgtggatgtgcaaccaacttacgtccgcgtgatgattaagggcaaaccatttcagcttgttctgcccgcagaagtgaaacctgattcatcttctgccaaaaggagtcaaacaacggggcatcttgttatctgcatgcccaaggttggggaggtgatcactggaggacagcgcgcttttaagtctatgaagaccacaagtgataggagcagggaacagactaacaccaggtccaagcacatggaaaagttggaggtggatccctctaagcatagctttcctgacgtcacgaatattgttcaggagaagaaacacacaccaagacgcaggcccgaaccaaaaatcatcccatctgaggaagatcccactttcgaggataatcctgaggtgccccctctaatctag

SEQ ID NO: 27396 - DNA, 1050 bp, synthetic construct
  source 1..1050: mol_type = other DNA; note = Synthetic coding sequence
atggaagaccctcagtcaaaggaacccgctggggaggcagtcgctctggctttgctcgagtccccacgccctgagggcggagaagaaccacccaggccatcccctgaagaaacacaacagtgcaaattcgacggtcaggaaaccaaaggtagcaagtttataactagcagtgcatcagacttttccgaccctgtttataaagagatcgccatcaccaatggctgcattaatcggatgtccaaagaggaacttagggcaaagctgtccgagttcaagcttgaaacccgcggtgtaaaagacgtgctcaagaaaagattaaagaactattacaagaagcagaaacttatgctcaaagagagcaatttcgccgattcttactatgattacatttgtatcatcgattttgaagctacctgcgaagaaggaaaccctcccgaattcgtgcatgagatcatcgagttcccggtggtgttgctgaatactcacactctcgagatcgaagacactttccaacagtatgtgcgcccagagatcaacactcagctcagcgacttttgtatcagcctgacaggcataacccaagatcaggtcgatagggccgacacatttccccaagtactcaagaaggtcattgattggatgaagctgaaagaacttgggacaaagtacaagtactctctattaaccgacgggtcctgggacatgtctaagttcctgaatatccagtgccagctctccaggctcaagtatcccccattcgcgaaaaagtggataaatatccggaaaagttatggcaatttctacaaagtccctcgctcccagactaaactcactattatgctggagaagctggggatggactacgacgggaggccacactgcggcttagacgattcaaaaaacatcgccaggattgctgttcggatgcttcaggatgggtgtgagctgagaatcaatgagaaaatgcacgcgggtcagctgatgagtgtgagctcctcactgccaatcgaggggactccaccaccacaaatgcctcattttcgaaaatag

SEQ ID NO: 27397 - DNA, 843 bp, synthetic construct
  source 1..843: mol_type = other DNA; note = Synthetic coding sequence
atgttgagtgcagtcgcaagagggtatcagggttggtttcacccatgtgcaaggttgagcgtacggatgagctccacaggaattgaccggaagggggtcctcgcaaaccgggttgccgtcgttactggctcaacatccggcataggcttcgcaattgccaggaggctggccagagatggtgctcatgtggtgatctcgtcaaggaaacagcagaatgtggacagagccatggctaaactgcagggcgagggcctgtctgtcgccggtatcgtgtgtcacgtgggaaaggccgaggacagagagcagctcgtggcgaaagccttagaacactgtggcggagtggattttcttgtgtgttctgctggggtgaacccgttggtggggtcaactctgggcaccagtgagcagatatgggacaagatcctttccgtcaacgttaaatcacctgcactccttctgagccagctgttgccctatatggaaaatcgcaggggcgcagtaattctggtgtcttctattgctgcatacaacccagtggtggcactgggagtgtataatgttagcaaaaccgccctgctcgggctcaccagaacactcgctctggaactggccccaaaggacatccgcgtgaactgtgtggtcccgggaattattaaaacagatttcagtaaagtttttcacggaaatgagtctctttggaagaactttaaggagcatcaccagctgcagcggattggcgagtcagaagactgtgcaggtatcgtgagcttcctgtgctcccccgatgcctcttatgtgaacggagagaacatcgcagttgctggatacagtactcggttatag

SEQ ID NO: 27398 - DNA, 909 bp, synthetic construct
  source 1..909: mol_type = other DNA; note = Synthetic coding sequence
atggtgaccgaacaggaggtcgacgccatcgggcaaactctggtggacccgaagcaaccattgcaggcacggttccgagccttgttcacattgagagggctgggcggaccaggcgctattgcgtggatttcccaggcgttcgacgacgacagcgctttgctcaaacacgaattggcctattgccttggtcagatgcaggacgcaagggccattcccatgcttgtggatgtgttgcaggatacaaggcaggagcccatggtcaggcacgaggctggagaggccctgggggcaattggagacccagaggttctcgagatcctgaaacagtactcctccgatccagtgatagaggttgcagagacctgccaactcgccgtcaggaggctcgaatggctgcagcaacatgggggagaaccggctgccggaccttatctctccgtcgaccctgcacccccagccgaagagcgcgatgtcggtcgccttagagaggcgttgcttgatgagtctcggcctctgtttgaacggtatcgcgctatgttcgctctgcgaaacgccggaggtgaggaagccgcattagcactcgccgaaggattgcactgcgggagcgcattgttccgtcacgaggttggctacgtgctggggcagctacagcacgaagctgccgtaccccagctggcggctgccctggcacgatgcacagagaatcctatggttcgacacgagtgcgcagaagccctcggcgcaatcgcacgtcctgcctgtctcgcggctttacaggctcatgctgacgatcccgagcgggtagtcagagagagctgcgaagtcgccctcgatatgtatgaacatgaaacagggagggcatttcagtacgcagatgggttagaacagttacgcggtgccccatcttag

SEQ ID NO: 27399 - DNA, 3384 bp, synthetic construct
  source 1..3384: mol_type = other DNA; note = Synthetic coding sequence
atggaagtgcaggtttcccaagcgtccttgggtttcgaactcacatcagtggagaagtcacttagggaatggagtcgccttagccgtgaagtgatcgcctggctttgcccaagctccccgaactttatactgaactttcccccacccccttccgcatctagtgtgtcaatggtgcagctcttttcgagcccctttggttaccagagcccttctgggcacagcgaggaagaaagagaaggcaatatgaaaagcgctaaacctcaggtgaaccacagccagcatggcgaatcgcagcgtgctctctcacccctgcaatcgacgctaagtagcgctgcaagcccatcccaggcttacgagacgtatatcgagaatggccttatttgcctgaaacataaaattcgaaacatagagaagaaaaaactgaaactggaggactacaaagatcggttgaagtccggcgagcacctaaaccccgatcaattagaagccgtcgaaaagtacgaggaggtgctgcataacttggaattcgccaaggagctacagaaaacattctcgggcctcagcttagatctgctcaaagcccagaagaaggcacagcggagagagcacatgttaaaactggaagcggagaagaagaagctaaggaccattctgcaggtccagtatgtcctgcagaacctaacgcaggagcacgtgcagaaagatttcaaggggggtcttaatggggctgtttacttgccctcaaaagagctggactacctcatcaaattcagtaagcttacctgtccagagcgaaacgagtcgctcagtgtggaggatcagatggagcagtcatcattatacttttgggacctcctcgagggcagcgaaaaggccgtggtgggcacaacttataagcacctgaaagaccttcttagcaagctgctaaatagtggatattttgaatcaatccccgtcccaaagaacgctaaggaaaaagaggttccgcttgaggaggaaatgctgatccagtccgaaaaaaagacccagctgtccaagacagagtccgtgaaagagtcagaatctttaatggaattcgctcagccagaaatccagccacaggaatttctgaacaggcggtacatgacagaggtggactacagcaacaagcagggcgaggaacagccatgggaagccgattacgccaggaagcctaatctccctaagcgctgggacatgcttaccgaacccgatggacaggaaaaaaagcaggagtctttcaagtcctgggaagcctcaggtaagcaccaagaagtctccaaaccagcagtgagcctcgaacagcgaaagcaggacacaagtaaactccgaagcaccctcccagaggagcaaaagaagcaggagataagtaagagtaagccaagcccgtcacagtggaaacaagataccccaaagtccaaagctggctacgttcaggaagagcagaagaagcaggaaacacccaaactatggcccgttcagttgcagaaagaacaagatccaaagaagcagactccaaagtcatggaccccatccatgcagtcagagcagaataccacaaagtcgtggaccacccccatgtgcgaggagcaggacagtaaacagcctgaaaccccaaagtcatgggagaacaacgtggaaagccagaagcacagcctaacgagccaatcacagatttctcccaagtcttggggggtggccaccgcctcacttatccctaatgaccagctgctgcccagaaaactaaacaccgaacctaaggacgtcccaaaaccggtacaccagcctgtgggatcatcttctacactgcctaaggatcccgttctgagaaaagagaaactgcaggaccttatgacacagatccagggcacctgcaactttatgcaggagagtgtgttagattttgataaaccatccagcgctatcccaaccagccagcctcccagtgccaccccaggtagtcctgttgcttccaaagagcagaatctgtctagccagagcgactttctgcaggagccactccaggccacctcatcacctgttacttgctcaagcaatgcgtgccttgtcactaccgatcaagcctcaagtggcagtgaaaccgagtttatgactagcgaaacacccgaggctgccatcccccctggcaagcagccctcttctctggcttcccctaaccctcccatggcaaaggggtctgagcagggattccagtccccacccgcttcttcttcgtctgttacaattaatacagctccattccaagccatgcagacagtctttaatgtcaacgcacccttgccaccaaggaaagagcaggagattaaagagtcaccctactccccgggttacaatcagtctttcacaaccgcttccacacaaaccccgccacagtgccagcttccgagcattcacgtagagcagacagtgcactctcaggagaccgctgcaaattatcatcccgatggcactattcaggtcagcaatgggtcgttagccttttatcccgcacagactaacgtgttcccacgacctactcagcccttcgtgaattcgcggggatccgtgagaggttgcactcgaggaggcagactgattacaaatagctaccggagcccaggaggttataagggcttcgatacatacaggggcctcccctctatttccaacggaaattattctcagctccagttccaggctcgcgagtatagtggcgcaccctactcccagagggacaacttccagcagtgttataagcggggtggcacctcaggtggccctagggctaattcaagagccggatggtcagacagttcccaggtctcatctccagagcgcgataacgagacctttaactccggagattcgggtcaaggtgatagcaggagcatgacccccgtggacgtgcctgttaccaacccagctgcgaccattctgcctgtgcatgtgtacccactcccccagcaaatgcgggtcgccttctcagcagccaggacatcgaatctggccccagggactttagatcagcccatcgtgttcgatctgctcctgaataacctgggggagaccttcgatcttcagctcggtaggttcaactgccccgttaacgggacttacgtgttcattttccatatgctgaaactggctgtcaatgtccccctgtatgtaaatctaatgaaaaatgaagaggtccttgtcagcgcttacgccaacgatggggcacctgatcacgaaacagcttcaaaccacgccatcctccagctttttcagggcgaccagatctggctgcgtcttcacagaggagccatctacggctcatcctggaagtactctaccttctccggctacctactttaccaagattag

SEQ ID NO: 27400 - DNA, 2448 bp, synthetic construct
  source 1..2448: mol_type = other DNA; note = Synthetic coding sequence
atggaggtgcgagcttccttacagaaagtttcaggttcttccgatagtgttgctactatgaactcagaagaattcgtgctggtgccgcagtacgccgatgataatagtaccaagcacgaagagaagcctcaacttaaaatcgtgagcaatggcgacgagcagttggaaaaggccatggaggagatcctgcgcgatagcgaaaagcgcccttcttcactgttagtcgactgtcaatcatcctccgagatctctgaccatagttttggcgacattcccgcttcccaaaccaataaaccctcattgcaactcatcctggacccctctaatactgagatctctacccctagaccaagtagtccgggtgggttaccagaagaggatagtgtcctgtttaataagctgacctatcttggctgtatgaaggttagcagccctagaaacgaagtcgaggctctgagagctatggccacgatgaagtcatcctcacaataccccttcccagtgacactctatgtgcccaacgtgcctgagggcagcgtgcgaatcattgatcagtcttctaatgtggagattgctagcttccctatctataaggtgctgttttgcgcccgaggtcacgacggaaccacagagtccaactgttttgcttttacagaatcctctcacggctctgaagagttccagatccatgtatttagctgcgaaattaaggaggcagtaagtaggatcttgtactcattctgcacagctttcaagcgaagtagcagacaagtcagcgatgtaaaggacagcgtcatcccgacaccagattctgatgtttttacattttctgttagcctggaagtgaaagaagatgacggtaaagggaattttagtccagttccaaaggaccgcgacaaattttacttcaaactgaagcagggcattgagaaaaaagtggtaattaccgtgcagcagctctctaataaagaactcgctattgagagatgcttcgggatgctcctaagccccggtcggaacgtaaagaattcagacatgcacctactggacatggaatcaatgggaaagagctatgatgggagagcctacgtgataacgggcatgtggaaccccaacgctccagtttttttggccctgaacgaagaaacgcccaaggacaagcaggtctatatgaccgtagcagtggatatggtggtgaccgaggtggtggagccggtcaggttcttgcttgagactgtggttcgggtgtacccggcaaacgagcgtttctggtacttctctagaaagacatttacagagacatttttcatgcgtctcaagcagagtgaaggtaaaggccacacaaatgccggtgacgctatttacgaggtggtgagcctccaacgtgagagtgataaagaggagccagtcacccctactagcggaggcggacccatgtcaccccaggacgacgaggcagaagaagagtcagacaacgaactttcttcaggcacgggggacgtgagtaaagattgtccagaaaaaattctctactcatggggagagctgttaggtaagtggcattccaacctgggagccaggcccaaagggttatcgaccctcgtaaagagtggcgtgcccgaggccctgagggcggaggtctggcaattgctcgccggatgccatgataaccaggcaatgctggatcggtatcggatcctgataaccaaggacagcgcgcaggaatccgtgattactcgagatatccacagaacatttcccgctcacgattatttcaaagacaccggcggtgacggacaggagagcttgtataaaatctgtaaggcgtactccgtgtacgacgaggacattggttactgtcagggccagagctttcttgcagcagtcctgctgttgcacatgccagaagagcaggctttttgcgtgcttgtaaaaatcatgtacgactatggacttcgtgatctgtacaggaataacttcgaggacctgcattgcaagttctaccaactcgaaaggctcatgcaggaacagttgcccgacctccatagccatttttcggacttgaacctagaggcccatatgtacgcttcacagtggttcctgaccttgttcactgctaagttccccctgtgtatggtgttccacattatcgacctcctgctgtgtgagggtctcaatatcattttccacgtggccctggcattgctcaagacaagtaaagaagatctcttgcaggctgattttgagggtgctttgaagttctttagggtgcaactgccgaaacgttaccgggcagaggaaaatgcccgtcggctgatggagcaagcgtgcaatatcaaggtgcccaccaagaagcttaagaaatacgagaaggagtatcagactatgcgcgagtctcagctgcagcaagaggatcctatggaccgatacaaattcgtctacctttag

SEQ ID NO: 27401 - DNA, 639 bp, synthetic construct
  source 1..639: mol_type = other DNA; note = Synthetic coding sequence
atggcacagactgataagcctacttgtattcccccagagctgccaaaaatgctgaaggagtttgcaaaggccgcaatccgtgctcagccacaagacctcattcagtggggcgcagactatttcgaagctctgtctcggggagaaacacctcctgtgcgggaacgttctgagagggttgccctatgcaattgggccgagctgactccagagcttcttaagatactacattctcaggtggccggtcgcctaattattagagccgaggagttagcgcagatgtggaaagttgttaatttgcccacagatttgttcaactccgtcatgaacgtaggtaggtttaccgaggaaatagagtggctaaaatttttagccttggcatgctcagccctgggggtcaccatcactaaaaccctgaagattgtctgcgaggtactatcctgcgatcataatggagggttgccacggatcccattttctaccttccaatttctttacacgtatatcgcagaagtggacggagagatttgcgcatcacacgtatcacggatgctgaattatatcgagcaggaagtaatagggcctgacggattaattactgtgaatgattttacacaaaatccaagagtgtggctggagtag

SEQ ID NO: 27402 - DNA, 1938 bp, synthetic construct
  source 1..1938: mol_type = other DNA; note = Synthetic coding sequence
atggcctcactgctgcaagaccagctaaccaccgaccaggacctgctcctgatgcaggagggaatgcctatgagaaaggtccggtccaagagctggaaaaagctgcggtactttaggttgcagaacgacgggatgactgtgtggcacgcccgtcaagcaagaggctccgctaagccctctttctccatcagcgacgtcgaaactattagaaacgggcatgattctgaattgttaagatcgttagccgaagaactgcctcttgaacaaggattcactatcgtcttccacggtaggcgatcaaacctggaccttatggctaactccgtcgaagaggcccagatctggatgagaggactgcagctcctcgtggatttagttacctctatggaccaccaggagagactggatcaatggctctcagactggttccagcgaggagacaagaaccaggacggcaagatgagctttcaggaggtccagaggttattgcatcttatgaatgtggagatggatcaagaatatgctttttcgctgttccaggctgcagacacctcccagtccggcacacttgagggggaggaatttgtgcagttttataaagccttgacaaaacgggcagaggtccaggaactgttcgaaagcttctctgccgacggtcagaaactaacactactcgagtttctcgatttcctgcaagaggaacagaaagaacgagattgcacttccgagctcgctcttgagctgatcgatcgctacgagccatccgactccggtaaattgcggcatgttctgtctatggacggattcctgtcctatctttgctctaaggacggagacatattcaacccagcttgcctccctatctaccaagacatgacccagccacttaatcactacttcatctgctcctcacacaacacatacttggtgggagatcagctctgcggacaatcaagcgtggaaggatatattagggccctcaaaaggggctgcaggtgtgttgaggttgatgtttgggacgggccaagcggagagccagtagtttaccatggccatacccttacgtccaggatcttatttaaggatgtggtcgcaactgtggcccagtacgcctttcagacttcagactatccggttatcctcagtctggagacccactgttcctgggagcagcagcagaccatggctcgacacctcaccgaaatcctgggggagcagctgttgagtaccaccttagatggagtcttgcctactcagctgccaagtcccgaggagctgcggagaaagattctcgtgaaggggaaaaaactgacactagaggaggacttggagtacgaagaggaagaggccgaacccgagcttgaagaatcagaactggccctggaaagccagtttgagacagagccggaacctcaagaacagaatttacagaacaaagacaaaaaaaaaaagagcaagccaatcctgtgccccgcattgtcctccctagttatctatcttaagagtgtgtctttcagaagcttcacccactccaaagagcattaccacttttacgaaatcagttctttcagcgaaaccaaggcaaagaggcttatcaaagaagcaggcaatgaattcgtgcagcataatacatggcagctgtcgcgggtgtacccatcgggtctccggactgactcatccaattataacccgcaagagctctggaatgcaggatgccagatggtggcaatgaatatgcaaactgccggactggaaatggatatctgcgatggccacttccgccagaatggcggttgcgggtacgttttgaaaccagattttctgcgggatatacagagttcattccaccccgagaaacctattagtccgtttaaagcccagacactgagcattccttacagacatcttcagctgatcttcccgatcaacagtgtttag

SEQ ID NO: 27403 - DNA, 7554 bp, synthetic construct
  source 1..7554: mol_type = other DNA; note = Synthetic coding sequence
atggtgggcgagaggcatgccggtgacttgatggtgcctctgggcccaaggttgcaagcctaccccgaagagcttattcggcagaggcccggacacgatggtcatcctgaatatttgatacgctggtccgttttgaagtgcggggaggtagggaaggttggcgtggaagaaggtaaggctgaacacattcttatgtggctgagcgccccagaggtttatgccaactgccctgggttgttaggtgagcgtgctttgtcaaaggggttgcaacacgaacctgccggagtgagcggctccttccccagagatcccggtgggcttgatgaggtggctatgggtgagatggaagccgacgtgcaggcactggttagacgcgctgcacgccagctagcagagagcgggaccccttccctgaccgcggctgttctccacacaatccacgtgctgagtgcatacgcctccatcgggccactgaccggagttttcagggagacaggcgcactggacttgctgatgcatatgctctgtaatcccgaaccgcagataagacgctctgccggaaagatgttgcaagccctcgccgctcacgacgccggtagccgtgctcatgtgttactgtctctgagtcagcaggacggcatcgagcaacatatggactttgacagtaggtacactttgctggagctattcgcagagacgacgagctccgaggagcattgcatggctttcgagggcatccacctgccgcaaattcccggtaagctgttgttctctctggtcaaacggtacctttgtgtgacttccctacttgatcagctcaatagctccccagagctgggagccggagaccagtcctcgccatgcgcaacacgtgagaaaagcagaggacagcgtgaattggagttttcaatggccgtcggcaatctgatttcagagctcgtgagaagtatgggctgggccagaaatctgtccgagcagggtatgtctcctcccagaccgacacggtccatttttcaaccttacattagtggcccatctctactccttccgaccatcgtaaccacgccccgtagacaaggatgggtgttccggcagcggagtgagtttagctctaggtccggctacggggagtacgtacagcagaccctgcagcctggtatgcgagtaagaatgcttgatgactacgaagagatcagcgccggagatgagggagaattccgccagagtaacaatggcatcccgccagtccaggtcttctggcagtcaaccggacgtacttactgggtgcattggcatatgcttgaaatcctgggaccggaggaggccactgaggacaaggcaagcgccgcagtcgagaagggcgcaggcgcaaccgtgctcggaacagcctttccctcatgggattggaaccctatggacgggttgtatccattaccttacctgcagccagagcctcagaagaatgagagggttggatacctcacacaggctgagtggtgggagctgctgtttttcattaaaaaactggacttatgcgaacaacagcccatttttcaaaacctgtggaaaaatctggatgagactctcggcgagaaggcactcggggagatctccgtttctgtggaaatggctgaaagtttactccaggtgctctcatctaggtttgagggctccacgctcaacgatctcctcaactcccagatttataccaagtacggtcttttatctaacgaaccgtcctcctcttcaacctctcgtaatcattcctgcacacccgatcctgaagaagagtccaaatctgaagcctcattttctgaggaggagacagagtcacttaaagccaaggccgaggccccaaagaccgaggctgaaccaaccaagacccgaactgaaaccccaatggctcagagcgactctcaactcttcaatcagttgctagtgacggaaggtatgacactccctacagaaatgaaagaggccgcatcggagatggctcgggctctgcgtggccctggcccacgaagttctttggaccagcacgtggccgctgtggtggctacagttcaaatttcgtccctggacacaaatctccagctgtctgggctgtccgcgctttcccaggccgtagaagaggtgaccgaaagagaccaccctttggtccgtcccgaccggtcactgcgtgaaaagctggtcaagatgcttgtcgagcttctgaccaaccaagtgggcgagaaaatggtggttgtgcaggctctgagactgctttaccttcttatgactaaacatgaatggcgccctctgtttgccagagagggaggtatatatgcagtgttggtgtgcatgcaagagtacaaaacatccgtgcttgtccaacaggcagggctagctgctctcaaaatgttagccgtggcctcctcgagtgagatccctacattcgtgacgggtcgcgactcaatccacagtctctttgatgcacaaatgacccgggaaatcttcgcatccatcgatagtgcaacaagaccgggttccgagagcttacttctgaccgtgccagcggctgtaatcctgatgttgaacaccgaagggtgctcttccgccgcacgaaatggtctcctcctgcttaacctgctgctgtgtaaccaccatacacttggggatcagataatcacccaggaactgcgagatacactctttcgccactcaggaatcgcacctcgcaccgaacccatgcccacaacaaggacaatccttatgatgcttcttaaccgatattctgaacctcccggttctcccgagagagccgcacttgagaccccaatcatccagggtcaagacgggagccccgaacttcttatcagatccctggtggggggtccaagtgcagagctgctcctggaccttgagagagttttatgccgggagggcagcccaggcggagcggttcgtcctctgctaaaacgtctgcagcaggaaacgcagccttttttgttgctgttgcgtacactggacgctccaggtccaaataagactctgctgcttagcgtgcttcgagtaattacacggctcctcgactttcccgaggccatggtcttgccgtggcatgaagttctcgagccttgcctgaactgcctctccggccctagcagtgactccgagatcgttcaggagctgacctgcttcctgcaccgccttgctagtatgcacaaggactacgcggtggtgttatgctgcttgggtgctaaggaaatcctgtcgaaggtgctggacaaacattcggcacaactcctcctgggatgtgaactcagagatttagtcaccgagtgtgagaagtacgcacagctttattctaatctcacgtcaagcatcttggctgggtgtatccagatggtgttgggacagatcgaggaccatagaagaacccatcagcccatcaacatacctttctttgacgtgtttttacgccatttgtgccagggaagctctgtcgaagtgaaggaagacaaatgctgggagaaggtggaagtgagctcaaatccccatcgcgcttcgaaactgaccgatcacaaccccaagacctactgggagtccaatggaagcacaggctcgcactacattaccctacacatgcaccggggagttctggtgaggcaactgactcttctggtcgcctctgaagactcctcttacatgcctgcccgagtggtggtcttcggaggtgatagcacatcgtgcattggcaccgaattgaacacagtgaacgtcatgccttcggcatcaagggtcatacttctggaaaatctgaaccgcttctggcctataatccagatcaggattaaaagatgccagcagggcggtatagatacgcgcgtcagaggagtggaagttcttggtccaaagcctacattttggcccctgtttcgtgaacagttgtgccgcaggacctgtctcttctatactatccgggctcaggcatggtcccgagatattgcagaagaccaccgacgcttactgcaactgtgtccgagacttaatcgtgtgctgagacacgaacagaatttcgccgaccggtttttacccgacgatgaggccgcacaggcattgggtaaaacctgttgggaagctcttgtgtccccactcgttcagaacatcacttcccccgacgccgagggtgtgtcggctttaggatggttattggaccagtacctggagcaacgggagacaagtcggaatcccctctctagagctgccagttttgcctcccgcgtacggaggctctgtcatctgttggtccacgtggagccaccccctggaccctcgcccgaaccttccacaagaccattctcaaaaaattcaaaggggagagatcgttccccagcccctagccccgtactgcctagcagttccctgcgtaatattacccagtgttggctgagcgtggtgcaggaacaggtatctcgcttcctagccgcagcttggagggccccagatttcgtgcctagatattgcaagttgtatgaacaccttcagcgcgctgggagtgagctgttcggacctagggccgcttttatgctggcccttcggtccggcttttctggagctctcctacagcagagcttcctgactgccgctcatatgtccgaacagtttgccagatacattgatcagcaaatccaggggggactgatcggaggcgcaccgggtgtcgaaatgctagggcagctgcaaaggcatctggaacctatcatggtcctctcaggattggagctggcgacaaccttcgaacacttttaccagcattatatggccgaccgtcttctgtcttttgggagcagttggctcgagggcgcagttttagaacagatcggtctgtgtttccccaatagacttccgcaattgatgctgcagagcctgtccacctcagaggaactccagcgtcaatttcaccttttccaattgcaacgtcttgataaactcttccttgagcaggaggacgaagaggagaaacgtctggaggaagaggaggaagaggaggaagaggaggaggcagaaaaggagctgtttatcgaggatccctcccccgcaatcagtatattggttctgtcccccaggtgttggccagtcagtcccctgtgttatctttaccacccaaggaagtgcttgcctaccgagttttgtgacgcattggatcgtttttcaagcttctacagtcagtctcagaatcacccagtgcttgatatgggaccacaccgtcggcttcagtggacttggctcggtcgcgcagagctgcagtttggaaagcagattctccacgtctctactgtccagatgtggctgctcctgaaattcaaccagactgaagaggtaagcgtggagaccctgctcaaagacagcgacctgtctcctgagttacttctccaggccctggtaccacttacaagcggaaacggccctctcacgttacacgaggggcaagatttcccacacggaggcgtcctaaggttgcacgagcccggacctcagcgcagtggggaggccctatggctgatcccaccacaggcatacctgaatgtcgagaaggacgagggaaggacgctggagcaaaagcgtaatctgctgagttgtctactggtcagaattttgaaagcccatggtgagaaaggcctccacattgaccaacttgtgtgccttgttctggaggcctggcagaaagggcctaacccacccggtacgctcggccatacggtggccggtggcgtagcctgcacgagtaccgatgtgctgtcatgcatactgcacctcctcggccagggatatgtcaagcggcgtgacgaccgccctcagatccttatgtacgctgctcctgagccgatggggccttgtaggggacaagccgatgtgcccttctgcggttcccagagcgagacatcaaagccttcccctgaagccgttgccaccctggctagccttcagctgcccgcaggtagaactatgtcgccccaggaggttgaaggactgatgaagcagaccgtaaggcaagtgcaagagacactgaacttagagcctgacgtcgcccaacatctgctagcccactcccactggggtgccgagcagttgctgcagtcgtactctgaggatcccgaacctcttctacttgccgcagggttgtgtgtgcatcaggcccaagccgttcccgtacgtcctgaccactgtcctgtttgcgtgagcccactgggctgtgacgacgatctcccaagcttgtgttgcatgcattattgctgtaagtcctgttggaacgagtatttaacgactagaatcgaacagaacctcgtcctgaactgtacttgccccatcgcggattgcccggcacagcccacaggcgctttcatccgtgccatagtgagcagccctgaggtaatctcgaagtacgaaaaggccctcctgagaggatatgtggagtcatgttcaaatttgacatggtgtaccaatccacagggctgtgatcgcatcctgtgccgtcaaggactcgggtgcggaactacatgtagtaaatgcggctgggcatcatgctttaactgttcttttcccgaagcccactatcccgcatcatgtgggcacatgtcccagtgggtagatgacggaggttattatgacggaatgtcagtggaagcacagagcaagcacctggcaaagcttatttcaaagcggtgcccctcctgccaggccccaatagaaaagaacgaaggttgtctgcacatgacctgcgctaagtgcaaccatgggttctgttggagatgcctgaagagctggaagcccaaccataaggactactacaattgctcggccatggttagcaaagccgctcgacaggaaaagcgctttcaggattataacgagagatgcacattccaccatcaggcccgagagttcgccgttaatcttcggaaccgcgtgtccgctatacatgaggttccgccacccagatctttcactttcttgaacgacgcttgccagggactagagcaggcacgcaaagtgctggcttatgcctgtgtgtactccttctatagtcaggacgcagaatacatggacgtggtggaacagcagactgaaaatctcgaactgcacacgaatgcgcttcagatactgttggaagagacactactgcggtgtagagatctcgcctcctccctgcgcttgctgcgggctgactgtctttccactggcatggaactgctgcggcgtatccaggaacgcctgttggctattctgcagcatagcgcacaggatttccgggtcggcctacaatctcctagcgtggaagcctgggaggcaaagggtccgaatatgcctggtagtcagccgcaggcaagcagcgggccagaggccgaggaagaagaggaggacgacgaggacgatgtccccgaatggcaacaggatgaattcgatgaagagctcgataacgacagcttctcatacgacgaaagcgagaacctggatcaggagactttctttttcggagatgaggaagaggacgaggatgaagcctacgactat

SEQ ID NO: 27404 - DNA, 1476 bp, synthetic construct
  source 1..1476: mol_type = other DNA; note = Synthetic coding sequence
atggaggagattccagctcaggaggcagccggatcaccgagggtccagttccagtccctggaaactcagtctgaatgtctgagtccagaaccacagttcgtccaggatacagacatggaacagggtctcacaggtgacggggagacacgcgaagaaaacaaacttctgataccgaagcaaaagataagtgaggaagtccatagttacaaggtacgcgttggcagactgaagcacgatatcacgcaggtgcccgaaactcgcgaggtgtacaaatccgaggatagactagagcgcctgcaggaaattctccggaagttcttatacctggagcgagagttcagacaaatcaccattagtaaagagactttcactagtgaaaaaaataacgagtgtcacgagcccgagaagtctttctccttggactctacaattgacgcagaccagagagtcctccgcatccaaaacacagatgacaacgacaaatacgatatgagcttcaaccaaaatagtgcctcaggaaaacatgaacacctcaacctgacagaggactttcaatcgtctgaatgcaaagaaagtctgatggacttgtctcacctgaacaaatgggaatctataccaaacaccgagaagagctacaagtgcgacgtatgtggcaagatcttccatcagagcagcgctctgacccgtcatcagcgaatacacacgagggaaaagccttataagtgcaaggaatgtgagaaatccttcagccagtcttctagcctttcccggcacaagcgaatacacacacgcgagaagccatacaagtgcgaggcaagcgataaatcttgtgaggccagcgacaaaagttgtagtccctcttcgggcattattcagcacaaaaaaatccatacccgggctaaatcctacaaatgttcatcttgcgagcgggtcttctctaggagcgtgcacctcacacagcatcagaaaatccacaaagaaatgccttgtaagtgcaccgtgtgcggttctgatttctgccacacatcttatcttctcgagcaccagcgagtgcaccacgaggaaaaagcttatgagtacgatgaatacggcctggcctatattaagcagcaggggatccatttccgggagaagccgtacacctgctccgaatgcgggaaagacttccggctcaatagtcacctgatacagcaccaaagaatccacactggagaaaaagcccatgaatgcaatgagtgtgggaaggcattctcccagacctcttgtctgatccagcatcacaagatgcacaggaaagagaagtcctacgagtgcaacgaatatgagggaagtttcagccattcgtccgatctcattctgcagcaggaagtactcactagacagaaggcattcgattgtgatgtatgggagaagaattcatcccagagagctcacttggtgcagcaccaaagcatccatacaaaggaaaacagttag

SEQ ID NO: 27405 - DNA, 2709 bp, synthetic construct
  source 1..2709: mol_type = other DNA; note = Synthetic coding sequence
atgtctgagttcaggattcaccacgacgtgaatgagctgctgtccctgctccgcgtgcatggtggggatggagcggaggtgtatattgacttgctgcagaagaatagaaccccttacgtgacgacaaccgtgtccgcccactcagcgaaggttaagatcgctgagtttagtcggacccccgaagatttccttaagaagtatgatgaattgaaatccaagaacactaggaatctcgaccctctcgtgtacctgctgagcaagttgaccgaagacaaggaaaccctccaatacctgcagcagaacgcaaaggaacgcgcagagcttgctgccgcagctgtcggctcttccactacttcgatcaacgttccagccgcagcctcaaaaatctccatgcaggagctagaggaactccggaaacagctcggctccgtcgccactggctctactttacaacagtctctcgaactgaaacgaaaaatgctacgcgataaacaaaacaaaaaaaatagcggacagcatctgccaatatttcctgcttgggtgtacgagcgtccagccctaatcggagattttctgatcggggcagggatctccaccgacaccgccctccccattggaactctgcccctcgcctcgcaggagagcgcagtcgtagaggatctcctgtacgtgttagttggagtcgacgggaggtatgtctcagcacagccactggctggacgccaatcgagaacttttctcgtggacccaaacctggatctcagtattcgtgagctggttcaccgaattttgccagtggcggcttcttactccgccgtgacaaggttcatagaggagaaatcaagttttgagtatggccaggttaatcacgctcttgcagcagctatgcgaaccttggtcaaggagcacttgatccttgtgtcccagctggaacagctgcaccgccaaggcctgctgtccctgcagaaactatggttctacatccagcctgctatgcgaaccatggatattcttgcttctttggctacatccgtggataagggagaatgcctggggggatccaccctttccctcctccatgaccggtcctttagttatacaggcgattcccaggcacaggaattgtgtctgtaccttaccaaggctgcatccgccccttacttcgaggtgttggagaaatggatttacaggggaattatacacgatccttacagtgaattcatggtggaagagcacgagctgcgcaaggagagaatacaggaagactacaatgataaatactgggatcaacgctataccatcgtgcagcagcagatccccagctttttgcagaaaatggccgacaagattctgtctaccggaaaatatctcaacgtcgtgcgagagtgcgggcacgacgttacctgccccgtcgctaaagaaattatttacactttgaaggagcgggcttatgttgagcagatagagaaggcgtttaattacgcttctaaggtacttcttgacttcctcatggaagagaaggagctcgtcgcccacctcaggagtatcaagaggtacttccttatggatcagggcgacttctttgtgcactttatggatctggccgaagaggaactgcggaaacccgtggaggatataacccccccacgcctggaggcactcttggaactcgccctgcgtatgtctacagccaacaccgaccccttcaaagacgacttaaaaattgacctgatgccacacgacctgattactcagcttttgagagtgctggccattgagactaaacaagaaaaggccatggcgcatgccgaccctacagaactcgcattatcaggcctggaagcattttcgtttgattatatcgtcaagtggcccttaagccttatcattaaccggaaagcgcttacgaggtaccagatgctgtttcggcatatgttctactgtaagcatgtggagagacagctttgcagtgtttggatcagtaataagacagccaaacagcactctttgcattctgcccagtggttcgcaggggcttttactttgcggcaacgcatgttgaacttcgtacaaaacatacagtactatatgatgtttgaggtcatggaacctacatggcacattctcgagaagaatctgaaatccgccagtaacatagacgatgtcctgggtcaccatacaggcttcctcgatacttgcctgaaggactgcatgttgaccaatcctgagctgctgaaagttttttcaaagctgatgagtgtgtgcgtcatgttcacaaactgtatgcaaaagtttactcagtccatgaagttggatggcgagttgggcggtcagactcttgaacactcaacggttttagggctgccagctggtgccgaggagcgcgctcggaaggaactggccaggaagcacctcgctgagcacgccgatacggtgcagctcgtcagtgggtttgaagccaccattaacaagttcgataagaatttctctgcccacctcctagatcttttggcccgtctctcaatatactccacatctgattgcgaacatggaatggcatctgtaattagcaggcttgacttcaacggcttctatacagagagactcgaacgcctgtcagccgaacgcagccagaaggctacgccacaggtcccagtcctcaggggcccacccgcaccggcaccacgggtcgctgtaacggcgcagtag

SEQ ID NO: 27406 - DNA, 2289 bp, synthetic construct
  source 1..2289: mol_type = other DNA; note = Synthetic coding sequence
atggccatgcaggagaagtaccctaccgaggggataagccacgtgacctccccgtcttctgacgtaatccagaaaggatccagccttggaactgagtggcagactcctgtgatctcagaaccctttcggtccaggttcagccggtgctcgagcgtggcagacagcggggacactgctatcggcactagctgctctgatatcgctgaggatttttgtagctcttccggcagcccgccttttcaacccattaaaagtcacgttacaatccctactgcccatgttatgcccagtaccctgggcaccagcccggctaaacccaattctacacctgtgggcccttcttcatctaagctcccattgtccggtctcgctgaatcagtgggcatgacccgcaacggcgacttgggcgctatgaaacattctcctggcttgtcaagagatcttatgtattttagtggagctacaggcgaaaatggcattgagcagagttggttcccagctgttggccacgaacgccaggaagaggccagaaaattcgacatcccttccatggaaagtactttaaatcagagcgcaatgatggagacgctctacagtgatcctcatcaccgtgtaaggtttcataatccccgaacaagcacaagcaaagaattgtatcgagtgctccccgaagcgaaaaaggccccaggttccggagccgtgttcgagagaaacgggccacattccaatagtagtggcgttctgcccctgggactgcagcccgctcccggactatccaagcccctcccaagccaggtgtggcagccttctccagatacgtggcatccacgggagcagtcctgtgagctctcgacttgccgtcaacagctggaactgattaggcttcagatggagcagatgcagctccagaacggagctatctgtcaccatccagccgctttcggtccctcccttcccattctggaaccagctcaatggatttccatcctgaactcgaatgagcatctgctcaaagagaaagagctccttatcgataagcagaggaagcatataagccagctcgagcagaaggtgagggaaagtgagctgcaggtacacagcgccctcttaggcaggccagcaccgttcggtgatgtttgtctccttagacttcaagagcttcagagagaaaatacattcctgagagcgcagtttgcccagaagactgaggcattatcccgagagaagattgacctggaaaagaagctttcggcctccgaggttgaagtccagctgataagggagagcctgaaggtggccttacagaaacactccgaagaagtcaagaagcaggaagaacgcgttaagggccgagacaaacatataaataacctcaaaaagaaatgccagaaggaaagcgagcaaaaccgggagaagcagcagaggatagaaaccctcgagcggtatttagctgacctgcctacactggaagaccatcaaaaacagagccagcagctgaaggattcagaactgaagtcaacagaactgcaggaaaaagttaccgagctggagagtcttctcgaggagacacaggctatatgtcgcgagaaggagatccagttggaatccctccggcaacgagaggctgaattctccagtgccggacacagcctgcaggacaaacaatctgtggaagagacatcgggcgaaggtccggaagtggaaatggaatcatggcagaaacgctacgactccctgcagaaaattgtggagaagcagcagcagaaaatggatcagctcagaagtcaggtacagtctctggagcaggaggtggctcaggaagagggaacttcccaggccctcagagaagaggcccaacgccgagactccgccttacagcaactgagaacggctgtgaaagaactatcagtgcagaaccaggacctcatcgaaaagaacctcacgctccaggagcatttaaggcaggctcagcccggatctcctccttccccggatactgcccagctcgcccttgaactccaccaagagctggcttcctgtttgcaggacctccaggctgtatgctctattgtgactcagcgggctcagggacacgatcccaacttgagcttgttactgggcattcattccgcccagcatcctgagacacagctagatctccagaaacctgatgtcataaagaggaaactggaagaggttcagcagctgagaagggacattgaagacctgaggactaccatgtctgatcgctacgctcaggatatgggagaaaactgcgtgacacagtag

SEQ ID NO: 27407 - DNA, 1443 bp, synthetic construct
  source 1..1443: mol_type = other DNA; note = Synthetic coding sequence
atgatcgtggcggattctgagtgcagggccgagctcaaagattacctgcgattcgcacccggtggcgtgggggattctggcccaggcgaggagcagcgggagtctagagctagaagaggccctcggggacctagtgcattcattcccgtcgaagaggttctgagagagggcgctgaaagtctggagcaacatctgggattagaagcactcatgtcatcggggcgagtcgataacctggccgtggtgatgggcctgcatcccgactatttcacaagtttctggaggctccactacttgttactgcacacagatgggcctctggcatccagttggaggcattacatcgccattatggcagcagccagacaccaatgttcttacctggttggatctcacatggcagagttcctgcaaaccggaggtgacccagagtggctcctgggcctccacagggccccagagaagctcaggaagttgtcagaaatcaataagctgcttgcccaccgtccatggttgattaccaaagagcacattcaggccctcttgaagaccggtgaacacacatggtccttggcagagctgattcaggcactagtgcttctgacacactgtcactcactcagcagtttcgtcttcgggtgcggcatcctacctgagggcgacgccgacggtagccctgctccccaggcccctacaccaccgtcagaacaatcatctcctccatcccgggatcctctgaataatagcgggggatttgaatctgcgcgagacgtcgaagctctgatggagcggatgcagcaacttcaagagtcactattaagggatgagggtacatctcaggaagagatggagtcacgttttgagctagagaagagtgagagcctgctggtgaccccaagcgcagacatccttgaacctagcccccatccagatatgttgtgtttcgtcgaagaccctacctttggttacgaagatttcacccgtaggggagcccaggctcctcctacctttcgtgctcaggactatacttgggaggatcacggatactccctcatccagcgactctatcctgaggggggacagctgcttgacgagaagttccaagctgcgtactcactcacatataacactatcgcaatgcacagtggagtggatacctccgtgctaagacgcgctatttggaattatatccattgcgtgttcggcatcaggtacgacgattacgactacggagaagtgaaccagctcttggaaaggaacctgaaagtctacatcaaaacggtcgcctgttatcccgaaaaaacgactaggcgcatgtacaatctcttttggaggcactttcgccactctgagaaagtccatgtcaacctccttctcctcgaagcacgaatgcaggcagcgttactatacgcactgcgtgcgatcactcggtacatgacgtag

SEQ ID NO: 27408 - DNA, 633 bp, synthetic construct
  source 1..633: mol_type = other DNA; note = Synthetic coding sequence
atgcctggggtcaagttgacgactcaagcatactgtaaaatggtattacatggggcaaaataccctcactgcgccgtgaatggcttattggttgccgagaaacagaaacccaggaaagagcatttgcctctcggcggacctggagctcatcacaccttgttcgtagactgcatccccctcttccacggaacgctggctttagctccgatgctggaggttgccctcacgcttatcgattcttggtgtaaggatcacagttatgtaatagcgggttattaccaggccaatgagagggtcaaagatgcatcacctaatcaggtggctgaaaaggtggcctcacgcatagccgaaggattttcagacactgcactgattatggtagataataccaaattcacaatggattgcgtggccccaacaatccatgtgtacgaacaccatgaaaatcgctggcggtgcagagatccacaccacgactattgcgaagactggccagaagcgcaacggatcagcgcatccctcttggattcacggtcctatgagaccctagtggactttgacaaccatctagatgacatcaggaatgactggacgaaccctgaaatcaacaaagcagtcctccatttgtgctag

SEQ ID NO: 27409 - DNA, 1059 bp, synthetic construct
  source 1..1059: mol_type = other DNA; note = Synthetic coding sequence
atgacggaagccggtaaattgccactccccctgcccccaagactggactggtttgtacatacccagatgggtcagcttgcacaggacggcgtccctgaatggtttcatggcgcaatctcacgagaagatgctgagaacctgctcgagagccagccactcggttctttcctgattcgagtctcccactcccatgtgggctacaccttgtcctacaaagcccagagtagctgctgccacttcatggtaaaactcctcgatgacggtacttttatgatccctggggaaaaagtggcacacacgtcgcttgacgctctggtaacatttcaccagcagaagcccattgaaccaagacgagagctgctaacacagccctgtagacaaaaagacccggcaaatgtcgactatgaggacctctttctctacagtaacgcagtggctgaggaggcagcatgtcctgttagcgcgccagaagaggcgagtcccaagcccgttctgtgccatcagtccaaagagcgcaagccttctgcagaaatgaacagaatcaccactaaagaggccacttcctcatgccctcctaagagtccactcggcgagacacggcagaaactctggaggagcttaaaaatgctaccagaaaggggccagcgtgtgaggcagcaacttaagtcccaccttgccacagtaaatctcagtagtctgctcgacgttcgcagatcaaccgtgatcagcggacctggcacagggaagggtagtcaggaccacagcggagacccaactagcggggaccgcggatatacggacccttgtgtagcaacctccctgaagtctccaagtcagccccaggcacctaaagacaggaaggtaccgaccagaaaagctgaaaggagcgtaagctgcatcgaggtgaccccaggtgatcgtagttggcatcagatggtggtccgggcactgtcctcccaagagtcgaaacccgagcaccagggcctcgcggaaccagaaaatgaccagttgcccgaggagtaccaacagccccctccattcgctccaggatactgctag

SEQ ID NO: 27410 - DNA, 480 bp, synthetic construct
  source 1..480: mol_type = other DNA; note = Synthetic coding sequence
atgacccactgttgctctccatgctgccagcccacttgctgccgtaccacttgttggaaacctactacggtgaccacttgtagttccacaccctgctgtcagccttcatgttgtgtctctagctgctgccagccttgctgcagaccgacatgttgccagaatacgtgctgtcagccaatctgtgttacctcctgttgccagccaagttgctgctctacaccctgctgccaacccacctgttgcggtcaaaccagttgtgggagctcctgcggacagtcctcatcctgtgcgcctgtgtattgccgcagaacttgctaccacccaaccaccgtctgtctgccgggttgcctcaaccagagctgtggctccaattgttgccagccatgctgccgcccagcctgctgcgagaccacctgttgtagaacaacatgcttccagcctacatgtgtgtcaagttgctgtcagcctagctgttgctag

SEQ ID NO: 27411 - DNA, 615 bp, synthetic construct
  source 1..615: mol_type = other DNA; note = Synthetic coding sequence
atggaccctaaggaccggaaaaagatacagttctcagtgcccgcaccccctagtcagctggacccacggcaggtggaaatgatacgaaggcgcaggcctacgccagcaatgctctttcgattgagcgagcactcatctcctgaggaggaagcttctccccatcaaagggcttccggagagggccaccatttaaagtctaaacggccaaacccttgtgcctacactcccccatctctgaaggctgtgcagagaatcgcggaatcacatctgcaatcaatcagcaatcttaatgaaaaccaggcatcggaagaggaagacgaactgggtgaactccgtgagttgggctatccaagggaggaggatgaggaagaagaagaggatgatgaggaggaggaagaagaggaggattcccaggcggaagtgttgaaagtaattcgacagtccgccggacagaaaaccacttgcggacaggggctggagggtccatgggaaaggccgcctcctctcgatgagagcgaaagggacggaggcagtgaagaccaggtcgaagaccccgcactttcagaacctggcgaggaaccccagaggccaagcccttctgagcctggaacttag

SEQ ID NO: 27412 - DNA, 2061 bp, synthetic construct
  source 1..2061: mol_type = other DNA; note = Synthetic coding sequence
atgaccgacgcgctgctcccggcagcacctcaacccctggaaaaggagaatgatgggtactttagaaaagggtgcaaccccttggcacagacgggacggagcaagttgcagaaccagcgcgcagctctgaaccagcagattctcaaagccgtgcgcatgagaacaggtgccgaaaacctattgaaggtggcaaccaattccaaggtcagggagcaggttaggttagaactctcttttgtgaactccgatttacaaatgctgaaagaggagcttgaagggcttaacatatctgtcggcgtgtatcagaatacggaggaggcattcacaatacctctaataccattaggcctaaaggaaaccaaagacgtggatttcgctgtcgttctgaaagacttcatactcgagcactactccgaagacggctatctctacgaggacgagatcgcagacctcatggacctgcgccaggcttgtcggaccccatcaagggacgaggctggagttgaattgctgatgacttatttcattcagctcggattcgtggagagtcggtttttcccccctactaggcagatgggattgctgtttacctggtacgattccctcactggagtgccagtgtcccagcagaatttactgctggaaaaagccagcgtcctgttcaataccggtgctctttacactcagattggcactcgctgcgatagacaaacgcaagccggactggagtctgccattgatgctttccagagggctgcgggtgttttaaattatttgaaggacacattcacgcataccccttcctatgatatgtcaccagccatgctgagcgtcctggtgaaaatgatgctggctcaggcccaagaatcagtctttgaaaagatatccctgccagggatcagaaacgagttctttatgctggtaaaggtcgctcaagaggccgcaaaggtgggcgaggtttaccagcagctccatgctgccatgagccaggccccagtcaaagaaaatattccttattcatgggccagcctcgcttgtgtgaaagcgcaccactatgccgcacttgctcattactttactgcaattttgcttatcgaccaccaggtgaagcctggaaccgacctcgaccatcaggagaaatgcctgtcccagttatacgatcacatgcccgaggggctgaccccgctcgccactctgaagaacgaccagcaacgtcggcagctgggcaaatctcacctgcgccgagccatggctcaccacgaagagtctgtgagagaggccagcctctgcaaaaagctgcgctccattgaagtgctgcagaaagtgctttgtgcggctcaggagcgcagcaggctaacgtacgcacagcatcaagaggaggatgacttgttaaacctgatagacgccccatccgtggttgcaaagacagagcaggaggtggacataatcctgcctcaattttcgaagcttaccgtgacggacttctttcagaagctcggcccattatcagtgtttagtgcaaacaagagatggacacctcctagaagcattaggttcaccgccgaggagggtgatctcggttttactcttcgcggtaacgcacccgtacaggtccactttctcgacccatactgttccgctagtgtggctggagccagagaaggggattacatagtcagcatacagttagttgattgcaagtggctgactctttccgaggtaatgaagctgttgaagtcttttggcgaggatgaaattgagatgaaagtcgttagccttctggactccacatcgtctatgcataacaaatcagcaacgtactcagtgggtatgcagaagacatactccatgatctgtctggccatcgatgatgacgataagaccgacaagacaaagaagattagcaagaagttgtcgttcctcagctggggtaccaataaaaacaggcagaagtctgcttccacactgtgcttgcccagcgtgggcgcagcgagacctcaagtcaagaaaaagctgccttcccctttttctctccttaattcagattctagttggtactag

SEQ ID NO: 27413 - DNA, 1254 bp, synthetic construct
  source 1..1254: mol_type = other DNA; note = Synthetic coding sequence
atgccactctacgaaggccttggatctgggggagagaagacagccgttgtgatcgatcttggggaggccttcaccaaatgcgggtttgcaggtgaaaccgggccaaggtgcatcattccatccgtgattaagagggccggtatgcccaagcccgtgagggtggtgcagtataatattaataccgaggagttatactcttacctgaaggagttcatacacattctgtacttcagacatctgcttgtgaatcccagggaccgccgagtcgtgatcatcgaaagcgttctctgtccgtcccacttccgagaaaccttgacccgggtgttgtttaaatactttgaggtgcccagcgttcttctcgctccgtcacacctgatggctcttttaactctcggaatcaatagcgccatggttctggactgcggatatcgcgagtcgcttgtgctgcctatatacgaaggcatcccggtgctgaactgctggggcgctctgccgctgggaggtaaagccttacacaaagagttggaaacacagctgttggagcagtgtaccgtggacacaagcgtggccaaggaacagtcacttccttcagtcatggggagcgtgccagagggagtcctggaagacattaaggcaagaacctgtttcgttagtgatctgaaacgcggtctgaaaatacaggctgctaagtttaatatcgatgggaacaacgaaagaccaagcccccctcctaatgtggattaccctctcgacggcgaaaagattctccacatcctagggagtattagagacagcgtggttgaaattctcttcgagcaggacaacgaggagcaatctgtagccactttgatactagactccctgatccaatgccccatcgatacacggaagcagctggctgagaatctcgtggttattggaggcactagcatgttgccaggattcctgcaccgacttctggcagaaattaggtacctggtcgaaaaacccaagtataagaaggcactgggtacaaagacatttcgaattcacaccccaccagccaaagcaaattgcgttgcgtggctgggcggagccatcttcggcgcactccaggatattttaggatcaaggtccgtttccaaagaatattacaaccagacaggaaggattcccgactggtgctcactcaacaaccccccattagagatgatgttcgacgtaggcaaaacacaacctcctctgatgaagcgggctttctctacagaaaaatag

SEQ ID NO: 27414 - DNA, 2643 bp, synthetic construct
  source 1..2643: mol_type = other DNA; note = Synthetic coding sequence
atgtcacaacccgcaggcggacggagaaagccacggaccctgggtcccccagtgtgttcaatccgcccattcaagtcttctgagcagtatctcgaagccatgaaggaagatctggctgagtggctgagagatctgtatggcctggatattgatgccgctaattttctgcaggtactcgagaccggtctggttctgtgccaacacgccaacgttgtcactgatgccgctctggccttcctggctgaggccccagcccaggcacagaagataccaatgcccagagtgggagtgtcctgcaacggagcagcacagcccggaacattccaagccagggacaacgtgtctaactttatccagtggtgcagaaaagaaatggggatacaggaggtcttgatgttcgaaaccgaagacctggtattgcgcaagaacgtgaaaaacgtggtattatgtctcctggagctcggccgtcgcgcttggcgattcggagtggcggcacctactctggttcaactcgaggaggagatcgaggaggaagtgcgcagagaactggccctgccacctcccgatccatccccccctgctccacccaggcgtcagccctgccacttccgcaatttagaccagatggtgcaatccctggtttcccattgtacctgcccagtacagttctccatggttaaggtgagcgaaggaaagtatcgggtgggcgacagtaatacgctgatcttcatcagaatcctgcgcaatcacgtgatggtgagagtggggggaggttgggacactctaggtcattacttggacaagcatgatccatgtagatgtacttcattaagtcacaaaccgggaagcttcctgaagcctccagcaccacccgtccagcacgaagtcagggttcaagatggtccctcacaaacccagcccaccatgacaatcagtaggagtcagagtcctcctccacccgtcgactggaaaacgtacacttctagcgatcggagactgcgacctcccactccatcttcgccgcgacctcgacgcgaacgcggagctgggacgggtgccagtagagagatggctcccttcctgcgatgccaggagagatctctgattccgagttggaggcaaccaactgcgggtgatagccccccatcaccacagagctccagcactcagaaaggacgtgaccctcaatgcaccagctcaggcaagagagaagagcgatatcctcctgaactgcctagaggtcgcatcccaacctcttgggtgcatgaagaaactgatagttggggtaccgacgcgggaaatccaacccctcaacgcctaagggccatcgaagccaccactaaaggaattagcgctagaggccctagtccactccccaggtcttttggacccgcagagtgcctgggtcttagattgccgcttcgtgacgaggcaaaaggcgcatttttccagtttagagaaccggaatctgtaagatccccaacaccagtacaggggcttaccaagatcccaatcagattgccgccagccaggccaccaactccgggaaggtcttttccaggggctaccagtggttctccccgaacagagttgggacgggatccaatccctttgagagctgtgaccgttgacctggccggttccacacacggtgattgtagcgtcgaagtccggcaagaggaccagcagttagacatccaagtcatggccgaagctcgcgaatcttgggaccttggactgcaggagcaggaggggcgatacactccactgcccctcggtgggaacaaagagcaagcaatttattgcagcttggaagaggaaatcctgggcaatatgaaactgttggaggttcgtagcgcgtgtcctcagggcactcggtctggcgtgatacctagatccggggtctacatcccgaggttggcaggacagtggcccgaacctggtggcccttatgataaagccatccaagagttagctcaagggtctccctcgttattgaaggttgacctggaggcatggaaggccgctccaactggttcaccaaagcccgctgtaactccagggccaggcagtctcaaaggaaaactcggggctaggcagtccgggcctcggacgaaggcttcattgtctgcaaaagggacccatatgaggaaggttcctccccaagggggacaggattgctcggcatctacggtatcagcctctccggaagcaccaactccatccccacttgacccgaattccgacaaggcaaaggcttgtctcagcaagggtcggaggacgttgaggaagccaaaaagggtgccatctatctacaaactcaaacttcggcctcgcattcggcctcgcagagaccacagacccgaaaaacagccatcacgcatccctaggcccctagcatacgttttcctgggtcccgctcggcagccccctaaggaccggcttctccgggcagtacttgggtccaagggcggtgaagcaagtcgggtggacggtgcgtctgtgggcgaagaagaggaggagggcaaggaggagaaggaacccgctgccccactggaaagttcacctcagcctccagagggtctgcagccccactggctgaatcaggcccctctgcccccagaggaggagtcttgggtatag

SEQ ID NO: 27415 - DNA, 14262 bp, synthetic construct
  source 1..14262: mol_type = other DNA; note = Synthetic coding sequence
atggtgccagaagagagacgtgtcggcttgagcagtgacgagacatcttccgatagcctgaagtcgtggcattctatctgcgtccttgacagcaaagagcagcctcttgcatgccagcagaagcagagacagtttgtgaagcctgtcaccgagagtgagcagcccactgtgctggagctgctccttgccgagctgaggactttgttttctgcggtcctccaagattcttcaccagccgcttggagatacctgcacgctgtattagggcttctgccaccatacagggagctgttggtcggccacctcgatcttttgccttttctggagcagctctactgttgggccccatgggtgcagacccatctccacctggatttgctgggggctatcgtgcaggcctttccccctgattcctcactgctggattccgccagtcacgctgactgctgtccgcaaaagcgacgactgcatcatcgccctccgtgtccagcctgtccttttgtgcaggcacagtggagccggcaacaggtcaaggaagaactggcaacctggctgcggcctctaaccctacccgagttacaaagatgccttggtatagtgggggctcaagtggccctcgaagaagcggtttggttggacgggctgagtttgctccctctggccttggccgcagatatccccgtccgatatgaatcttccgacactgacaatgcggaagtagagccagtgggcaggaaggagacaagatcccagttggactatgaagtgcccagagaaaaagcattccagaagtcctctaccgggttttcgccggaaacctccttcctggacagccaggtgatgaccgcgttgaaaatggaacggtacctcaaaaaaattcattttctctatctgaatgtggcgccatcaagatactttagaccttactcactgatggtagtgcctcccgacaaggtgaaccccgagcattacatatttagcccgttcggcattctgcatgttcatcctgtcgaaggctccgagacaatgaccctaggaacatggcatcatcattgtgtgctgtggcagcagctccagtttatcccgtttttcaagtattgtctcttgcgtaagagcttcacatgctggaagaagaatgtgcgcctccagggactgcatagactccagaaattcctcgagaaccacttactgctggccgttccacatttcggcgcagggcttctgcatatttctaggctcttacaggagctccacagtgtttcctggctgcctcaggaactagacagatgctatgaattgttagaccttcaaacagccttggcagaggaaaaacacaaggcattgcgcctccttcacaggtgcctcaatctgtgcacaagtatcctgaggctcgtccacgaagacacataccacatgcagcaatgcttgcaagaacgggtgcagaactgtgatcgaatcagaacaggccaaggctctatctatctgcagagagtgcagcataaacagcttgaacaaaaacttaaacaggccgaagcctggtggctccagctcgggaagtttgccagactggtcgactacatgatctgtcagagtctgatctccgtcctggaagagcaaattacatcctttgtcgcaaatatcctgcaagcccctcgccagaaaccctttctatcctcccagttggtgttcgacgatcatggccagctatctcatgtaccttgcgtggagaatatgatccaaaccctgactggcggacttcagagtgtcaagacatctgcactacaggtagtgcagtccgcagatttgaagacatccagtgatagcctctattccgaagaggaggatgaagaagaagattcgaaggacgagtttctcatgccaaaatttcagggtcaaccctctgatgcagttagtattttctgtgggcctaacgtcggcctcgtgtggccttggaagagccaccctattgcaggcatcctggaggttagggggtgcaggctcaggggccagtatttccctcacaactacaaacagctagaggaggatctggacaacaatcccaaaattcaacaggccttgaatatccagcaggttctgcttgaaggtgtactgtgtaaagtgcaggaattctgccgagagcatcactggatcacaggcatatatgaattcttgcagtcatggggcccacagaaactcgaagatatgaggggtggccctattaagaattatgtgactctagtgtccaggctgaatgtgtggcaggcaagggtttccagcatgccgattgagctgttaaccaaaggcggtctgctgctgctctcttgtcacgatgttcaagcagaaatggagtctaagctaaattcgattcgcaaagatatattggcgcacgtccagaatgagtgctggaatctatctcagcagctcatgacggaactaaccgatttcatgcacatctttagaacaattaattccgatatccacgcaattgcacagtgcacccaaaagctgaacgaagctaatgaacaatacgttgagcttgaggagcggatggaatacgtcagggctctccacgaactgatacgcaaccacttttctttgtttagcgctgaaaatgaagccctggatatttccgttagaagacagtttggagagagccccataccaccctgccccccacccccacaaccccatctattacactgtccactgcttgctccacaactgctcgatatgtgggaggcctttcagtttgagaaaagccaagcatcagaattcctactgtccaagaggcacgccattatgcccaaactccaacagctgatggcggcagctttggctgagctagaaggactccttgctaaggcgctctctggcccatttatggatcctacgcaggatcaacgcagtaccgagcaccagttggtctccctggagcggcaatttcagaatactgtgtctgacctctccgagctgcaccacgcttatgcaatctttacagaagatgagacgcctgtgcctctgccaatctgtggtacgcgcccaattgtgcaacagcagagaatatggcatctgtatagggtgatttccgagaacattagtgaatggaaatgcatggcttttgccaaattttcacctgctatggcacaggagaaaactgaggggtggttgaccgaggccgctcgcatgtccacaaccctcgaactccattcacccgttctccagcattgtatgcgcattttaggagaatttagatcctaccttcccttactgacaaagctcggatccctgcacccccagtcccttaactgccagtgcctcctgcgggctctggggctgggctctttgcagacgattgaactgctgacactcggacagctcctcacctaccctctactcgagtttgcggatcgaatcaatcaagtctggcagaatgaaaatgagagaattcatgcccaggagacaatccgcagactgcagaggtattgggaggccaggcagctcaggttgctgaactttatcctgcacgttccttacgaacccccagcatcggagcggtcaaagagacaggtgctaaggtctcctcaatgggaggtagtcgataaagattctggcactttcattctgtctgattactccaatctacaggattcaatacaggagtcactccaggtcctatccaagatactggcgattgagaagtctggcgatctgaacaagatagcccttgaatgggtagccattatgcacggcctgggagccctactcgaagtgtggctaacctttcagcagaaatggatctttttaaataaagttcttcacgagatgaaaatacagtttcccaacgctgacctgaactccaggttcaaggtcatggacgatcagtacagaaccctgatgagaattagcgtggcagatcctatggttctgtcattggtggtgcccagtgctgagaggagcccttacttccagggtcaacaactgcaacagcttctgcaggccggaagtgtcgagctagaaggcataatcatgagcctagagagcgtgctgtacggggtgtgcgcgcactttcctcgcttgttctttctttccgacagcgagttagttgcacttctggcagccagactggaatcttgcgaagctcagctgtgggtgaggcgatgcttcccacatgtgcatgctgtctcctttcgttcttgtcccactggggagaagaacactgatgattgggagtcatcccctaacacacaaacacaggtcgaggcgttagctgtcttgggggctggaggagaagaggtgaagcttcagggaccgttacctctgcatccagacctgcccaaatggctcgcaagcctggagaaatgcctgcgcctcgcacttgtccacatgctgcagggttgtgtggcagcacggctggccagagggccttccctgggagaggccttgaagcagctgcccaaacaaaacaaactgtatttgcagctgtatgtgcagcactggattgatctggtgcaggcattcccctggcagtgcgttctggtggccgaggaagtggtatggcgggcagaaatggaagaagctttgctggaatggggaacactggccatggtatccatgcacatgaggaagctggaagtactcgtcaatttcatgagggcccagcgagccagtcaaggcggacagtctctgccctctgtgcgtcagacttccttactctccgcattgttggttatggcagtgacacaccgtgacatcgcccagctgcttgaacaacaccaggtttccgacctgacagatttccattgggtccggcagttgaagtatcacctgggctcacctcatataattccaaagtccccgctccaatcactcaagactattgcctcaagtgaaccctccttaagccccgcagcgtgttggatcgatgttttaggaaggagtttcttgtacaattacgaatacctggggccaagacttgggcctctacccagtctgctgcccgaaagaccagccctggtcctactgctcgctctggaggaggtcgcttgtggtaccgtgctgggtcctaatggggtgggtaagagggccattgtgaactccctggcacaagccctgggtcggcagctagtcatgcttccatgtagccctcagattgaggcccagtgtctctccaactacctgaatggcgctcttcaagggggagcttggttactcctggagaaggtccaccaacttcctccaggcctcctcagtgcccttggccaacggcttggcgagcttcatcatttgtacgcccctctgtatcaggaagcgtcacgcaatacaagtaccattgatccgacacagccacagctactgggcagttccttctttgaaaagcaccacgtgagcgtccgactgggatacggctgcttgctggtcctcagggccctgagtagcgccgtccctgccaatctgcatctgcttctcaggccagtggctctcgcgctcccagacttacgacaggtggccgagctgacactcctcggagccggaatgagagatgcgttccagatggcgacccggcttagcaaattcttctctctggagagggaactggtcagcgggcctctgccgtgtaggttgcccctgctgaaacaaatcctggaggatacaatccggactttgaatgtgaccaaagaagagccgaagtgtcaaaagcccaggtctctggctgcaattgaggaggccgctctccttcggtccccattgttcagtatcttgaacgggttgcaccttcacaatctgagagggctcctctgtgctttattccccagtgcatcccaggttttggcagaacctatgacttataaactcatgaagccactggtagtggaggagttacagcaggttggattggatccttctcctgatatcttggggagcctggagcagctttcacaggccctgagccgcgcttccggaatcctactgctaggcccagccggatctggaaaaacaacatgttggcactctctattcaaaatacagaaccggttggcagcaatggaggacactagcactcaaggatgtcaacccgtggagatcacgcacctttatccgtccggcctcagtcctcaagaattcctgggctggctcgaaggttcttgttggcaccacggcatattccctaaagtcctgcgggcagccggacagtgcaataacatgggacaaaaaaggcaaaccgaggagagcatcgggattcagcattggattatttgtgatggtgccagtaatggagcctggctcgactcaattacttgcctcctctctgagttgccccagctgagcttgcccagcggccagcaaatagctagaccacctggcacgtttctacttatggaggtggcagacaccaccgggatctctccaaccgtcgtcggttgttgcgcacttgtttggtgcggaggcgagcagacctggcaatgcatccttagtgcactgatggcctctttgccttacgagtatcgccttcagcatcgaaccgtggcagaattaaatcacatggccgaagtgttggttcctgcaacgctccgatttcttacatgccagggtgtgtcatcattgttacaggtgcacgggcagcaagcagtatgcgcgggtgtcgcggaagtgacctctatggccaggattttacacagccttctggacttgcacctgaggctgaaggaggaaaaagctcccggacccgaagacttgtcgtacagtgaccccgtggctcagtcattccgtagtagtaagtcatccttcctgaaccggtcccaggtggacagcgacgacgtcccagacaagtgcagggaacacctcctggctgtgtcctcctttctgtttgccctgatctggggttttggtgcccatctgccgtcaagattttggccgattttcgacacgtttattcgggactctatctcccgcttgagcaattacccggaacctcctccctcagctctcgtgttcgacctgcatgtgagccctgaagatggaaccctggtgccattcacggggcaatacttaagcagtcacatcaaaggcacgttggggacatttcatcccagcattcagactgagcgcctcctctatgtagtggatttgctgttaagtggaggtcagcctgtgctgttggcaggagaagctgctaccggaaaatctgcctttgtggaagtgctggtcgagccacatcacccctatatttactctcccatccatcccgctttttcctcaagccaccttaggttgctactgtcaagaggcatccagggccaaacacaagcaagcccacagccagggcatcatcaggattcgaagccatcactgcttttcctcctggaagacctgcacctggccacctccgatcctgaaaagtcctgccaaccggttctggaaactctccggcaagccatggatggaaccgtgtatgctcacagtacgctggagctacaaaccctccagccgacggtaaattttctagcaactgtgactgtccccggatattgtgaaaggcctctttgcccacggctgttcagactgttcacagttctggccctggagtccatgactcaggccacattactcgaacgccacgtgcctataatccaggcttggctcgaacgttttccatctgtcgagcgggagcgcgcactagcacggggtctggtgagagccagcgtggaggcttgggaggctgtgtgtaattgttttatgccctcacccctgcatcctcactatcattttagtcttcattcagtaagtcatcttttatcatcactacagctactccccaatcgaactggctcaaggggcttcgtcgattaccctaatcatcaggagcacctgcgccgagtgagtggccttaggggtacctgtctgaccgttatgatggctacacgaaatgttgtgaggctgtggcttcacgaggcccagagaactttttgtgataggctcgatagcccgcgtgaaagatcatactgcgcaaagcttcttcttgtagtcgcgcagagcgtgttctgttgcgggccagggccacagcacctgggtaaagatcaccaggaaagcgaggaggaggaagaggaggagcgggttccagaagtggagtctgagggagagctggcacagtgggaggacttctctaactctaactccgagactgaggaggaagaggaaccctacggcctgcaagtcgcaagggtgtcaaacagccgggatcctagtctaaccccttccataggtccggtgtcacgcggaatgaaggaatctatttcccacaaaattagacaggaaaagggaaccagagcctccaactatagactgcaggtgagacgatcattcaaaacctggtggcagaagaagccccagatggacctgatcagccctttactacttccagttctcctcctacatccacaggaaaagccttccgatctggtattttctcaagagctcatactcggacccaacagtgagacaccaaatctttacctggaaagacagtgggaaaagttggaggaacaattggccacctcggctgcccagttgaagctgagcccacacctggccaggtgccacagcatggctcaacatgtcgcccgacttgtccgcgtactggccaggcctcgtcagcacggcctgttgctgagtggtgccctgggaactgggcgacatacggcgataacgctggcttcttccatttgtcaggctcattttttccacctgccctccgggtcagaggaagccatattacagtgccttcgagatgcttcatggcatgctgggatgttaagtcagccagtcgctttacttgtgccttcgggagtggacttgacaacactccacaggctcctggccttagctacgtcagggtcctttcccggtcagtatacggaagccgatctagataggatcggcgagcatcttcctcgtgagaatctgggcgtgaagcagaacatcaagaaagaaatggttttacagcggttccatcagcaggtgtgctctcacctgcacctgttctttttaataggcgacaagcaggcacacaaacaactgccatcaaccctctttctcaggttactgcagctggccaccgcttccatagacaggtacgaaccgtgggaccaggccgcactggcaaaggtcgctcagcatcacctagaaggcgcacagagtgttccactcgacgatgggtcttggaaatatcccgatttgcaggcatccattccgtctgtggctaaagctatggccctcatacacctgagcgccacacattaccatgagcacctgtgcccagccctcccactcgtgacacctaagaccttcctcgatttcttagacactttcctgatgcttcaacaacagactatcttgaagatcaagaacaaagcgcagcgcgtacagaatgccctggaaaacttacgaatgctgataaaagagcatgggacccatgcaaacctgatttttgatttagaacagcagctgaaagacagcggcaagagtttatctatgttccagcagcagttggagcagtctaagctgctttacaaacagcagctcgaggagtgtagacaccaggaaaacctgattgaaaatcttgccagacaaagggatgccctgcaagcccaaagagaggccttcctggaacagatgtccaaggcttttctggagcccctctctcagctgcaggtagccgatttcgaggaaatcagatcataccgtgccccaccagaatcggtggtgcgggtgactgatgcaatgtgtgatcttttccatcacgaaactgggtgggcgtcagcgaagcagctgctttgtacagaagatttttaccaggaactggtgttctttcccaaagagaagattaccgattcagaactcataaagctgcacttgatcttaaaggcaccgggaatggacgacgccgcactcagagcagttagtcggccagctgcgagcttagccgcatggctgtgggcagtgctgcactatggacttgcacattgccgcggattacctaccgacctcttgcttcagcaggtagaggccacactcacacgcgaacaagccagacttggctattatcagtttcaggcacaggagacactcgaacacaatcttgccctggcgaagatggttgaggatgctcaggcatcacacaattgcgtcgctaaaaccttgagccaggctcagtgtggacagtatcacaaatggcccatgaaagcggcactattaaccccaatgcgcgcatggacaacccagttgcagaagttgaaaggcagatgcatgaccgttttcggagacaccctgctgtgctcagccgctatcatatatttgggcccttttcctcccttgcggcgacaggagctactggatgagtggttggctctgtgcagaggttttcaggaggcactgggcccagatgacgtggcacaggcactcaagcggaagcaaaagagtgtgtcaattccgccaaaaaaccctttactcgctacccactctcccttcagtatcctcagcctgctgagttcagaaagcgaacagtaccagtgggacggaaatctaaagcctcaggctaagtctgcacaccttgccggtctgcttttgagatctcctactcactactcatcttgtaggtggccccttctgctcgatccctccaatgaggctctgatctggctcgatccactgccactcgaggagaatcgcagcttcgcccctgccctaactgagggcagaggcaaaggtctgatgaggaaccagaagagggagagcaagactgacatgaaggaggaagacgacgagtcagaagagtccaatgaggcggaggatcagacgaaggagcagaaggccgaggaacgaaaaaatgaacaggagaaggaacaggaggagaatgaagaaaaagaagaggagaaaacggagtcgcagggtagcaaacccgcttatgaaacccagctgccctctctgccgtacttatccgttttgtctggcgcagaccctgagctaggatctcagttgcaagaagctgctgcttgtggactccccgtgttgcttacgaatgtggagctcgggttggggtgcgaggaactgcagtggttgcttcagagggagcaactgtctccgcctcaggtccaacctgggttctgtttatatctgagcacaaccctctcgctctgcgccatggaaaaagtgctaggctgtgaattgctgaagggactgaatgtgttagatcttggactcaacatggagatactggaggagcagatgctccatgagattttatgccgcgaatacccagagctggaaactcggtggcaggatctcaaaattcgggcactggacacttgtaaggcagtggaggccgctgaggagcgcttgcttacgatgcttctgtttcagaatccgaagaggcagaagcctgccaagtttctgcgcaatatcgtgcgtgcgcaagggaaactctgccagcttagggcccactgtgaggaattggagggccagaaactgcaggaaatggtgctgtgggcaccatacaggccagtagtgtggcatggaatggctatggtgaaggcactttctcagctgcagaatctgctgcccttattctgcatgagcccggagaactggttagccgtcactaaacaagcgctggactctatgaagccacgtgagattaatcacggcgaggacctcgcctcacacttattgcaactacgtgctcacctgacgcggcagctgttggggagcactgtgactgctctcgggttgacacaggtcccgctcgttggcgctctgggagctctagccctactgcaggcaacaggaaaagcatcagaattagagagactggctctctggcccggtttggccgcttccccatctacggttcactccaaacctgttagcgatgtcgctcgcccagcctggctggggcctaaggcctggcacgaatgcgagatgctggagctcctgcccccattcgtggggctttgtgcttctcttgccggtcactcctccgcctggcaagcctacctgagcctttcaagcaccgtcttgggacctgctcccggtcccggacctgagcccctctctctgttacagaagttaattctgtggagggtcttaaggcctgagtgtttggcaggcgcacttgcggactttactacttcattgctcggcaggccactggacgaaaacacttacgcaccaaccatgccctttaagcatagccaggctacacagcctatgttgatactgcttcccccacccggtcatccctctgcgaccctgcatcctttgacagtcattcagaaactcgcagctaagtatcagcaggggcagaagcagctgcaggtgattgctctaggctccgaggcatgggacccagtctccgttgtggtgtcaacgctaagtcaggccatgtatgagggccactggctggtgttggataactgccatctgatgccccactggcctaaggaactactgcagctgctgctggagctccttggtcgcgctaaggtcgtggccgacctcgaatcggaacagttactcgatcagcctgagagtcgcaacgtttcaaccgtgcatcgggacttcagactgtggctcattgttccagcggagtcctctgcgagtctgcccgcagtgctgacgcaacattcaatgccggtattctggaaccaatctctggaattaggccatgttctgattgactctgtggagctggcccaacaagttctgtatatgcaaccccctacccaggccctgccactgctgctacttcatggacttcttctccatagacagctttatggaaccagactacaggcgcaccggggtcgctggtcccaggtaactctgacacaagtactgcagacacaagatcagttatgggccagtctgagcaacccaagagctgccatgcaggaactggcggcttcagtgttttatggtggacctctgggtgatactgaggaccgggaggcgttaatttctctcacgcaagcctgcctgagcccgtcctctggctcttgggttcagccacatactccacagagcctgctcgccactcttatgcccctcccagaattaagagaattagatgcaatggctgagtgtaaggcccaaatgcacctgttaccctcgcctccggagcctcgtctctgcggcttgtctgaagggcctcaggcatggctgttgagaagacagagcagagctctgctgagtgccctccagaggtcttctccagtgtgggttcctgaatcccgcagaggcgctcagctggctgagcgcagactccgccagcggctggttcaggtcaatcggagactggaatctctgcaggatctccttactcatgtcattcgccaagatgaatcagatgctccttggtcagtactcggcccaaacgcacgtcgtcccctggagggcgtactggagacagaagccctggagttatcacagttggttggtaccctgcagcgggatcttgactgtctgcttcagcaattgaagggcgcacccccatgtccttctaggcggtgcgcagccgtggcccacgctctgtggaccggacgattgcctctgccttggcgccctcacgcccctgcagggcctcagccgccttggcattggctgcgccaacttagccggcgaggtcaattattggtgcggtacctgggggtcggagccgatgccagcagtgacgtccctgagagggtattccatctgtccgccttccggcatcccaggcgcctgttgctggctttacgtggcgaagcagccctggatcagaatgtgccatcttctaacttccccggtagccgtggcagcgtcagttcacagctgcagtacaagaggttggaaatgaattctaaccctcttcactttagggttgagaacgggcctaatccaactgtgccagagcggggtctgctgctgataggtctgcaggtccttcacgccgagtgggatcccattgccggtgcactacaggattcaccctcatctcagcctagtcctcttcctccggtttcaatcagtacacaggcccctgggaccagcgacctgcctgccccagcggatctgactgtttacagctgccctgtgtacatggggggacctctgggcacagctaaactccagagccggaatatcgtgatgcacctaccattacccactaaactaaccccaaatacctgtgttcaaaggagagtgcacgtctgctctccgccactttcataa

SEQ ID NO: 27416 - DNA, 1179 bp, synthetic construct
  source 1..1179: mol_type = other DNA; note = Synthetic coding sequence
atggacctgtttggggatttaccggagccagaaaggtcaccacggccagcagccggaaaagaagcccagaagggccctcttctcttcgacgacttgccaccagcctctagcaccgattccggcagcggcggaccccttttattcgacgatttgccacctgcctcatcaggagatagcggatccctggccactagcatctcacagatggttaaaaccgaaggaaaaggcgctaaacgaaaaacatctgaagaggaaaagaatggctcggaagaactggtcgaaaaaaaggtctgcaaagccagtagcgtgatatttggactgaaaggctacgttgccgagaggaagggggagagggaggaaatgcaggatgcccatgtcatattaaacgacataaccgaggagtgccgacccccttcgagtctgataacacgggtttcttacttcgcagtgtttgacggacacggcggaatcagggcctcaaagtttgcagcacagaacttgcatcagaatctgatcaggaaatttccaaaaggggatgttatctccgtcgaaaagaccgtcaaacgctgtctgctggacaccttcaaacatacagacgaggagtttctgaagcaggcttcaagccagaagcctgcttggaaagatggtagcaccgctacatgtgttctggcagtcgataatatcctgtatattgctaacctcggagattcccgtgcgatactgtgccgctataatgaggagtcccaaaaacatgcagcactgtctcttagcaaagaacataacccaacccaatacgaggagcggatgcgaattcagaaggccggtggcaatgttcgcgatggtagagtgttaggggtactcgaggtgagtagaagcatcggggacggacagtataaacgttgcggggtcacatctgtacctgacatccgacggtgtcagttgacacccaacgatcgatttattttactggcgtgcgacggtctgttcaaagtgtttacacctgaagaagccgtgaacttcatcctgtcgtgcctggaagacgagaaaatacaaacccgcgaggggaaatccgctgcagatgcacgctacgaggccgcatgtaatagattggcaaataaagctgtgcagcgcggttctgccgacaacgtcacggttatggtcgttcggatcggacactag

SEQ ID NO: 27417 - DNA, 2193 bp, synthetic construct
  source 1..2193: mol_type = other DNA; note = Synthetic coding sequence
atgtttggcagaaagcggtccgtctcattcgggggttttggatggatcgataaaacaatgcttgcctccttgaaggtcaagaagcaggagctagctaattcgtcagacgcgactctaccagatagacccctgagtccacccctgaccgctcccccaactatgaaatcatccgagttcttcgagatgttggagaagatgcaggggatcaagttagaagagcagaagcctggtcctcagaagaataaagatgactatataccctacccttcaattgacgaagttgtggaaaagggcggtccctatccccaggtaatactccctcagtttggcggatattggattgaggatccggaaaatgtcggcacaccaacatcccttggaagcagcatatgcgaagaggaggaggaggataatctcagtcccaacacatttggatataaactggagtgtaaaggggaggcccgagcttatcggcgtcattttctgggtaaagaccaccttaatttctactgcaccgggtcttccctgggaaatctgatactgtcagtgaagtgcgaggaagccgagggcattgagtacctcagagtgatcctgcggtccaagcttaagaccgttcacgagagaattcctttggccggactgagtaagctgccctcagtaccccaaattgctaaagccttctgtgacgatgcggtgggacttcgcttcaatcccgtgctgtatccaaaggcctcacaaatgatcgtctcttatgatgagcatgaagtgaacaacacattcaagttcggcgtcatctatcagaaggctcgccagacgctggaggaagagctgttcggcaataacgaagagtcaccagcctttaaggaatttctcgacttgctcggagacaccataacccttcaggatttcaaggggtttcgcggaggtttggatgttactcatggacagactggggtcgaatctgtatacaccaccttccgagaccgggaaatcatgttccatgtcagcactaaactgcccttcaccgacggcgatgcgcagcagctgcagaggaagcgccacataggaaacgatattgtggccatcatcttccaggaggagaatacgccctttgttcccgacatgatcgcaagtaacttcctgcacgcctatattgtggtgcaggtcgagactccaggaaccgagactccatcttacaaggtgtcggtaactgcacgcgaggatgtcccaacctttggccctcctctgccttcacctccagtgttccaaaagggccctgagttccgagaatttctgctcactaagcttaccaatgccgaaaacgcctgctgcaaatcagacaaatttgcaaaacttgaagataggacccgtgcagccctgttagataacctgcatgatgagctccacgctcatacacaagctatgctgggtctgggtcccgaggaggataaattcgagaatgggggtcacggcggattcctggaatcatttaaacgtgctatccgggtccgcagtcactctatggagacgatggttggtggtcaaaaaaaatcgcactccggcggtatcccgggatccctgtctggcggtatctcacacaatagtatggaagtgacgaaaacgacgttctcaccaccagtcgttgccgctactgtcaaaaatcagagtaggagtcccattaaacgacgcagcgggctgttcccaaggctgcataccggatctgaaggccagggggactctcgggcacggtgtgactcaacaagctcaacccccaagactccagacggtgggcacagcagtcaggaaataaagtctgaaacatcatccaatccatcaagtcccgaaatctgtcccaacaaagaaaagccttttatgaagcttaaagagaacggcagggccatttctcggtcatcctccagcactagttctgtgagctccacagctggcgagggcgaagctatggaggaaggggactcaggcggatcacaaccaagcactacgtctcctttcaaacaagaagtgtttgtgtactccccctccccgagttcagagtccccatccctgggcgcagcagccactcctattatcatgtctaggtccccaaccgacgccaagtctcgaaatagcccaaggtcaaatttgaaattccgattcgataagctctcacacgccagttccggagcaggacactag

SEQ ID NO: 27418 - DNA, 1110 bp, synthetic construct
  source 1..1110: mol_type = other DNA; note = Synthetic coding sequence
atgtggtccggtcggaagcttggttccagtgggggttggttcttaagagttctaggcccaggtggatgtaacaccaaagccgctaggccattgatcagttcggctgtatacgtcaagaaccaactttccggaacccttcaaataaagcccggagtgttcaatgagtatcgcaccatctggttcaaaagttataggacgatcttctcctgcctcaaccgcattaagtcattcagatacccttgggcacgactgtattccacctcgcagacgacagtggattcgggtgaggtgaaaacctttcttgccctcgcacacaaatggtgggatgaacagggagtctacgccccactccactcaatgaacgacttgagggtgcccttcatacgagacaaccttctgaaaacaattcctaaccatcagcctgggaaacctctcctcgggatgaaaattctggacgtgggttgcggtggtggcctacttactgaacccctgggtagactcggagccagtgtaatcggcatcgaccctgtagacgaaaatatcaagacagcccagtgtcataagagcttcgacccagttctagacaaaaggattgagtaccgggtttgtagcttagaggaaatcgtggaggagaccgccgagacattcgatgccgtagtggcgtctgaagtggtcgagcatgtcattgacctggagacattcctgcaatgctgttgtcaagttcttaaacccggaggcagcttgttcattacaacaattaataaaacccaactcagttacgccctgggcattgtattcagtgaacagattgcatcaatcgttccaaaaggcacccacacatgggaaaagttcgtgtcacctgaaactctcgaatctatcctggagagcaatggcctgagtgtccagaccgtcgtgggcatgctctataaccctttctcaggctattggcattggtctgagaatacatctctcaactacgctgcatacgctgtgaagtcgagagtacaggagcatcccgcttccgctgaattcgtactgaagggggaaacagaggaactgcaagccaacgcgtgtaccaacccagctgtacacgaaaagctcaaaaaatag

SEQ ID NO: 27419 - DNA, 1782 bp, synthetic construct
  source 1..1782: mol_type = other DNA; note = Synthetic coding sequence
atggaggggtgtatgggcgaggaatcgttccagatgtgggagttgaaccgaagactggaggcttacttggccagggtaaaagcactggaggagcagaatgagctgctgtccgccgagttggggggattacgtgcccagagcgctgacacctcctggagggcccacgccgatgatgaattggccgctctgagagccttggttgatcaacggtggcgcgaaaaacacgcagccgaagtggcacgggataaccttgcagaggaacttgagggggtggccggaaggtgccagcagttgcgcctcgcacgagaaagaactacagaggaggtggccagaaataggcgggcagtggaagccgagaaatgtgccagagcatggttatctagccaggtggctgagttggaaagagaacttgaagccctccgggttgctcatgaagaagagcgagtgggtctgaacgctcaggcggcttgcgcacccaggtgcccagcaccaccgaggggcccacctgctcccgctccggaggtcgaggaactggccagacggcttggtgaggcgtggagaggcgctgtccggggataccaggaacgcgttgcgcatatggaaacatctcttgggcaagcacgcgaacggcttggtcgggctgtccagggcgcacgcgagggaaggctagagttgcagcagctccaggccgaacggggtggtctcctcgagaggcgtgcggcactggaacagaggctggaaggcagatggcaggagcggcttcgcgctacagaaaagtttcaattagcagtggaagctctggaacaagagaaacagggtttacagtctcagattgctcaggtgttagagggtcgccaacagctggcccatctgaagatgtccctgtccttggaggtggcaacataccgtaccctgcttgaagctgaaaactcaagactgcagacacccggtggtggctcaaagacaagcttatcgttccaagacccaaagctggaactgcagtttccacgcacccctgagggtcggcgattaggctcactcctgcccgtgctctccccaacgagtctgccttcccctctgccagccactctcgaaacacctgtgccagcttttctgaaaaatcaagaattcctacaagcacgtacacctactcttgctagcaccccgatccctcctacccctcaggctccaagccccgcagtcgatgcggagatcagagcccaagacgcccctctcagcctgttgcagacgcaagggggtcgcaagcaggctcctgagcccctgcgggcagaggccagggttgccatccccgctagtgtgctcccaggcccagaggagccaggaggccagcgtcaggaagcctctactgggcaaagtcctgaagatcatgccagtctggctccacctctgtctccggaccatagcagcctagaggccaaggatggtgaatctggcggttcccgggtgttttctatctgcagaggtgaaggagagggacagatttggggattagtcgaaaaggaaactgccatcgagggcaaagtagtctcttctttacagcaggagatctgggaagaggaagatttgaatcggaaggagatacaggactcccaagttccactggaaaaggagactcttaaatcgctgggcgaggagattcaggagagcctgaagactctggaaaatcaaagccacgagactttagagagggaaaaccaagagtgcccaaggagcctggaggaggacttagaaacactcaaaagcctagagaagaagaagtag

SEQ ID NO: 27420 - DNA, 3456 bp, synthetic construct
  source 1..3456: mol_type = other DNA; note = Synthetic coding sequence
atgatggccgctgccttggggccacccgaagtgatcgcacagttggaaaacgctgctaaggtgttaatggccccacctagcatggtgaataatgagcaaaggcagcacgccgagcacattttcctgtctttcaggaagtccaaaagtccattcgccgtctgtaaacatattctggagacctccaaagtggactacgtgctgtttcaagccgcaactgctatcatggaggcagtcgtgcgtgagtggatactactggagaaaggctctattgaatccttaagaacttttttgctgacctatgtgctgcagcgcccaaatctacagaagtacgtcagggagcagatcctgctcgccgtggctgtgattgtcaagagggggagcctcgataagagtattgattgcaagtctatatttcacgaggtgtcccagttaatatcgagcgggaatcctaccgtgcagacgctcgcctgctctattctcactgccttactctccgaattttcatcttcgtccaagacatctaacatagggctctcgatggagttccacggtaactgtaaacgggtattccaggaagaagatctgagacagatcttcatgctgacagtggaggtgctgcaggaattttctaggagggagaacttaaacgcacagatgtcgtccgtgtttcagcgatatcttgcactggccaatcaagtactgagttggaattttctgccacccaatttgggccgtcattatattgccatgttcgagtcctcccagaacgtgctgttgaaaccaactgaatcttggcgtgagactctgctggacagtcgggttatggaactgttctttacggtgcaccggaagattcgcgaggattctgatatggctcaggattcgctccagtgtttggcacagctggccagcctgcatggcccaatatttcccgacgagggatcccaggttgactacttagcgcactttattgaaggcctgctaaacaccattaacggcattgagattgaagactccgaggccgtgggtatctcctccatcattagtaatttgataactgtgttcccacgaaatgtcttgaccgctattccctctgagctcttctcatcttttgtaaactgtctcacacacctcacctgttcctttgggcgaagtgccgctctggaggaggtactggacaaggatgatatggtgtacatggaggcatacgacaaacttctggaatcctggctcacgttggttcaggatgataagcattttcacaaggggttcttcacgcagcatgccgtgcaggttttcaacagttatatacagtgtcacctcgcggctcctgatggaacccgcaatctcacagccaacggagtcgcttcccgcgaagaggaggagattagtgaactccaagaggacgatagggaccagttcagcgaccagctggccagcgtgggtatgttgggaagaattgcagccgagcattgcattccattgctgacatccctactggaggagagagtcaccagactacatggccagctccagcggcaccagcagcagttgctggcatcccctggcagctccaccgtcgataataagatgctcgacgatctgtacgaggacattcattggttgattctggttactggctatttgctcgcagatgacacccagggagagactccgttaatccctccagagataatggagtactcgatcaagcattcctccgaagtcgatatcaacacaaccctgcagatcctcggaagccccggtgagaaggcgagttccattcccggatataataggactgattcagtcattaggttgttgagtgccattctgcgggtgtcagaagtagagagccgcgctattcgagctgatcttacacatctgttgtctccacaaatgggtaaagatatcgtctggttccttaagagatgggccaagacctacctactcgttgatgagaagctatatgaccaaatatctctcccattcagcaccgcatttggtgcagacaccgagggcagccaatggatcatcgggtatctcctccaaaaagtcattagcaatctgtcagtctggagtagcgagcaggatctggctaacgataccgtccagctgcttgtgaccctggtggagcgaagagaacgggcaaatctggtcatccaatgcgagaattggtggaatctcgctaagcaattcgcttcccggtccccaccactcaatttcctcagctcccccgtccagaggactctcatgaaggctctggtgctcgggggatttgctcatatggatactgaaaccaagcagcagtattggaccgaagtgctccaacctctccaacagcgcttcctgcgggtcattaaccaagagaacttccagcagatgtgccagcaagaggaggtgaagcaagagatcactgcaaccctggaggcgctctgtgggatcgctgaagcgacccagatcgataacgtcgccatcctcttcaattttcttatggacttccttaccaactgtataggcctgatggaggtttataaaaatacaccagagaccgtgaatctgataattgaagtgtttgtggaggtggcccataaacaaatctgttacctgggggagtctaaagccatgaatctttacgaggcttgcctcaccttgctgcaagtgtatagcaagaacaaccttgggaggcagagaatcgacgtgacagcagaggaggagcagtaccaggacctcctcctgattatggagctcctcaccaatctacttagcaaagaattcatcgacttctcagacacagacgaggtgttccgcggacacgagcctggccaggctgctaatcggagtgtcagcgccgctgacgtggtgctatatggtgtgaatctgatacttcctctgatgtctcaagatttgctgaagtttcctaccttgtgcaatcagtattacaagcttatcacctttatctgcgagattttcccggagaaaatccctcagctccccgaagacctctttaagagtctcatgtacagcttggagctcggaatgacatctatgtccagtgaagtctgccagctatgtttggaagccctcaccccactggccgaacagtgtgccaaggcgcaggaaactgactcacctctttttctggcaacccgtcattttctaaagttggtctttgacatgttagtgctgcagaagcacaatacagaaatgaccacagcagccggagaagccttttacactttggtgtgcctgcaccaggctgaatactcagagctggtcgagaccctgctgtcgtcgcaacaggaccccgtgatataccagcggctggcggatgccttcaataagctgacagcaagtagtaccccgcctacactggacagaaagcagaagatggctttcctgaaaagcctggaagagttcatggccaacgttgggggtctgctatgtgtgaagtag

SEQ ID NO: 27421 - DNA, 1578 bp, synthetic construct
  source 1..1578: mol_type = other DNA; note = Synthetic coding sequence
atggcagctgggggttccgggggacgcgctagctgtcctccaggcgtcggtgtcggaccaggaacaggtggtagcccaggcccttctgcgaacgcagctgctactccggcacctggcaacgcagctgccgctgctgcagccgcagccgctgctgccgctgccccaggacctacacctcctgctcccccaggccctgggactgatgctcaggcagccggagctgagagagccgaagaggctgctgggccaggcgctgcggcactgcagcgggaagcggcttataattggcaggcctcaaagcccactgtgcaggagcgctttgccttcctcttcaataacgaagtgctgtgcgacgtgcattttctggtgggcaaggggttatctagccagcggattccagcacatcggtttgtgctggccgtcggatctgctgttttcgacgccatgttcaacggaggaatggctactacctctacggagatagagttgcccgatgtggaacccgctgctttccttgcacttctgaagtttctttactccgatgaagtccagattggccctgagacagtgatgaccaccctgtacacagcgaaaaagtatgctgtgcccgcattagaggctcattgcgtggaattcctgaagaaaaacctgcgcgctgacaatgcatttatgctgctcacgcaagcacggctgttcgatgaaccccagcttgccagcctgtgtctggaaaacatcgacaaaaataccgcggatgccatcaccgcagaagggttcaccgacatcgacctggatacactggtggcagtccttgagcgcgataccctcggcatccgcgaagtacgcctcttcaacgcagttgtgcggtggtcagaagctgaatgccagaggcagcagctccaggtgactcccgaaaaccgacgtaaggtgctggggaaagccctgggtttaatccgctttccactgatgacaatcgaggaatttgcagcagggccagcccagtcaggaattctggttgaccgcgaggttgtatccctgtttctgcattttacggtaaatccaaaaccgagagtcgagtttattgatagaccgagatgctgtcttcggggaaaggagtgcagcataaatagatttcagcaggtggagtctaggtggggatattcgggcactagcgaccgaattaggttcagcgttaacaagagaatcttcgtggtggggttcgggttgtatggctcgatccacggaccgactgattatcaggtgaacattcagattatccataccgactcaaatacggtgctcgggcagaacgataccggcttctcctgtgatgggagcgcgtctacattccgcgtcatgttcaaagaaccggtggaagtcctcccaaatgtgaattacacggcatgcgccacgctgaaggggcctgatagccattacgggaccaagggactgagaaaagtcacgcatgaaagtcctactaccggggcaaaaacctgcttcacgttctgttacgcagccggaaacaataacggtactagtgttgaagatggacaaatccccgaggtgatcttttatacatag

SEQ ID NO: 27422 - DNA, 525 bp, synthetic construct
  source 1..525: mol_type = other DNA; note = Synthetic coding sequence
atggccaccgtggcagagctgaaggcagtgctgaaagatacactggaaaaaaaaggggtgctggggcacctgaaagctcgcattcgggcagaagtgtttaatgcacttgatgacgatcgggagccacgtccttcactttcacacgaaaatctcctcattaacgaactgattcgtgagtatttagaatttaacaaatacaagtatacagcaagcgtgttgatcgcagaaagcggacaaccagtggtgcctctggacagacagtttctgatccacgaactgaatgcattcgaggaatctaaggacaacacgataccattgctgtacggaattctggcccactttctccgcggaacaaaggacggaattcaaaatgcctttctgaaaggtcccagtctgcagccttccgatccgtcccttggccgtcaaccatctagaaggaaaccaatggacgatcatctaagaaaggaggagcaaaagtccacgaatattgaggacctgcatgtcagccaggccgtgaaccggtag

SEQ ID NO: 27423 - DNA, 1257 bp, synthetic construct
  source 1..1257: mol_type = other DNA; note = Synthetic coding sequence
atggccggtagcctgcctccctgcgtggtggactgcggcactggttatacgaaactgggatacgcaggaaacacagaaccccagtttatcattccctcttgtatcgccattagagagtccgcgaaggttgtggatcaggcgcagcggagggtgttgcgcggtgtggatgatttagattttttcataggagatgaagctattgacaagcccacatacgcaaccaaatggccgattcggcacgggataatcgaggactgggacttgatggaacgattcatggaacaagtggtgttcaaatatttgcgcgcagagccagaggaccactactttctgatgacggaaccccctctgaatactccagaaaacagagaatacctggcagaaataatgtttgagtctttcaatgtgcctggcctttacatagccgtgcaagccgtcctcgccttggcggcttcttggaccagccgacaagttggcgaacggacactcacaggaatcgtgatcgactccggtgatggagttacccacgtgatccctgtggctgaaggttacgtaattggttcttgtatcaaacacattcctattgctggcagagacatcacttactttatccagcaactcctcagagagagggaagtggggatacctcctgaacagtcactggaaaccgccaaagcaatcaaggagaagtactgctacatctgtccagacatcgttaaagagtttgcaaaatatgacgtcgatccgcgtaagtggattaagcaatacactggaatcaacgcaataaaccaaaaaaagttcgtgatagatgtagggtatgagcgatttctcgggcctgagattttcttccatcctgagttcgcgaaccccgactttatggaaagcatttccgatgtagtggatgaggtgattcagaactgccctattgacgtgagacgcccactctacaagaacgtagtgctcagtggcggatccactatgttcagggacttcggtcggagactgcagcgcgatctcaaacgtgtggtggacgccagactgcgcttaagcgaggagctcagcggtggacgaataaagccaaagccagtagaagtgcaggttgttacccaccacatgcagagatatgctgtctggttcgggggttccatgttagcctccacacctgaattcttccaagtgtgccataccaaaaaggactacgaggaatatggacccagcatctgccggcacaaccccgtgttcggtgttatgtcatag

SEQ ID NO: 27424 - DNA, 1044 bp, synthetic construct
  source 1..1044: mol_type = other DNA; note = Synthetic coding sequence
atggccgcagctgagccagcttcctctggccagcaggctccggctggccagggccaggggcagcgccctcctcctcagcctccacaggcccaggccccacagcctccccctcctccccagctgggtggcgcagggggaggcagtagtaggcacgagaagtccctgggcctgctcactaccaagtttgtgagcctgctacaagaggcgaaggatggagtcctcgatctgaaagccgcagccgacacccttgctgtgcggcagaaaagacgaatatacgatatcactaacgttcttgaaggcattgatctgatcgagaagaaatcaaaaaacagtattcagtggaagggggtcggcgcaggctgtaacaccaaggaagtcattgatcggctgcgttatctgaaagctgagatagaggacctggagctgaaggagcgcgaattggaccagcaaaagttatggctgcagcagtcgatcaaaaatgtgatggacgactctatcaacaatcgtacattttcctacgtgacacatgaagacatctgcaactgcttcaatggcgacacactcttagccattcaagcaccaagcggaacccaactggaagtgcccatccctgagatgggtcagaatgggcagaaaaagtaccagattaatctcaaatctcatagtggacccattcacgttctgcttataaataaagagtccagtagctctaagcccgtggttttccccgtgccgcctcctgacgatctcacccagcccagtagtcagtctcttacaccagtcacaccgcagaaatcctcaatggccacacagaatctgcccgagcagcacgtgtccgagaggtctcaggccttacagcagacgtctgcaaccgatataagttcagctggcagtattagtggagatataatcgatgagctcatgagcagcgatgtgtttcctttactgagactgagccccactccagccgacgattataactttaatctggacgacaatgagggagtctgcgacctcttcgacgttcaaatcttaaactactag

SEQ ID NO: 27425 - DNA, 636 bp, synthetic construct
  source 1..636: mol_type = other DNA; note = Synthetic coding sequence
atgtgccccggaaactggctttgggcctccatgacgttcatggcacggttttcacgatccagcagtagaagccccgttcggactaggggcaccctggaggagatgcctacagtacagcatccattcttgaacgtttttgagcttgagcgcctgctctataccggcaagactgcttgcaatcacgcagacgaggtctggcctgggctatatctcggagaccaagatatggccaataatcgcagagaactgcgtcggctcgggatcacgcacgtgctcaatgcgtctcattctcgctggcgcggaacccccgaggcgtatgaagggctgggtatccgctacctgggtgtggaagcccacgacagcccagcctttgacatgagcattcacttccagactgccgctgattttattcaccgcgctctttcccagcctggaggcaagattcttgtccactgcgcagtgggggtaagtcggagcgccactttggtactcgcctacctcatgctgtatcaccacttgactttggtggaggccattaaaaaggttaaggaccatcgaggcatcattccaaatcgcggatttcttcgccagttgctggcactggaccgcagactccggcagggtttggaggcttag

SEQ ID NO: 27426 - DNA, 948 bp, synthetic construct
  source 1..948: mol_type = other DNA; note = Synthetic coding sequence
atgcccggtctcagctgccggttctatcagcataagtttccggaggtggaagatgtagttatggtcaatgtgaggagcattgctgaaatgggcgcttacgtttctcttctggaatataacaacatcgagggaatgattctcctttctgaactgtcacggcgtcgtattagaagcattaataaactcatccgcatcggaaggaacgagtgcgtggtggtaatccgggtggacaaggaaaaagggtacattgacctaagtaagcgacgagtcagtccggaagaagccattaaatgtgaggacaagttcaccaagagcaagaccgtctacagcatcctgcgccacgtcgcagaggtgctggagtataccaaagacgagcagctcgagtccttatttcaacgaaccgcctgggttttcgatgacaaatacaaaagacctggatatggagcatatgacgccttcaaacacgctgtgtcggatcctagtattctcgacagtctcgacttaaacgaagacgagcgagaggtcctgatcaacaatatcaaccggaggctgacacctcaagcagtgaaaattcgggctgacattgaagtggcctgctatgggtatgagggcatcgatgccgtgaaggaggccctccgggctggactgaattgttctacagagaatatgccgatcaagattaacctgatcgcccctccacgatatgtgatgaccactactaccctggagcggaccgagggtctcagtgtgctgtcccaggcaatggccgtcatcaaagaaaagatcgaggagaagaggggcgttttcaatgtccagatggaaccaaaagtggtgaccgacaccgacgaaactgagctggctcgccagatggaacggcttgaacgcgagaacgcagaagtggacggagatgacgatgccgaggaaatggaagcaaaggcggaagattag

SEQ ID NO: 27427 - DNA, 318 bp, synthetic construct
  source 1..318: mol_type = other DNA; note = Synthetic coding sequence
atggcaggtcaagaggaccccgttcagcgggagatccatcaggattgggcaaaccgggagtatatagagattatcacatcctccatcaaaaagattgccgatttccttaattcctttgatatgtcttgccgtagtaggctggccacccttaacgagaagctgacggcacttgaaagacggatagagtatatagaggcgagggttactaaaggtgagacgttaagaaccgtcccttgttgttgttgggaagtggcgctgcacaacacagggcatatggggaaggcccctgccgctttcagcagcttcctgtcaccctag

SEQ ID NO: 27428 - DNA, 1902 bp, synthetic construct
  source 1..1902: mol_type = other DNA; note = Synthetic coding sequence
atggccgctgctgcagctgccgctaccacagccgcatgctcatcaggctctgccggtactgacgccgcaggtgcctctggattgcagcagccgccaccacagccccagcctcagcctgctgccgcagccccagcccaacctcccccagagcctccacgtaagccccgaatggatccgagacgacggcaggctgcactgtcttttctgaccaatatctcgctggacggtcgactcccacctcaagacgctgaatggggcggaggcgaggagggcggagctgccaagcccggtgccggaggtgcgtgcggggcacgtacaaggttcagtctactcgccgctgccgagcgaggagggtgtattgccctggcggctcccggaacaccagccgcaggcctggccgcaggatccgggccatgcctgccacaaccgtcgtccctgcctccacttattcccggaggtcacgcgacagtgtccgggccaggagtagccagagggttcgcatctccactgggcgctggtcgcgcttctggcgaacagtggcaaccgccaagacccgctcccttagcagcctgcgctcagcttcaactgctggatgggagtggggctgcaggacaagaagaattagaggaggacgacgcttttataagcgtgcaggtccctgctgcggcttttctgggctccggaacacctggaagtggcagtggcagcaggggcaggctcaatagttttactcaaggcatcttacctattgcctttagccgccctacttctcagaattattgttcattggagcagccgggacagggtggcagtacatccgcttttgaacaactccagagatccaggcgcaggttgataagccaacgttcaagcttggaaacactagaggacatagaagagaacgctccgctgcgcaggtgtcggacactgtccgggagcccaagacctaagaatttcaagaaaatacatttcatcaagaacatgaggcagcacgacactcggaatggtagaatcgttctcattagcggtcgacggtctttctgtagtatcttcagcgtgctcccataccgggatagtacgcaagtgggcgatcttaaactggatggaggtaggcagtctaccggggctgtttccctgaaagaaataatcggcctcgagggcgtggaacttggagccgatggcaaaacagtttcttacacacaatttttgttgcccactaatgcattcggcgctcgcagaaacaccatcgattctactagctctttttctcaattccggaatctgtcacaccggtccctgtctattggacgggcatcaggtactcaggggagcctcgataccgggtctgacttgggtgattttatggattacgatcctaaccttctggacgatccccagtggccttgcggcaaacacaaaagggtacttatcttcccttcctatatgacaacggtgatagattatgttaagccctctgatctcaagaaggacatgaatgagactttcaaggagaagttcccacacatcaaactaaccttatctaagatccgatccctaaaaagagaaatgcgaaagctggcccaagaggactgtgggttggaagaacctacagttgcgatggccttcgtgtatttcgagaaattggccctgaaaggaaaactcaacaaacagaaccggaagttgtgcgccggagcctgtgtgctcttagcagccaaaattggttctgatcttaagaagcatgaagtgaagcatctaattgacaaacttgaagaaaagttcagactgaaccggagagaattgatcgcattcgaattccccgtcctggtcgcactggaattcgccctccacctcccagagcatgaggtaatgcctcattacagacggcttgtgcagagtagctag

SEQ ID NO: 27429 - DNA, 3423 bp, synthetic construct
  source 1..3423: mol_type = other DNA; note = Synthetic coding sequence
atgacaaccgctgtcgaaagaaaatacatcaatatacgcaagcggctcgatcagctggggtaccggcaaaccctgacagtggagtgtctgcccttggtcgagaagctgttctcagacctggtgcacacaacggagagcctgcgtcaaagtaagctcagcgccgttaaggccgagaaagaatctgccaactttgactttgtgttagaaccctataagctcgagaacgccaggctcagtagggagaacaatgaactctacctggaactgatgaaattgagggaacactccgaccaacacgtcaaagaactcaaaaccagcctgaaaaagtgcgcgagggaaactgcagacctgaagttcctgaacaaccaatatgcgcacaaattgaagttgctggagaaggagtctaaagccaaaaacgagcggattcagcagctgcaggagaaaaatctgcacgcagtcgtgcaaacacctggtggcaaaaagcgatccatcgcctttcgaagacagaggatgcagatcgacgagcctgtgcccccttctgaagtcagctcctaccccgtccctcagcctgacgatccttacattgcggatcttctgcaggtggctgataaccgaatccaagagctgcagcaggaggtacatcagctgcaagaaaaactcgctatgatggagagtggggtgcgagattattctaaacaaatcgaattacgagaacgggaaatcgagagattatcagtggcgctggatggtggccgaagtcccgacgtactgtcacttgaaagccgaaacaaaacaaacgaaaaactcatagcccatctgaatattcaagtcgactttctccagcaggcaaataaggacctcgagaaacgcatccgagagctgatggaaactaaagagacagtgaccagtgaggtagtcaacctgtccaataagaacgaaaagctgtgccaggagctgaccgaaatcgatcagctagcacagcaactggagaggcacaaggaggaagtcctggaaacagctgataaggagctgggagaagcgaaaaaagagattaaaaggaagctgagtgagatgcaggacctggaagagactatggctaagctgcagttggagcttaacctgtgccagaaagaaaaagagagacttagtgatgaactgctggtcaaatcagatctggaaacagtggtgcaccagctcgagcaggaaaagcagagactgtctaagaaagtagagtcttttgccgttactgagagacaactgactttggaggtagaacggatgaggctcgaacatgggatcaagcgcagggatcggagtccatcgcgcctggacacattcctgaagggaattgaggaggaaagagattactacaaaaaagagctggagcgcttgcagcacatcatccagagacgatcttgtagtacatcatattctgctcgcgagaaatcctctatctttcggaccccagagaaaggcgactacaactctgagatacaccagataaccagagaacgcgatgagttacaaaggatgctcgagcgcttcgagaaatatatggaggacatacagagcaacgtgaagctcttaacagcggaaagagacaagctgagcgtcttatataacgaagcccaggaagagctcagtgcgctccgaaaggaatcgacacaaaccacagcccctcataacatcgtgtctctgatggagaaagaaaaggagctagctttgtccgacctgagaaggatcatggccgagaaggaggctctaagggagaagttagagcacatcgaagaagtgtcactgtttgggaagtccgaactcgaaaaaaccattgagcacttgacttgtgtgaaccatcaactggagagtgagaaatatgagcttaagtcgaaagtgctaatcatgaaagaaacgatcgaaagcctggaaaacaagttaaaggtacaggctcaaaaattttcacacgttgctggtgactccagccatcagaaaacagaggtgaactcacttcgcatagtgaatgagcaactgcagcgctctgtggacgattaccagcaccggctttctataaagcgaggggagctggaatccgcgcaagctcagatcaagattctggaagagaagatcgacgagcttaatttgaaaatgacttcgcaggatgaggaagcccatgtgatgaagaaaaccatcggggtcatcgataaggagaaggacttcctgcaggaaactgtcgacgaaaaaactgaaaaaatcgccaatctacaggagaaccttgccaacaaagagaaagccgtagcccagatgaagataatgattagtgagtgcgaaagctccgtgaatcagctgaaagaaaccctagtcaacagggaccgggagattaacagcctgcgtcgtcaattagacgccgcacataaagagctcgacgaggtgggccgatctagagagatcgctttcaaagaaaaccggaggcttcaagacgacttggcaaccatggctcgcgaaaatcaggaaatttccctggaactcgaggccgctgtacaggagaaggaggaaatgaagtccagagtccacaagtacattaccgaggtctcccggtgggaatctctcatggctgcaaaggagaaggagaaccaggatcttctcgatcgctttcagatgctgcataatcgggcagaggattgggaagtgaaagctcaccaggcagagggagagtcaagctcagtgagactcgaacttctgagcatcgatactgagcgtcggcacttgcgcgaacgagtggaacttctggagaaagaaattcaagagcatatcaacgcccaccatgcctacgaaagccagatttccagcatggctaaggcaatgtctcggttggaggaggaactgcgtcaccaagaggacgagaaagctaccgtgctgaatgacctctcatcactacgggaactctgcattaaactagactccggcaaggacatcatgactcaacagctaaattcaaagaacctggaattcgaacgggtagttgtagagttagaaaacgtcaagagcgaatctgatcttctgaaaaaacagttaagcaacgagcggcatacagtgaaaaacctggaatccctcttggccactaatagggacaaggagtttcactcacatctaacctcacacgagaaggacacagaaatacaactcttaaaagagaagctgacgttgagcgagtctaagctcacgagccagtcccgcgagaacacaatgttgcgagcaaaggtcgcccagctccagactgactacgacgctctgaagaggcaaatatccacggaaaggtacgaacgggaaagagcaattcaggagatgagaagacacggcctagcaactccaccactgagcagtaccctgaggagcccttctcacagtcctgagcatcgcaacgtttag

SEQ ID NO: 27430 - DNA, 1512 bp, synthetic construct
  source 1..1512: mol_type = other DNA; note = Synthetic coding sequence
atgcccaacgtcgccgagaccgaaaggagcaacgactccggcaacggagagcacaagagcgaaagaaagtcgcccgaggaaaacttacagggagccgtcaaaagcttttgcaccagcgcttccggcgctcccctcggcccaaagggcgatgggcactacccttggtcgtgtcctgtcacccatactagggaaaaaatctacgccatttgttctgactatgcatttctcaaccaggccacatcgatctataagaccccaaatccttctagatcaccctgtttaccggactcaacgagtctgtcggccggtaataactcatcgcgctatattggaataccaacatctacgtctgagatcatctataatgaggagaacagcctggaaaatttgtccaacagcttgggcaaactgcctttagcctgggaaatagataaaagtgaatttgatggtgtcacaactaatagtaagcacaaaagtggaaatgctaaaaagcaggtgtctaagcgaaagactagtgataaaaaaggtcggtaccagaaggaatgcccgcaacactcaccactcgaagacatcaaacagaggaaggttctggatctaaggcgctggtactgcatctccaggccgcagtacaaaaccagttgcggtatttcaagcctgataagctgctggaactttctttattccacaatgggggctggcaacctgcctcccataacccaggaggaagctctgcacatactcggcttccaacctccttttgaagacatacggttcgggccttttaccggtaacacaacgctgatgcgttggtttcgccagataaacgaccacttccacgtgaagggctgctcttacgtattgtacaagccccacggtaagaacaagacagcaggagaaaccgcctcaggggcacttagcaagctcactcgagggttgaaggacgaaagtctcgcgtatatttatcattgccagaaccactatttttgcccgataggcttcgaggcaactcccgtaaaagctaacaaagccttcagcagaggcccactatctcctcaagaggtggagtactggattttaattggggagtctagtcgcaagcatccagccatccattgtaagaaatgggctgatatcgttaccgacctgaatacacagaatccagagtacctggacatcagacacctcgagagaggcctacagtacaggaaaacaaaaaaggtcgggggtaacctacactgtatcattgcattccagaggctcaattggcagagatttggcttgtggaacttcccctttgggacaatccgtcaggaaagtcaacctcctactcatgcccaggggattgctaagtctgaaagtgaagacaacatctcaaagaagcaacacggccgtcttggcagatccttctctgcgagttttcaccaggactcggcctggaaaaaaatgagctctatccacgagagacgtaactccggttaccagggatatagcgattacgatggcaacgactag

SEQ ID NO: 27431 - DNA, 813 bp, synthetic construct
  source 1..813: mol_type = other DNA; note = Synthetic coding sequence
atggaagccgaagagctggagcaagaaagagagcagttgcgtctgcagctttgggaagcctactgccaggtccggtatctgtgctctcacctcagaggcaacgacagtgcagactcggccgtttccaccgattccagtatggatgaatcctccgagacttcaagtgcgaaagatgtgcccgcaggctctctgcgcacggctctgaacgaacttaagagactgatccagtccatcgtggacgggatggagccaactggaagccgacggctggatgacgattccttggaggaacagatacgacagactagcgaggatagccgggcactccgcgagctgatggagggggaaaggggaaagctgaggcagagtctggaagaacttcagagactgcactcccaggtgacactcctttctgtcgagatgactgcattaaaggaagagcgtgaccgcttaagggtgacgagcgaggataaagaacctaaagaacagctccagaaggcaattcgcgatagagatgaagccatcgccaagaagaatgctgtggagctagagttagctaaatgcagaatggacatgatgtccctgaactctcagctcctcgacgcgatacagcaaaaactgaacctgtctcaacaattggaggcttggcaggatgacatgcaccgagtgatcgaccgtcagctcatggatactcacctgaaggagagaagccagcccgcagcggctttgtgtcgtggacactccgcaggcaggggggatgagcccagtatcgcagaaggcaaacggttattctcgttttttaggaaaatctag

SEQ ID NO: 27432 - DNA, 2379 bp, synthetic construct
  source 1..2379: mol_type = other DNA; note = Synthetic coding sequence
atgctgcccgctggcgaaatcggggctagccctgccgctccctgttgttctgagagtggtgacgaacgaaagaacctggaagaaaagagcgacattaatgtgaccgtcctgattggttctaaacaggtgtcggagggcactgataacggagacttgccatcatacgtttccgcatttatcgagaaagaggtgggcaacgacctgaaatccctgaaaaagctagacaagctgatcgaacagcgcaccgtatccaagatgcagttggaggagcaggtactgaccatctcaagtgagatccctaaacgaatccggagcgcccttaaaaacgccgaggaatccaagcaatttctgaaccagttcctcgaacaggaaactcatctgttcagtgcgatcaactcacatcttttgacagcacagccctggatggatgatctcgggacaatgatttcacagatcgaagagattgagaggcatttagcgtacctgaaatggataagtcaaatcgaagagctcagcgacaacatccagcaatacctgatgacgaataacgtccctgaggcagcctcaaccctagtgtcaatggcagagctcgacatcaagttacaggaaagttcatgtacacacctacttggattcatgagagcaactgtgaaattctggcacaaaatactcaaggataaattgacttcagattttgaagaaatcctagcccagctccactggccatttattgcccctccacagagtcagaccgtggggctgtccagacccgcaagcgcccctgagatctactcatatttggaaactctcttctgtcagttgctaaaactccagacaagtgatgaactgttgaccgagcctaagcagctccccgagaagtatagcctccccgctagcccaagcgtgattttgccaattcaggtaatgttgacacctctccaaaaacgatttcggtaccattttcggggaaacagacagactaatgttttaagtaaacccgagtggtatctggctcaggtgctcatgtggatcggaaaccataccgaatttcttgacgagaagatccagcccattctcgacaaggtggggtcccttgtcaatgcacgcctggagttctcacgcggactgatgatgctcgtgttggagaagctagctactgacattccatgccttctctacgacgacaatcttttctgtcacctcgtggacgaggtgttgttattcgaaagagaacttcatagcgttcacggttatccaggcactttcgcatcttgtatgcacattctgtccgaggagacatgcttccaacggtggctaacagttgagcgcaagtttgctctgcagaagatggattccatgctgtcctcggaggctgcatgggtgtctcagtacaaggacattaccgacgtggacgagatgaaggtgcctgactgtgcggaaacattcatgactctactgcttgtcatcactgacagatataagaacctgcccaccgccagtaggaagttacagtttcttgaattacagaaggacctggtggatgattttcggattcgcctgacccaagtgatgaaggaggagacaagggcgagcttgggattccggtactgcgccatacttaacgcagtcaattatatctccaccgtcctggctgactgggccgataacgtcttctttctgcaacttcagcaggccgcattagaagtgtttgcagagaataataccttgagcaaactgcagcttggtcagttagcatcgatggagagctccgtttttgatgatatgattaacctgctggaacgcctgaaacacgatatgctgacacggcaggtggaccacgtcttccgcgaggtcaaggatgccgctaagctatacaagaaggagaggtggttaagcttgccttcacagagcgagcaggccgtgatgtcccttagcagttctgcctgccctttactgctgaccctccgcgaccatcttctgcaattagaacagcagctgtgtttcagcctgttcaaaatattttggcagatgctggtggagaagcttgacgtctacatctaccaggagatcatcttagcaaatcatttcaatgaaggaggggcagcgcagttgcaatttgatatgacccgcaacttgttccccctcttcagccactattgcaagcggccagagaattactttaagcacatcaaagaggcctgcattgtgctcaacctcaatgtagggtcggctctgctactgaaagacgtgttacagtctgctagtggccagctgcctgccacagcggctctgaacgaggttgggatttacaagctggcgcagcaggacgtggaaatcttgttgaacttaagaacaaattggccaaacacaggcaagtag

SEQ ID NO: 27433 - DNA, 1068 bp, synthetic construct
  source 1..1068: mol_type = other DNA; note = Synthetic coding sequence
gtgagaggcgttagggctgctaccgctgctgccgtcgcagccacagctgcttcagggctaagccgcagagaggcaggcggacgggctggagcagctgccgctgtcgtaaggccacctgggagaaagtgtggcagatgccggaggctcgccaattttcccggacgaaagcggaggcgacgtagaaggaagggattgggagccactaccggaggttgtggagaagccgtctcgtctctccacccagcccctcacagccctagctccgtcagacctgccggaaggcgtgcgagaaggcaacgccgaggggcaggcagtgctgagcggccaatgtcaggggcaggggaagctctggcccctgggccagtcggcccacaaagagtggcagaagcagggggaggacaactgggctccaccgcacagggaaagtgtgataaagataacacggagaaagacataacccaggccaccaatagtcacttcacacacggagaaatgcaggatcaatcgatctggggcaatccctctgatggtgaactcatcagaactcagccgcagagactgccacagttacagacctctgcgcaggtcccctcgggcgaggaaataggcaaaataaaaaatggtcatacgggactgtccaacggcaacggcattcaccacggcgctaaacacggaagcgctgacaatcgcaagctgagcgcacctgtctcccaaaaaatgcatagaaaaatccagtcttccctgtccgtgaactctgacatcagcaaaaaaagtaaagtgaacgctgtgttttctcaaaagactggtagctcccctgaagattgttgcgtccactgcatcctcgcctgccttttttgtgaattcctgaccctttgtaatatagtgttgggacaagcaagctgcgggatttgcacatccgaggcttgttgttgctgctgtggggatgagatgggggacgactgcaactgcccgtgtgacatggactgtggtatcatggatgcctgctgcgaatcgagtgattgcctggaaatttgtatggaatgctgcggcatttgcttccctagctag

SEQ ID NO: 27434 - DNA, 378 bp, synthetic construct
  source 1..378: mol_type = other DNA; note = Synthetic coding sequence
atgctgtctagactgttaaaagaacaccaggccaaacaaaatgagcggaaggaactgcaggagaaaagaagacgcgaggccataaccgccgcaacatgtctgaccgaggccttagtggaccacctcaacgttggagtcgcccaggcttacatgaatcaacgcaaactcgatcatgaagtgaaaacactgcaggtccaggctgcgcagttcgcaaagcagactggacaatggattggcatggttgaaaattttaatcaagcgttaaaggagattggggacgtggagaattgggctcggagtatcgagctagacatgcgtaccattgcaaccgcccttgaatacgtctacaagggccagctgcagagcgcaccatcttag

SEQ ID NO: 27435 - DNA, 2337 bp, synthetic construct
  source 1..2337: mol_type = other DNA; note = Synthetic coding sequence
atgacaacaagacaggccacgaaagacccactgctgcgcggagtgagccccactcccagtaagattccagtccgctcccaaaaacgaacgcccttccctactgttacgtcctgcgccgtcgatcaggagaatcaggatccaaggagatgggtccaaaaaccccctctgaacattcaaagaccactggtcgatagtgccggtcccagacccaaagcccgtcatcaggccgaaacctcccaaagactagtggggatatcacagcccaggaaccctctcgaagaactacgtccatccccgagggggcaaaacgtgggacctgggcctcccgcacagaccgaggccccagggacaattgagtttgtggcagatccagccgctctggctacgatcctgagcggcgaaggcgtgaaatcgtgccacctgggcaggcagccttcacttgccaagagagtgcttgtcaggggctcacagggagggactactcagcgtgtgcagggggtgcgcgcaagtgcttacttagcgcctcgtacaccaacacatcggcttgacccagcaagggcttcttgtttttcacggctggaggggccaggtccaagggggaggaccctatgccctcagcgattgcaggccctcatttctccctctggaccctcattccaccccagcactaggccttcttttcaggagctgcggcgagagacggccggtagtagcagaacgtctgtgagtcaggcctccggcctgctcttggagactcccgtgcagccggctttttcattgcctaaaggagagagggaggtcgttacccattcagatgagggtggagtcgcttctctggggctggcacagagagttcctctgcgggaaaacagagagatgtcccatacaagggacagtcatgactcccacctgatgcctagtcctgctcctgttgctcagcccttacccggacacgtggtgccttgtccgagcccctttgggagagctcaaagggtgcccagtccgggtccgcctacgctcacatcttattctgtgttgagaaggctaactgttcagccaaagacccggttcacacccatgcctagcactcctcgcgtgcaacaagcgcaatggttacggggagtcagcccgcagagttgttccgaggatccagccctcccctgggagcaagttgcagtcaggctgtttgaccaagagtcctgtatccgcagcctggaggggtccggcaagccacccgtcgcgacgcccagtggtccgcactccaacagaaccccttcgctgcaggaagtcaagatccagcgcatcggaatactgcagcaactactgcggcaggaagttgaggggctcgtcggaggtcagtgcgtacctctgaatggaggcagtagcctggatatggtggagttacagccgttgctgacagaaatctcgagaacactgaatgctaccgagcacaatagcggtacctcccacctgccaggcctcctgaagcatagcgggctgccaaagccctgtctacctgaggaatgtggcgaaccacagccttgcccccctgctgagcctggtcctccagaagcgttctgccggtctgaaccagagatccctgaaccgagcttgcaagagcagctcgaggttccagagccctaccctcctgctgagcccagaccccttgaatcctgttgtagatccgaacctgaaattcccgagtccagcaggcaagaacagctagaagtaccagagccgtgtccaccagccgagcctagacccctcgaatcatactgtaggatcgagccagagattccggaaagcagccgtcaggagcagctggaagtgcccgagccctgccctccagctgagcccggacccctccagcctagtactcagggtcagagtggccctccgggaccttgcccccgagtcgagcttggagcctccgagccatgcactctggagcacaggtccttggagagtagcctgcctccatgttgttcccagtgggcccctgccactacctccctgatattctccagccaacatcccctgtgtgcttctcctcccatctgcagcttgcagtcactgcgcccaccggcagggcaggcaggcctctctaatctcgcaccacggacactcgccttacgggagagactgaagagctgtctgaccgctatccactgtttccacgaggccagattagatgacgaatgcgcgttttatacttcacgagctccacccagcgggcctactcgggtctgcaccaatcccgtcgccaccctgctggaatggcaagatgccctttgttttataccagttggttcagctgccccacagggaagcccctag

SEQ ID NO: 27436 - DNA, 1803 bp, synthetic construct
  source 1..1803: mol_type = other DNA; note = Synthetic coding sequence
atgagctgccgcagttatcgagtttcttctggacacagggtcggtaacttctctagttgctctgcgatgaccccccaaaacctcaacagattccgcgcaaacagtgtttcatgttggagcggtcctggattcagggggctgggaagttttggttctcgaagcgtcataacgttcgggagctacagcccaagaatcgccgcagtggggtctaggcctatccactgcggtgttaggtttggcgcagggtgcggaatgggcttcggtgacggtcgcggtgtaggtctgggccctagggccgactcctgtgtgggtctgggatttggagccggttcaggcataggttacggatttgggggacctggatttggataccgagtaggcggtgtgggagtgcccgctgccccttctataaccgcagtgactgtgaacaagtccctgctgactcctcttaatctcgaaattgatcccaacgcacaacgagtgaagaaagacgagaaggagcagataaagactcttaacaataagttcgcttctttcattgataaggtgcgcttcctggagcagcagaataaactgcttgaaacaaagtggtccttccttcaggagcagaagtgtatacgaagtaatctcgaacccctgtttgagagttacattactaacttgagacgccagctggaggttctggtctcggatcaggccaggctccaggcggagcgaaatcacttgcaagacgtgttggagggatttaaaaaaaagtacgaggaggaagtggtctgccgggcaaacgcggagaatgagtttgtcgcgctgaagaaagacgttgatgcagcctttatgaacaagagcgatctcgaggctaatgttgacaccctgacacaggagatagacttcttgaaaacattatacatggaggagatccagctgttacaatctcacatttctgagacttcggtgatcgtgaagatggataactcccgagatctgaatctggatggaatcatagccgaggttaaggcacagtacgaggaagtcgcgaggcgctctcgtgcagacgcggaagcttggtaccaaaccaaatacgaagaaatgcaagtaactgccggtcagcactgcgataatctcagaaacatccgcaacgaaataaatgagctcactagattaatccagcgtctcaaggcagaaatcgaacatgcaaaggctcaacgagcaaaattggaggcggcagttgctgaagcagagcagcagggggaggctaccttatctgacgctaagtgtaagcttgccgacctggaatgcgcactccagcaagccaagcaagacatggccaggcagctctgcgaatatcaagaactgatgaatgcgaagctggggctggacattgaaattgctacatacaggcgccttttagagggcgaggagagtcggctgtgcgaaggggtgggacctgtcaacattagtgtgagctcttctcgcggtggcctcgtgtgtgggcctgaaccactggtcgcagggtctacgttgagccggggtggtgtcactttcagcggaagttccagcgtctgcgccacctccggcgtcttagcctcctgcggaccttctttaggaggggcaagggttgctccagcaaccggtgatctcttatctactggaacacgctctgggtccatgttgataagtgaagcctgtgtgccgagtgtgccttgtcctctgcctacacagggtggattctctagctgttccggaggacgttcctcctcagtgagattcgttagcaccaccacatcctgccgaactaagtattag

SEQ ID NO: 27437 - DNA, 1542 bp, synthetic construct
  source 1..1542: mol_type = other DNA; note = Synthetic coding sequence
atgagctaccactcatttcagccagggagcagatgtggaagtcagtctttttcctcctacagcgctgttatgcctagaatggtaacccactatgctgtgagcaaggggccttgcaggcctggcggtggcaggggactccgcgctcttgggtgcctgggtagtagatctctatgcaacgtggggttcggacgtccccgagtagcttcccggtgcgggggaactctgcccggatttggttatagattgggcgcaacatgtggccctagcgcatgtattacaccagtgacgatcaatgaaagtctcctggtccctcttgcattagagattgatcctaccgtgcaaagggtgaagcgggacgagaaagaacagattaaatgcctcaacaaccgctttgcatctttcattaataaggtgagatttctggagcaaaaaaataagctgctggaaaccaagtggaatttcatgcagcagcagagatgttgtcagactaacatcgaaccaattttcgaaggctatataagtgccttgcggcgtcaactagattgtgttagcggcgatagagttagactcgagtctgaactctgcagccttcaggcagctctggaagggtataagaaaaagtatgaggaggagttaagtctgaggccttgtgtggagaacgagttcgttgcactaaagaaagatgtcgacacagcctttttaatgaaagccgatctcgagaccaacgcagaagcgctggtccaggaaatcgattttctgaagtctctctatgaagaggagatttgtttgctacagagccagatctctgaaacctctgtaattgtgaagatggataactcacgtgagcttgacgtggacggcatcatcgctgaaatcaaggcgcagtatgacgacatagcctcacgcagtaaagccgaggcagaggcctggtatcagtgcagatatgaagagctgagagttactgcagggaatcactgcgataacctgagaaacaggaagaatgaaattctggagatgaataagctgattcaacgacttcagcaggaaaccgagaatgtgaaagctcagaggtgcaaactagagggcgcaattgccgaagccgaacaacagggggaggccgctctgaacgacgcaaaatgtaagctcgcaggactcgaggaggccctgcagaaggctaagcaggatatggcttgtctgctgaaagaataccaggaggtcatgaactcaaagctgggcctggatatagagatcgccacttatagacgacttttagagggggaagaacacaggctgtgtgaggggattggtcccgtgaatattagcgtgtcctctagtaagggagcctttctctacgaaccatgcggtgtgtccacacctgtgctttcaacaggggttttacgcagtaacggcggttgttcaatcgtgggcaccggtgagctgtatgtgccatgtgagcctcagggcctgctgagttgtgggtcagggaggaagtctagcatgacccttggtgcaggtggaagctccccctctcacaaacattag

SEQ ID NO: 27438 - DNA, 1632 bp, synthetic construct
  source 1..1632: mol_type = other DNA; note = Synthetic coding sequence
atgatgccgaccccggtgatcttgctaaaggagggaacggattcctctcagggcataccccagctagtgagtaatatatccgcctgtcaggtcatcgccgaagctgttagaacaaccctaggcccacggggaatggacaaacttatagttgacggcagagggaaggcaaccatctccaacgatggggctacaatcctcaaattactggacgtggtccatcccgcagcaaagactctggttgatattgccaagagccaggacgccgaggttggcgatggtaccactagcgtcaccctgctcgccgctgaattcttaaaacaggtgaagccctacgtagaggagggactgcacccacaaattataatccgggcatttaggactgctacccaactggcagttaacaagatcaaagaaatcgctgttaccgtcaagaaggccgataaagtggagcagaggaagctgctggagaagtgtgctatgaccgccttatcatcaaagctgatttcccagcaaaaggctttctttgctaagatggtggtcgacgccgtgatgatgctcgatgatctgctacaacttaaaatgatcgggattaagaaggttcaaggaggggcacttgaagactcacagttggtggccggagtcgccttcaaaaaaacattctcctatgcgggtttcgagatgcagcccaaaaagtatcataacccgaagatcgccttactgaacgttgagctggaactgaaggccgagaaggacaacgctgagatccgagtacacacagtggaggactaccaagccattgtcgatgccgaatggaatattctctatgacaagcttgaaaagatacaccactcaggtgctaaagtcgtgctcagcaagctcccaatcggcgatgtcgcgacgcaatacttcgcagatcgggacatgttttgcgcaggtagagttcccgaagaggacctaaagaggactatgatggcctgtgggggatcaatccaaacaagcgtgaacgccctgtcagcagacgtgctgggccgatgtcaggtgttcgaggagacccagatcggaggagaaaggtacaattttttcactggctgccccaaagccaagacatgcactttcatccttaggggaggagcagaacagttcatggaagagacagaaaggagcctgcatgacgccataatgattgtccgccgagccatcaagaacgactctgtggtcgctggtggaggggcaatcgagatggaactctctaagtatctgagagactattcacggacaatacctggaaagcagcagctgctgataggggcatacgccaaggccttagagattattccgaggcagctgtgtgacaacgctggtttcgatgccacaaacatcctgaataaacttagagctcgacacgcccagggcggtacctggtacggggtggatattaataacgaagacatagcagataacttcgaagccttcgtatgggaacctgcgatggtgaggatcaacgctctcactgctgcaagcgaggcggcatgtctcatcgtgagcgtggacgaaaccataaagaaccctaggagtaccgtagatgctcctacagccgctggaagaggcagagggaggggcaggccccactag

SEQ ID NO: 27439 - DNA, 1479 bp, synthetic construct
  source 1..1479: mol_type = other DNA; note = Synthetic coding sequence
atggcacctgtgggcgtggaaaagaaactactcctcggaccaaacggacccgcagttgcagcagccggagatctgacttccgaagaggaggagggccagagtttatggagttctatcctgtcagaggtctcgaccagagcacgatctaaacttcccagtggcaagaatattctggtgttcggagaagacggctcaggcaaaaccacactgatgaccaagcttcaaggggcagagcatggtaagaagggtcgcggactcgaatacctttacctgtccgtccatgacgaagacagggatgaccatacgagatgcaacgtttggatcctggacggagatttgtatcacaagggcctattgaagtttgccgtgagcgcagaaagtttgcccgagactctggtaatttttgtggcagatatgtcccggccttggacagtcatggagtcccttcagaagtgggcctccgtgctgcgggaacacatagataagatgaaaattccccctgagaagatgcgggaactggagaggaaattcgttaaagacttccaggactacatggaacccgaagaagggtgtcaggggtcgccccagcgccgaggtcctctgacctcaggaagtgacgaagagaatgttgcccttcccctcggggataacgtccttacccataacttgggcatcccggtcttggtggtatgcactaagtgcgatgctgtgagcgtgcttgaaaaagagcatgattatcgcgacgaacatcttgatttcattcagagccatctgagacggttctgtctacagtatggagctgcactgatctatacctccgtcaaggaggagaagaacctggacctactctataagtacatcgtgcacaagacctatgggttccatttcaccactcccgctttggtggtcgaaaaggacgcggtgttcatcccagctgggtgggacaacgaaaaaaagatcgcgatattgcatgagaacttcaccaccgtgaagcctgaggatgcctacgaggattttattgtgaagcctcctgtgcggaaactggtgcatgacaaagagttggcagcagaagatgaacaggtcttcctgatgaaacagcagagcctcctcgccaagcaaccggctacaccaacgcgagctagcgagtccccagcacgaggtcctagcgggtctcccagaacccagggaaggggcggacctgcaagtgtgcctagttcatctcccggaacgtctgtgaagaaaccagatcctaacattaaaaacaacgccgcatcagagggtgtgcttgcatccttttttaattcattactatccaaaaaaacagggtcccccggaagtcctggagctggcggagtgcagtccaccgcgaagaagagcgggcagaagactgtgctatcgaacgtgcaggaggaactggaccgcatgacccgtaaaccagactccatggtgacaaacagtagcaccgaaaatgaggcgtag

SEQ ID NO: 27440 - DNA, 540 bp, synthetic construct
  source 1..540: mol_type = other DNA; note = Synthetic coding sequence
atggataaggacttcgacaaactgcacgagtttgtcgagatcatgaaagagatgcaaaaagatatggatgaaaaaatggacatcctcatcaacactcagaagaattacaaactgccactgcggcgagctcccaaggagcaacaagagctgcgcctgatgggcaaaactcacagggaacctcagctcagaccaaaaaagatggatggcgcatcgggcgtgaatggggcaccatgcgccctgcataaaaagacaatggccccacagaaaacaaaacaggggagtctggatccactccaccactgcggcacatgctgcgagaaatgtctgctctgcgccctcaaaaataattataacagggcagcacccctcaaagaggcccgtcatctgttaacagccaacagtatcgatccaagcgccgctttagtgctattgattgaatttcttctcttgactctggttacaggcgcagcagcaccaggcctggacgcttgcggccaccagcgcaacatgagagatgaaatcaactccgaacgcaggtag

SEQ ID NO: 27441 - DNA, 3600 bp, synthetic construct
  source 1..3600: mol_type = other DNA; note = Synthetic coding sequence
atggcctccgccggaacacagcattactcaattggcttgaggcagaagaattctttcaaacaaagcggtccaagcggaaccgttccagccacgccacctgagaagccgtctgaagggcgagtatggccccaggcgcatcagcaagtgaagcctatttggaaactagaaaaaaagcaggtggagacactctccgctggtctgggtccgggactccttggtgtcccgccacagcccgcttactttttctgtcccagtaccctgtgctcatctgggaccaccgctgtgattgcaggacatagttcttcttgctatctgcatagtctgcctgatctgttcaactcaacactcctgtaccggaggtcaagctacaggcagaagccgtatcagcagctggaatcattttgtctccgatcctccccttccgaaaaatctcccttcagcctgcctcagaaatcactgcccgtgagccttaccgccaacaaagctacatcatcaatggtgttcagcatggcccagcccatggcctcgagctcaacagagccgtacctgtgtctggcagccgctggcgaaaacccaagcgggaagagcctagcatcagctatctctggtaaaataccatctcccctctcaagcagctataaacctatgctgaataataattcattcatgtggccaaattctactcctgtgcccctgctgcaaaccactcagggtcttaaacctgtttcaccacccaaaatccagcctgtgtcttggcaccacagtggtgggactggggattgtgctccccagcccgtggatcacaaggttcccaaaagcatcggtacagtgcccgctgacgcttccgcacacatagctcttagcacggcatcgtcccacgatacgagcacaaccagcgtggcatcctcttggtacaaccggaataacctcgcaatgcgggcagagcccctcagctgtgccctcgatgactccagcgacagtcaggatccgacaaaggaaatacggtttacagaagccgtacgcaagctaactgccagaggcttcgagaagatgccccgtcaggggtgccagctagagcagtcctctttcctcaatccaagcttccagtggaacgtcctgaatcggagccgccgttggaaaccccctgctgtaaaccaacaattcccacaggaggacgcgggttctgtgaggcgggtgttacccggagcgagcgatacccttggcctggacaacaccgtgttctgtactaaacggatcagtatacatctgttggcctctcatgcttccggtctcaaccacaatcctgcttgtgagtcagtgatagattcaagcgcattcggtgagggaaaagcccctggccctcccttcccccagactctcggcattgcaaacgtcgccacccggctcagtagcatccagctgggacaatccgagaaagaaaggcccgaggaggcaagagaattggactccagcgaccgggatatttcttccgccaccgacctccaaccagaccaggccgagacagaggatacggaggaggaactggtggatggtcttgaggactgttgttcccgggacgaaaatgaagaggaagaaggggactcagagtgttcatctctgtcagcagtttctccaagcgaaagcgtcgcgatgattagcagatcctgtatggaaatcctcaccaagcctttgtccaatcacgaaaaagtcgtcaggcccgcattgatatactccttgttccctaatgtacctccgaccatctactttggaacgagagacgaacgggtggagaaactcccatgggaacagaggaagctacttcgctggaagatgagcactgtgactcctaacattgttaagcagacaattggtagatctcattttaaaattagcaaaaggaatgacgattggctgggttgttggggacatcacatgaagtcaccatcctttagatccatccgagagcatcagaagctcaatcatttccctggtagctttcagatcggtagaaaagaccgcctgtggcggaatctgtcaaggatgcaaagcaggtttgggaagaaggaattctcattttttccgcagagtttcattctgcctcaagacgctaaactgctgcgtaaagcatgggagagctcctccagacagaagtggattgtgaagccacccgcatctgctcggggtatcgggattcaagtgattcacaaatggagccagttaccaaaacgccgacccctgttggtgcagcgctaccttcacaaaccatacctgattagtggtagtaaattcgacctgaggatttatgtgtacgtgacaagttatgaccctctacgcatatacctcttttctgacggactggtgcggttcgcatcatgcaaatattcccctagcatgaagtctctggggaataaatttatgcatttgactaattatagcgttaataagaagaatgctgagtatcaggccaacgctgatgaaatggcctgtcagggacataagtgggcactaaaggcgctctggaactacttatctcagaaaggagtcaactctgatgcgatctgggagaaaatcaaggacgtcgtggtgaagactatcatctctagcgagccatacgtgacctctctgctgaagatgtatgtccgtagaccctacagttgtcacgaactcttcggttttgatatcatgctggacgaaaacctgaagccttgggttttggaagtgaatatctccccctccctccactcttcctcgccattggatatttcaatcaaaggccagatgatccgggatctcctgaatttggcgggatttgttcttcccaatgcagaagatatcatttcctcaccatcaagttgttcttcatctacaacatctctgcccactagcccaggggataaatgtagaatggcaccggaacatgtgactgcacagaagatgaaaaaagcgtattatctcacacagaagatacccgaccaggacttctatgcaagcgtactggatgtcctcactcccgacgacgtgaggatcctggtggagatggaagacgagttttccaggagaggtcagttcgagcggatattcccttcccacatctcttcccgatacctgagattcttcgagcagccgcgttattttaacattctgaccacgcaatgggagcagaaatatcacgggaataagctgaaaggagttgatcttctgagatcctggtgttacaagggattccacatgggcgtcgtgtcagattcagcccctgtctggagcttacccacttcattgctgactatctcaaaggatgacgtgattcttaatgcgttttcgaaatcagaaacctctaaacttggcaaacagtccagctgcgaggtttctctcctgctcagtgaagacggcacaacccccaagagtaagaagacccaggccggactgtcaccctatccccaaaagccaagcagcagcaaagattcagaggatacctccaaagaaccaagtctatctacccagaccctccccgtaataaaatgtagcggacagaccagcagacttagtgctagtagcacatttcaatcaatctccgactcccttctggcagtctcaccctag

SEQ ID NO: 27442 - DNA, 2772 bp, synthetic construct
  source 1..2772: mol_type = other DNA; note = Synthetic coding sequence
atgctgagaaggggttcccaagctctcagacgattcagtactggcagggtctacttcaaaaacaaacttaaactggccttgatcggacagtcccttttcggacaggaggtgtattctcacctgaggaaagagggccatcgtgtagttggcgtgtttaccgtgccggataaagatggaaaggccgaccctctagcccttgccgcagagaaagatggcacacctgtattcaaactgcccaagtggcgtgtgaaaggaaaaacgatcaaggaggtggcagaggcttatcggtctgtgggggctgaactcaacgtcctgccattctgcacacagtttattcccatggatatcatagacagcccaaagcacggcagcatcatttaccatccctccatactgccaagacaccggggagcaagtgcaatcaactggacattaattatgggagacaagaaggcagggttttcagtattttgggcggatgacggacttgacacgggcccaatcctcctgcagcgttcttgtgatgtagaacctaatgatactgtcgacgccctctataacagattcctgtttcccgaggggatcaaggccatggtcgaagctgtgcagctgatcgcagatggcaaggccccacgcatcccccaacctgaggagggcgcaacttatgagggcattcaaaagaaagagaatgcagagatcagctgggatcagagcgcagaagtattgcataattggattagagggcacgataaggtcccgggagcatggaccgagatcaacggacagatggtcacattttacgggagtacactcctgaacagtagcgtcccacccggagagccgctggaaattaaaggggctaagaaaccgggtctcgtaactaagaacggtttagtcttattcggcaatgatggcaaagccctgacggtgaggaatctccagttcgaagatggtaagatgatcccagcatctcaatatttttctaccggggagactagcgtcgtggagctcacagctgaggaggtgaaagtagccgaaactattaaggtcatctgggctggcatcctatccaatgtcccaattatagaagactctaccgatttcttcaaatctggcgcaagtagcatggacgtggccaggctcgttgaagaaataaggcagaaatgcggtggcctgcagcttcagaatgaggatgtctacatggccactaagtttgaagggtttatacagaaagtagttcgcaaactgaggggagaggaccaggaagtggagcttgtggtggactacatttctaaggaagtcaacgagatcatggtgaaaatgccatatcagtgttttatcaatggtcagtttactgacgcagacgatgggaaaacctacgacaccatcaaccccactgatggttcaactatctgcaaggttagttacgccagtctcgctgatgttgataaagctgtcgctgctgccaaggacgcctttgagaacggagagtgggggcgaatgaatgccagagaaagaggcaggttgatgtaccgactagcagatctgctggaggagaatcaagaggagctcgcaacaatagaggccctcgacagtggagccgtgtacacactggccctgaagacgcacataggcatgagtgtgcaaacctttcgctattttgctggttggtgtgataagatccaggggagcaccattcccattaaccaggctagacctaacagaaatctgactttcactaagaaagagccactcggtgtttgtgccatcattatcccttggaattaccccctcatgatgttggcttggaagagtgcagcttgcctggccgcaggcaacacccttgtgttgaagccagctcaggtcacacccctgacggcactcaaattcgccgagctctcagtcaaggcagggttcccaaaaggggtgatcaacatcattcctggtagtggcggaatcgcgggacagcggctgtctgagcatcccgatatccggaagttgggcttcaccgggagtacaccaatagggaaacagataatgaaatcatgcgctgtttccaatctgaaaaaagtcagcctagagttaggcggaaaaagtccactcattatttttaacgattgtgaactcgataaggccgtgagaatgggcatgggagccgtctttttcaacaaaggcgaaaattgcatagccgcagggagactgttcgtcgaggagtctatacacgacgagtttgtgactcgcgtcgtggaagaaattaaaaagatgaaaattggggatcctttagaccgttccaccgatcatggacctcagaaccataaggctcatctcgagaagctgttgcagtattgtgagactggagtgaaagagggggcaacgctggtctatggaggaagacaagtccaacgaccaggtttcttcatggagcccacagtgtttactgacgtggaggattacatgtaccttgctaaggaggaaagcttcggacccatcatggtgatttctaaattccaaaacggtgacattgacggagtgctgcagcgggctaacagtacagagtacgggctggcatctggcgtttttactcgcgatatcaacaaggccatgtacgtcagtgagaagttagaagcaggaactgtttttataaatacttacaataaaaccgacgttgccgcacccttcgggggagttaagcagtctgggtttgggaaagaccttggagaggaagcactgaacgaatacctgaaaaccaaaactgttaccttggaatattag

SEQ ID NO: 27443 - DNA, 1323 bp, synthetic construct
  source 1..1323: mol_type = other DNA; note = Synthetic coding sequence
atggagggcgtgctgtacaaatggactaactacctctctgggtggcagccacgttggtttcttctgtgtggtgggatccttagttattatgattcccccgaggacgcctggaaaggatgtaaaggctcgattcagatggcagtttgtgaaatccaagtccactccgtggacaacacacggatggatctgatcatacctggggaacagtatttctacctgaaggctagaagcgtcgcggaaagacaaaggtggctcgtggcactgggatccgcaaaagcctgcctcaccgattcgcgaacccagaaggagaaagaattcgccgaaaatacagaaaatctgaaaaccaaaatgtccgagctaaggttgtactgcgatctgctggtccagcaggtagacaagaccaaggaagtgaccaccaccggggtgtctaattccgaggaaggcatagatgtgggcacacttctgaaatcaacctgcaacacattccttaagacccttgaagagtgtatgcagattgcaaacgccgcttttacgtccgaacttctgtatcgtacaccgccaggctcaccacagctggctatgctgaagagctctaaaatgaagcacccaatcattccgatccacaactctttggagcgacagatggagttgtccacttgtgaaaacggcagcctcaacatggaaattaacggagaagaagaaattctcatgaaaaataaaaacagcttatacctaaagtccgccgaaattgattgtagtatttcttccgaggagaatactgatgataacatcactgtgcagggggaaatccgcaaagaggacggcatggagaatttaaagaatcacgataacaatttaacgcagtcaggatccgactcctcttgttccccagagtgcctgtgggaagagggtaaagaggtcatcccaactttcttttcaactatgaacacatcattcagcgacatcgagttgctggaggactcaggaattcctacagaggccttcttggcaagctgctatgcggtggtgcccgtcctggacaagctgggcccaaccgtcttcgctcctgtgaagatggacctcgtgggcaatatcaaaaaagtgaaccagaagtatatcacaaataaggaggagtttactactctacagaagatcgtactgcacgaagttgaggctgatgtggcccaggtgagaaatagtgcgacagaggcactgctatggctcaagcgtgggctgaaatttctgaaaggatttctgactgaggtaaagaacggagaaaaggatatacagacggctctgagaaatcccacggagaacacatag

SEQ ID NO: 27444 - DNA, 1272 bp, synthetic construct
  source 1..1272: mol_type = other DNA; note = Synthetic coding sequence
atggccatttgccagttctttttgcagggccgttgtcgattcggggacagatgctggaacgaacatcccggtgcccgtggcgctgggggtgggaggcagcagccgcagcagcagccaagcggtaataaccgaagaggctggaatactactagccagagatacagcaacgtgattcaaccaagtagtttcagcaaatccaccccgtggggcggatcgcgggatcaggaaaagccatacttttctagcttcgactcaggggcttcaacaaatcgcaaagagggcttcggattaagtgagaatccctttgcatccctatcccctgacgaacagaaagatgaaaagaagctgttggaaggcatcgtgaaagatatggaggtatgggagtcctccggccagtggatgttctccgtatatagcccagttaagaagaaaccaaacatttccggattcaccgacatatctccggaagaattgaggttggagtaccataactttctgacttctaataacttgcagtcctatctgaactctgttcagcgactcattaaccagtggaggaatcgtgtcaacgagctgaagtctctaaacatctccacgaaagtggccctgttgagcgatgtgaaagacggcgtgaaccaggcagcacctgctttcggcttcggttccagccaggctgctacatttatgtcccccggattccctgttaataatagtagtagcgacaatgcgcagaatttcagtttcaagaccaactctggatttgccgctgcgagtagtggcagcccagcaggctttggctcatccccggcattcggcgcagccgcatcaacctcttcaggaatctccacaagtgcccctgctttcggttttggaaaacctgaggtgacatctgcagcctcttttagtttcaaaagccctgctgcttccagtttcgggtcacccggattcagtgggctccccgcatcactagccaccgggccagtgcgcgctcctgtggcacctgcttttgggggtgggagcagcgttgctggtttcgggtctcctggatcccacagtcataccgcattctctaagcctagctctgacacattcggcaactcatccataagcactagcctgtccgcaagctccagcatcattgccactgataacgtgctctttacaccccgagataagctgacagttgaagagctcgaacagttccagtccaagaaatttacgttgggcaaaatccctctcaagccccctcccctggagctccttaacgtgtag

SEQ ID NO: 27445 - DNA, 1323 bp, synthetic construct
  source 1..1323: mol_type = other DNA; note = Synthetic coding sequence
atgatggctgacgaagaggaggaagttaaacccatccttcagaagctgcaggagcttgtcgaccagttatattccttccgggactgttacttcgaaacgcattctgtcgaggacgcagggcgtaagcagcaggatgttcagaaggagatggaaaagaccctacagcagatggaagaggtcgttggatcggttcaaggcaaagctcaggttctgatgttgaccgggaaggccctgaacgtaactcctgactacagtccaaaagccgaggaacttctgtcaaaggcggtgaaactggagcccgaactggtggaggcctggaaccagctcggcgaggtctattggaagaaaggagatgtggccgcagctcacacgtgcttttcaggggctttgactcattgtagaaataaagtgagtttacagaacctgagtatggtgctgcggcagctccgtaccgacaccgaagacgaacattctcaccacgtgatggattccgtgcgtcaggcaaagttggctgtgcagatggacgtccacgatggaagaagctggtatattctcggtaatagttatttgtctctgtatttctccactggtcaaaatcctaaaatttcccagcaagccctctccgcgtacgcacaggctgagaaagtggaccggaaggccagctcaaatccagaccttcatctcaaccgcgcaacactgcataaatacgaggaatcatacggtgaagcattagaaggctttagccgagccgctgcactcgacccagcatggccagaaccacggcagcgggaacagcagctgctcgagtttcttgatagactgacttccctactggaaagtaaaggcaaggtgaaaacaaagaagctgcagtcgatgctgggctcccttaggcccgcacacctaggcccttgctccgatggtcattatcagagcgcatccggccagaaagtcaccctggagcttaagcctttgtcaaccctccagcctggcgtgaactccggcgctgtaatcctcggaaaagtggttttctccttaaccactgaggagaaggtgcctttcacattcgggctcgtggattccgacggaccatgttatgccgtaatggtgtacaacatcgtgcagtcctggggcgtattaataggggattcagtggcaatccctgaaccaaacctgaggctacaccgcattcagcacaagggcaaggattactcgttcagcagcgtgcgggtagaaaccccattgctacttgtagtcaacggcaaacctcaggggtcatcctcgcaggctgttgccaccgtggccagcagacctcaatgcgagtag

SEQ ID NO: 27446 - DNA, 1341 bp, synthetic construct
  source 1..1341: mol_type = other DNA; note = Synthetic coding sequence
atggaggagacgataaaagaccctcctaccagtgcggtgctgcttgatcactgtcactttagtcaggttatcttcaactccgttgagaagttctatattcccggaggagacgttacctgccactatacatttacgcaacatttcattcctagacgaaaagactggatcggcatattcagggttggttggaagacgacgcgcgagtattacacgtttatgtgggtcacactccccattgacctaaataacaagtccgccaagcaacaggaggtccagtttaaggcatactacctgcccaaggacgacgagtattaccagttctgttatgtggatgaagatggggtcgtgaggggtgcttccattccttttcagtttcgaccagagaatgaggaggacattctcgtggtgactacacagggcgaggtcgaagagatcgaacagcacaataaagaactgtgcaaggagaatcaggagctgaaggatagttgcatcagcctgcaaaaacagaactccgatatgcaagctgagcttcagaaaaaacaggaggagctggagaccctgcaatccataaacaagaagctcgagctgaaagtgaaggagcagaaagactactgggagacagagctgcttcagctgaaggaacaaaatcagaagatgtctagcgaaaatgaaaaaatgggtatcagagtcgatcaacttcaagctcagctaagtacacaggagaaagaaatggagaagctggtgcagggcgaccaggataaaacagaacagttggagcaactgaaaaaggagaacgaccacctcttcctatccctgaccgagcagaggaaagaccaaaaaaaactcgaacagaccgttgaacagatgaagcagaacgaaaccaccgcaatgaaaaagcagcaggaacttatggacgagaactttgatctttccaagcggctgagcgaaaatgagatcatctgcaatgcactgcagcgccagaaggagaggctggaaggcgaaaatgacctgctaaaacgtgagaatagcagactcctgtcttacatgggattggatttcaactcactgccctaccaggtccccacgtctgatgaaggaggggctaggcagaaccccggactggcctacggcaatccatatagcgggattcaggaatcatcaagtccgagcccactgagcataaaaaagtgccccatctgcaaggcagacgatatatgcgatcatacattggaacagcagcagatgcaaccactctgcttcaattgtcccatttgcgacaagattttcccagcaaccgagaaacaaatatttgaagaccacgtcttctgccatagcttgtag

SEQ ID NO: 27447 - DNA, 1329 bp, synthetic construct
  source 1..1329: mol_type = other DNA; note = Synthetic coding sequence
atggctcttccaggtgcacgggcacggggatgggctgccgcagcacgcgcagctcagcgaaggcgcagggttgagaatgccggagggtcccctagtccagagcccgcaggcaggagggccgcactgtacgtgcattggccctattgtgagaagagatgttcctattgtaactttaacaagtacattcctaggcgactggaggaagctgccatgcagaagtgcctggtgacagaagcccagaccctgctgcgcttatctggcgtgcaacgagttgaatcagtgttttttggcggaggcaccccctccctggcgagcccccatacggttgcggcagtactggaagcggtggcacaggccgcacacttaccagcagatctcgaagtaactctggaggctaacccaacctccgcaccagggtccaggttggctgaatttggagccgcaggtgttaaccgcctgtccatagggctgcagtctttagatgacactgagctgcggctgttgggcaggactcacagcgcttgcgatgccttaaggacactcgccgaggccagaaggctttttcccggtcgcgtctcggttgatcttatgctagggctgcctgcacagcaggtgggcccatggctgggccagctccaagagttacttcaccactgtgacgaccacctttccctgtatcaactctctctggagcggggaaccgccctttttgcccaggtccagcgcggagcccttccagcaccagaccctgaactggccgcagaaatgtatcaacgaggccgagccgtcctgagagaagccggatttcaccagtatgaagtgagcaatttcgcacgcaacggagctctttcaacgcataactggacctactggcaatgcggacaatacctcggggtgggcccaggcgcacacggacgtttcatgccacaaggtgccggagggcacactcgggaggcccgtattcagacacttgaaccagacaattggatgaaggaggtgatgctgtttggccatggtaccaggaagcgagtgccactcgggaggctcgagctgcttgaggaggtgctggctttaggcctacgcaccgatgtgggaatcacgcaccagcattggcagcagtttgagcctcagcttacactgtgggacgtgttcggagctaacaaagaagtgcaggagctgctagaaaggggccttctacagcttgaccatagaggactgagatgttcctgggaagggctcgcagtcctggacagcttgcttttaacactgctcccacagcttcaggaagcctggcagcagcgaacacccagtcctgtgccgggtggatag

SEQ ID NO: 27448 - DNA, 1278 bp, synthetic construct
  source 1..1278: mol_type = other DNA; note = Synthetic coding sequence
atggacaaaaatatcggggaacagctaaacaaagcttacgaggcattcaggcaggcatgcatggaccgcgactccgctgttaaagagttacagcagaagacagagaattatgagcagcgtataagggagcagcaggaacagctctcactccagcaaaccatcattgacaagctgaaatctcaactcctgctcgtgaacagtactcaagataataattatgggtgtgtccctctgttggaagactccgagactagaaaaaacaatctcaccctcgaccagccacaggataaagtgatctctgggatcgccagagaaaagctgccaaaagtgcggagacaggaagttagcagcccccgtaaggaaacctcagctagatctctaggaagcccattgcttcacgagcgcggaaacatcgaaaaaactttctgggacttaaaggaggaatttcataagatctgtatgttggcgaaagctcagaaggatcatctgtcaaagctaaatatccccgataccgcaactgaaacccagtgtagcgtgcccattcagtgtacagacaaaaccgataagcaggaggctctgttcaaacctcaagcgaaagatgatatcaaccgcggagcgccatccatcacaagcgtgactccccgtggcctgtgcagggacgaagaggatacctcattcgagagcctgtctaagttcaatgttaaattcccgccaatggacaatgattccacattcctgcacagcactcccgaacgccctggcatcttatctcctgctactagtgaggctgtatgccaggaaaagttcaatatggagttcagagacaaccctggtaacttcgtcaaaacagaggaaacactgttcgagatccaaggcatcgaccccatcgcttccgcgatccagaacttaaagacaaccgacaaaaccaaaccaagcaacttggtcaatacctgtatcaggaccacactggatagagccgcttgcttgcccccaggcgaccataatgcgctatacgtaaatagcttccctctcctcgatcctagtgatgcaccgtttccatctttagactccccaggaaaagctattagggggccacaacaacctatatggaagcccttccccaaccaggatagcgatagcgtcgtcctgagtggaacagatagcgaattgcacattcctcgggtgtgtgagttctgtcaggccgtctttccgccttccatcacatcaaggggagatttcctgcggcacctgaattcccactttaacggcgagacctag

SEQ ID NO: 27449 - DNA, 2055 bp, synthetic construct
  source 1..2055: mol_type = other DNA; note = Synthetic coding sequence
atggagaatcttcagacaaacttctctttagtccaggggagtaccaagaaactgaacggcatgggagacgacggctcccctcccgctaagaaaatgatcacagacatccatgcgaacggtaagacaatcaacaaagtgccgactgtcaagaaagagcacctcgatgattacggagaggcccctgtcgagaccgatggagaacatgtgaaacgtacatgtacatccgtgccagaaacccttcatctaaatccctctctgaagcatacccttgcacagtttcacctcagttcccagagctcactgggcggtcctgcagccttctccgccagacactcccaggagtccatgtccccgacagtgttcctgcctcttccatctccacaggtgcttcctggccctctactgattcccagtgacagcagtaccgagctgacccagacagtgctagagggcgagtccatttcttgtttccaggttggcggagagaagagactgtgcctacctcaggtcctgaattctgtgctgcgcgagtttaccctacagcagatcaataccgtgtgcgacgaactttacatctactgttcaaggtgcacaagcgaccagcttcacattttaaaggtgctcggaattctgccattcaacgccccatcctgtggtctgataaccctgacagacgcccagcggttatgcaatgccctcctccgaccacggactttccctcagaacggctcagtcctgcccgcaaaatcatcactggcacaacttaaggagacgggcagtgcattcgaagtggaacacgagtgccttggaaaatgtcagggtctcttcgccccacagttttatgtacagcccgatgccccatgcattcagtgtctcgagtgctgtggcatgttcgcccctcagactttcgtaatgcacagccatagatcccccgacaagcggacttgccattggggattcgaatcagctaagtggcactgctacctgcacgtaaaccagaaatacctcggcactcctgaagaaaaaaaactcaagattattcttgaggaaatgaaagagaagtttagtatgcgcagcgggaaaaggaaccagtctaagactgacgcaccctcagggatggaactgcagtcttggtacccggtaataaagcaggaaggtgaccatgtgtcccagacacattcttttctccacccctcttactatctctacatgtgcgataaggtagtggctcctaatgtctcactgacatctgcggtgtctcagtctaaagaactaaccaaaaccgaggcctcaaaatccatctcacgccagtcggagaaagcccacagttcaggtaagttgcagaaaaccgtttcctacccagacgtgtcactggaggaacaggaaaagatggacctcaaaacttcccgagaactgtgttcaaggctggacgcgtcgatcagcaacaacagcactagcaaacgcaaatccgagtctgcgacttgcaatttggtcagggacatcaataaggtgggaatagggttagtggctgccgcaagctctcctttgctggtgaaggatgtaatctgcgaggatgataaaggtaaaatcatggaggaggttatgcgcacatatttgaagcagcaggaaaagctgaaccttatcttgcagaagaaacagcagctacagatggaggtgaagatgctgtcatcttcaaaaagcatgaaggagctgaccgaagaacagcaaaatctccagaaggagctggaatctctacagaacgaacacgcccaacggatggaggagttctacgtggagcagaaggaccttgagaagaagctggagcagatcatgaaacaaaaatgtacctgcgacagcaatcttgagaaggataaagaggctgaatatgccggacaactggcggagctaagacagcggctggatcatgctgaagcggatcgacaggaattacaggatgagctccggcaggagcgcgaggctcgccagaaattggagatgatgattaaggaattaaaactccaaatcttaaaatcctccaagacagcaaaggaatag

SEQ ID NO: 27450 - DNA, 1080 bp, synthetic construct
  source 1..1080: mol_type = other DNA; note = Synthetic coding sequence
atgtcatatcgcagggagctggaaaagtaccgggacctggatgaggacgaaatcctcggggcattgactgaggaggagttgcgcactctcgaaaatgaactggacgagctggatcccgataacgccctgctgcccgcaggcctccggcagaaggaccaaacgaccaaggcacctactggtccatttaaacgcgaggagctgctggaccacctggagaaacaagcgaaagaattcaaagacagggaagatttggtgccctataccggcgagaagagaggaaaggtgtgggtgccaaaacagaaacccctggaccccgtactggagtcagttacactggagcccgaactcgaagaggccctggcaaacgcaagcgacgccgagctgtgcgatatcgctgccatcctgggcatgcacacgctcatgagtaaccagcagtactaccaagcactgtcatcctcgagcattatgaataaagaaggtttaaacagtgtgataaagcccacacaatacaaacctgtccccgacgaggaacccaattctacagacgtagaagaaacactggagaggataaaaaataatgatcccaagctggaggaagtgaatcttaacaatattagaaatatccctatacccacactgaaggcgtacgcagaggcattgaaggaaaattcgtatgtgaaaaaattcagcatcgtgggtacccgaagcaacgatcccgtggcctacgcactcgctgagatgctcaaagagaataaggtcctgaagacccttaatgtagaatcaaacttcattagtggcgcaggaattcttaggttggtggaagcactcccttacaatacaagcctcgtggagatgaagatcgacaatcagagtcagcctctgggcaataaggtggagatggaaattgtttcaatgcttgagaagaacgcaacgttgcttaagttcggttatcattttactcagcaggggcctcgcctgagggctagtaacgctatgatgaataacaacgatctagtgaggaaacgaagactggcagatctcactggtcctatcattcctaagtgtaggtcaggcgtctag

SEQ ID NO: 27451 - DNA, 1941 bp, synthetic construct
  source 1..1941: mol_type = other DNA; note = Synthetic coding sequence
atggaggagcgcggatctcccgatggggacctggcccgaagcctcgagcaaggtcctgagggaccggaaacgcctatccaagtggtacttcgtgtgagacccatgtcagcagctgagctacggagagggcagcaatcagtgctgcattgtagcgggacccgaacccttcaaggcggacccgaagtggcctttaggtttggggctgttctggacgctgctcggacacaagaggacgtgtttcgggcttgcggagtgcgtaggctgggagaacttgcgctgagaggtttcagttgcacagtgttcaccttcggacagacaggcagcggtaaaacctatacactgaccgggcctccaccacagggtgagggggttcctgtgcctccttcactggcaggcatcatgcagagaaccttcgcctggcttttggaccgggtgcagcacctgggtgcccctgtgacattgagagcttcctacctggagatctacaacgaacaggtccgtgatttgctgtccctgggatcgccaagaccactgccggtgaggtggaacaagactcgagggttctacgtggagcagctgcgcgtggtggaatttgggagtctggaagcacttatggagttgctgcagaccggcttgtcccgacgacgaaatagcgcacacacattaaatcaagcgagcagccgcagtcatgcactacttactctgtatatatcacgtcagacagcccagcagatgccaagtgtggatccgggtgagcctcctgtggggggtaaactgtgttttgtggacctggcaggaagtgagaaagttgccgcaacgggttcacgtggggaactgatgctggaggccaactcaattaacagatcgctgcttgccctaggtcactgtatttcactgctgctggaccctcagaggaagcagagtcacatcccattcagagattcaaaactgactaagctgttggctgactctctgggaggcaggggagtgactctgatggtggcatgcgtctccccttccgcccagtgtttacctgagaccctgtcgaccttacgttacgccagtcgcgcacagcgggtgacaactcgcccacaggcaccaaagagtcccgtcgctaagcaaccacagcgcctcgagacagagatgcttcaactgcaagaggagaacaggcgtctgcagtttcaattagatcaaatggattgtaaggcctcagggctctctggagctcgcgtggcatgggcccagaggaacctgtatggtatgttgcaggaatttatgctggaaaatgaaaggctgagaaaagagaagtcacagcttcagaacagcagggacctagctcagaatgagcagcgcatcctagcccaacaggtgcatgcacttgaaaggcggctgttgtctgcttgctatcaccaccagcagggtcccggtctgaccccaccctgtccgtgcttgatggcacccgctccgccatgccacgcactgccacccttgtattcttgcccatgctgtcatatttgccctctgtgccgggtacccttagctcactgggcttgtctgccgggtgaacaccatctccctcaggtgctcgaccccgaggcaagtggaggacgaccccctagtgccagacccccaccatgggcccctccgtgctcccccggatctgcaaagtgcccaagagaacgttcacactctgattggactcaaactagggtactcgctgagatgctcactgaggaagaagtggtaccgtcagctcccccactgcccgttaggcccccaaagacttcacccggtctgcggggtggggctggtgtacccaacctggcccaacgacttgaggctctccgggatcagattggctcttcgctgcgaaggggaaggagccagcccccatgtagcgaaggagcgcgttctccaggacaggttctgccaccccactag

SEQ ID NO: 27452 - DNA, 462 bp, synthetic construct
  source 1..462: mol_type = other DNA; note = Synthetic coding sequence
atggcgcgtaataccctatcaagcaggttcaggcgagtggatattgacgaattcgacgaaaacaagttcgttgacgaacaggaagaggctgccgcagcggctgctgaaccgggaccagatccctctgaggtggacggcctgttgaggcagggcgacatgctgagagcttttcatgctgctctgcgcaattcaccggttaacaccaagaatcaggctgtgaaagagcgcgctcagggcgtcgtgctgaaggtgctaaccaatttcaaatcttcagagatcgaacaggcggtccagagcctggatcgcaatggtgttgacttgctcatgaagtatatctataaaggtttcgagaagccgactgagaactccagcgcggtgctgctccaatggcatgaaaaggctcttgccgtggggggtctgggctccattattcgcgtcctgaccgccaggaagaccgtctag

SEQ ID NO: 27453 - DNA, 3318 bp, synthetic construct
  source 1..3318: mol_type = other DNA; note = Synthetic coding sequence
atggcggcaaccgcatcagccggtgtcccggcaacggtgtctgagaaacaggagttttaccagctgttgaaaaatctaatcaatcctagttgcatggtgcggagacaagccgaggagatctatgaaaacattcctggactgtgtaagacaacttttctgctggacgctgtccgcaatcggagggctgggtacgaggttcgccagatggctgccgctctcttgaggaggctgctatctagcggatttgaagaagtataccctaatcttcccgcagatgtgcaaagggacgtgaagatcgaacttatcctcgccgtgaagcttgaaacacacgcttctatgaggaaaaagctgtgcgacattttcgcagtgttggcacgcaacctgatcgacgaagatggcaccaatcactggccagagggactgaagttcctgatagattccatttattctaaaaatgtggtgctgtgggaggtcgcgctccacgtgttttggcactttcctggcatctttggaacgcaggaaaggcacgatttggatattataaagcgcctgcttgaccaatgcatccaggatcaggagcaccccgcaatcagaacgctgagcgcaagggccgcagcagcctttgtgctggccaacgagaataatattgcactttttaaggatttcgctgacttgttgcccggaattctccaggccgtgaatgattcttgttaccaggacgatgattccgtgttagaatcattggtggaaatcgccgatactgttcctaaatacctaggaccctatctcgaggacacactccagctcagtctcaaactctgcggagactccagactgtctaatcttcagagacagttggctctggaggtgatcgtcactttatcagaaacggccactccaatgctgaaaaagcataccaacattatcgcccaagcggttccccatatcctggctatgatggtcgatcttcaagatgatgaggattgggtcaacgctgacgagatggaagaagacgacttcgacagcaacgctgtagccgcagaatccgcattagacagactggcatgcgggcttggcggtaaagtcgtcttgccgatgaccaaggaacacataatgcagatgctgcagtctccggattggaagtatcgccacgcgggactgatggccttgtcggctatcggtgaagggtgtcaccagcagatggagtctattcttgacgaaaccgtcaactctgtactgctttttttgcaggatccacaccctcgcgtgagagcggctgcctgcaccaccctcggtcagatggcaaccgactttgctcctaacttccagaagaagttccatgagaccgtgatcgccgctctgttgaggaccatggagaatcaggggaaccagagagtacagtcacatgctgcatctgctctgataatattcatcgaggattgccctaagtctctactggtcctgtacgtcgatagtatggtgaaaaatttgcactcagtcctcgtgattaagctccaggagctgattcgtaatgggaccaagttagctttagagcagctggtcaccacaatagcttctgtggctgacacaattgaggaaaaatttgtgccctattacgacatctttatgccttccctgaagcacatagtagaactcgctgttcagaaggaactgaagttgcttagaggtaaaacaatcgagtgcatctctcatatcgggctcgccgtaggaaaggagaaattcatgcaagatgccagtaatgttatgcagttgttactgaaaacacagtcggacctcaacaatatggaggacgacgacccccaaacaagttatatggtcagcgcctgggcgagaatgtgtaaaatcctggggaaagacttccagcagtatctcccccttgttattgaacccttgatcaaaaccgcatccgcaaagccagatgtagccctcctcgatacgcaggacgtcgaaaatatgagcgatgatgatgggtggcaattcgtgaatctcggcgatcaacaaagcttcggtatcaagacttccgggcttgaggctaaggcaaccgcctgtcagatgctggtgtattatgctaaggaactgagggaagggtttgtggagtacactgagcaggtagtgaaactgatggtcccactgctaaaattctactttcatgacaacgtacgggttgcagcagctgagagcatgccctttctcctggagtgtgccagaattcggggtcccgagtacctggcacagatgtggcagtttatctgtgaccctttgatcaaagccatcgggaccgaaccagatacagatgtgctgagcgagatcatgaatagcttcgccaagtcaattgaagtcatgggagacggctgtctgaacgatgagcacctcgaagagcttgggggaattctgaaggctaagctggagggccactttaagaaccaggagttaagacaggtgaaacgccaggaggaaaactacgaccagcaggtggaaatgtccttacaggacgaagacgagtgcgacgtgtacattctgaccaaagtttcagacatcttgcattctctttttagtacatacaaggaaaagatcctcccatggtttgaacaactgcttcctcttattgtgaatcttatttgttcctctaggccttggcctgatcgccagtggggcctatgcatcttcgacgacatcatagagcactgttcaccaacttcgtttaagtacgttgaatacttcaggtggcccatgttgttgaacatgcgggacaacaatcccgaagttcgacaggccgcagcctacggcctaggtgtcatggcacagtttggtggggacgattataggtcattatgttccgaagcagtgcccttactggtcaaggttattaaatgcgctaactcaaaaaccaagaagaatgtcatcgccactgagaattgcatctcagccattgggaagatcctgaagttcaagcctaactgtgtgaatgtggatgaggtgctgccacactggctctcatggctgcccctgcatgaggataaagaggaagcaatccaaaccctctcttttctgtgcgatctgatcgaatctaaccatcctgttgtaattggtcccaacaatagcaacttgcctaagattatctctattatcgccgagggaaaaattaatgagactattaactatgaagatccttgcgccaaacgactcgctaatgtagtacgccaagtccagacttccgaggacttatggttggagtgcgtgtcacagctggatgatgagcagcaagaggcattacaagagctccttaattttgcatag

SEQ ID NO: 27454 - DNA, 1914 bp, synthetic construct
  source 1..1914: mol_type = other DNA; note = Synthetic coding sequence
atggaagtcaccggcttcggggttactaggcccggaaaagttccacaggctagaatgagtggtctggttttagggcaacgggatgagcccgctggacaccggttatcccaggaggagatcctaggctccaccaggttggtctcccagggtctggaggcacttaggtctgagcatcaggcagtgctacagtcactaagccaaacaatcgagtgcttgcagcagggaggacatgaggaggggctggtgcacgaaaaagctaggcagctccgtagaagcatggaaaacattgaattgggtctttccgaggcacaggtaatgctggcactagcttcacacctgtctacggtggagagtgaaaagcagaaactccgtgcacaggtgcggcgattgtgtcaggaaaatcagtggttgagagatgaactggccggaacccaacagcggctgcaaagatccgagcaggccgtggcccagcttgaggaggaaaagaagcatctggagtttctaggacagttgcgccagtacgatgaggacggacacacctctgaggaaaaggaaggggacgccactaaggatagtcttgatgacttattcccaaatgaagaagaggaggaccccagtaatggcttatcccgcggtcagggagcgactgcggctcagcagggtggttacgagataccagctcgcttgaggacactgcacaacctggtcattcagtacgcagcgcaagggagatacgaagtcgctgtgcccctctgtaagcaggccctcgaggacctggagaggacaagtggcagaggccatcctgatgtggccactatgcttaatatcctggccttagtgtaccgcgatcagaataagtacaaggaagcagcacatctgctcaacgatgcactgagcatacgagagagtacgctgggccctgaccatcccgcagtcgctgccacactcaacaatctggccgtactctacggaaaaagaggcaagtacaaggaggccgagcctctctgccagcgggctttggaaatcagggagaaagtgttgggaaccaaccatcccgacgtcgcaaaacagttgaacaatctcgcccttctctgccagaaccaaggaaaatacgaagcagtggaacgctattatcagcgggcactcgccatctatgagggtcaacttggcccagacaatcccaatgtagcgcgaaccaagaataacctggcttcctgttacctgaaacagggcaaatacgccgaagcagagactctctacaaggaaatattaacaagagctcacgtgcaggaatttggaagcgtcgacgacgaccataaacctatttggatgcacgccgaggaaagggaagagatgagcaagagccggcatcacgagggcggtacaccatatgcagagtacggtgggtggtacaaggcctgtaaggtgagttcccccactgtcaacaccacactgcgcaatctgggcgctctttatcggcgtcagggcaagctggaggctgctgaaactttggaggagtgcgcactgaggtcccgcaggcagggcaccgatcccataagtcagactaaggttgcggagcttcttggggagtctgacggcagaagaacaagtcaggaggggcctggagacagcgtaaagttcgagggcggtgaagacgccagtgttgccgtggaatggagtggtgacgggtctgggacattgcaacggagcgggagcctcggcaagattcgggacgtattgcgccgttcttcagagttgctggttaggaaactacagggcaccgagcctcgtcccagctcgagtaacatgaagagagcggcaagcctaaactacctgaatcagccttctgctgcacccctgcaggtgtcgcggggattgagtgcatcaactatggacctctctagcagctcctag

SEQ ID NO: 27455 - DNA, 3966 bp, synthetic construct
  source 1..3966: mol_type = other DNA; note = Synthetic coding sequence
atgcaatgcctggccgcagcgctgaaggacgaaaccaatatgtccggagggggagaacaggctgatatactgcccgcaaattacgtggttaaagacagatggaaagttctgaaaaagattggtggaggtggatttggtgagatctacgaggctatggatcttttaacgcgtgagaacgttgccctcaaagtggagtccgctcagcagcccaagcaggtcctcaagatggaggtggctgtcctgaaaaaactgcagggaaaggatcacgtctgcaggtttatcggatgcggtagaaacgaaaagttcaattacgttgttatgcagctgcagggtcggaatctagccgacctgaggcggtcccagcctcggggaacttttacactgagtacgaccttacgcctcgggaagcaaatattagagtctatcgaggccattcactctgttgggtttctgcatcgagatataaagccatctaattttgccatgggacgcttgccttccacctaccgaaagtgctacatgctcgactttggtctggcgcgacagtacaccaacaccaccggtgacgtcaggcctccgagaaacgtggccggattccgaggaaccgtaaggtacgcttccgtcaacgctcacaagaacagggagatgggcagacacgacgatctgtggtctctgttttacatgctggtggaatttgccgttggacaactaccttggaggaaaatcaaagataaagagcaagttgggatgatcaaagagaagtatgagcaccggatgctgctgaagcatatgcccagcgaattccacctgttcttggaccatattgcaagtcttgactacttcacaaagcccgactatcagttgataatgtccgtctttgagaactcaatgaaggaacgcggaattgccgagaacgaggccttcgactgggagaaggccggtacagacgccttgctgtccacttccacctcgacgcctccccagcaaaatacgcggcagactgctgcaatgttcggagttgttaacgttactcccgtgcccggagacctgctgcgtgaaaataccgaagatgttctgcaaggggaacacctgagtgatcaagaaaacgcgcctcctatactgccaggaagaccaagcgagggtctcgggccttcacctcacctcgtccctcatcccggaggccctgaagctgaagtgtgggaggaaaccgacgttaataggaataagcttaggatcaatatcggaaagagcccttgcgttgaggaggaacagtccaggggaatgggcgtcccatcctcccctgttcgtgcccctcctgactcacccactacacctgtgcgttccctgcgttatcgaagggtcaactcccccgagagcgagcggctgagcacagcagatggaagggtggaacttcccgagcggagaagtagaatggacctgcctggaagtcccagccgacaggcttgctcatcgcagccagcacagatgctgagcgtggacacgggccatgcggaccggcaggcatcaggcagaatggacgtcagtgcctccgtggaacaagaggctctctctaatgcgtttcgtagtgtgcccttggcagaggaagaagattttgatagtaaggaatgggtaattatcgataaagagacagaactgaaggattttcctcctggggcagagcccagcacctctggaacaaccgatgaggaacctgaggaactgagacccctgccggaggaaggggaggaacgtcgcagactaggcgcagaacccactgtgagacccagaggcaggagcatgcaagcactggccgaggaggacctccagcaccttccaccacagcctctgcctccacagttgagccagggagacggtcgtagtgaaaccagtcagccaccaacgcctggcagtcctagccactccccgttacacagcgggccaaggccaagaaggagagagagcgatccaacaggaccacagcgccaggtcttttccgtggctcccccattcgaggtgaacggcctgcctcgggctgtgcctctttcattaccttaccaggactttaagagggatctgtccgattatcgggagcgagcccgtctattaaacagagtacgaagggtcggtttctctcacatgttactgacaacaccgcaagtccctttagccccagttcagccccaggctaacggtaaggaagaggaggaggaagaagaagaagatgaggaagaggaagaagaggacgaagaagaggaagaagaagaggaggaggaagaagaggaagaagaggaggaggaagaggaggaggaggaggctgctgctgctgtcgcacttggcgaggttctcggtccacggagtggctctagcagtgagggctccgagagatccactgaccggagccaggaaggagccccaagtactcttctggctgacgaccagaaggaatcccgcggaagagcctcaatggcggatggggacctggagccagaagaaggctccaagacactggtattagtgtcgccaggggacatgaagaaatctccagttactgctgaacttgcgccagaccctgatctgggaaccctcgctgcactcactccacaacacgaaagaccacagcccaccggtagccaactggatgtcagcgaacctggcaccctgagcagcgtccttaaatccgaacctaaacctcctggccctggcgcaggtctgggcgcagggactgtcaccacaggagtcggcggtgtggctgtcaccagctcccccttcaccaaagtggaaaggactttcgtgcacatcgcagagaaaacacacctcaatgtcatgtcaagcgggggtcaggcactgagatctgaagagttctccgccggaggcgagctgggactggagctggcaagtgacggaggcgctgtcgaggagggcgctcgcgctcctttggaaaatggactggctctaagtggcttgaacggagccgaaatcgaggggtcagccctgtccggggcacccagagagaccccctcagagatggcaactaactccctgcctaatggaccagcactagcggacgggcctgccccagtttctccactcgaaccttctccagagaaggtcgccacgattagcccaaggagacacgcaatgccgggatcacgccctcggagtaggatccctgtcctgcttagtgaggaggacacagggtcagaaccttccggctcgctgagcgccaaagaacggtggtcgaagcgggctaggccacagcaagatttagcgaggcttgtcatggagaagagacaggggaggctgcttctgaggttggcctctggggcaagcagctcttcgagcgaagagcagcgccgagcctctgaaacgttgagcggcaccggctccgaagaggatactcccgctagtgaacccgctgcagcccttcccaggaaatctggtagggctgctgcgactcggtccagaatccccaggccaatcggcttgcgcatgcccatgcctgtggccgctcagcaacctgccagtcggagtcatggagccgcacctgccctggacactgcgatcacatcacgcttgcagcttcagactccgcctggtagcgctaccgcagctgatctccgtccgaaacaacctcccggacgcggtctcggccctggaagggcacaagccggagctcgccctccagcccctcgctctcctaggctaccagctagcacctccgccgctcgcaacgcaagcgcgagtcccaggagtcagagcctgtctcgcagggaatcaccctccccgagccaccaagcgaggccaggggttcccccacccagaggcgtgccccctgcgagggcacaacccgacggaacaccttcacccggaggaagcaagaaggggccaagaggaaagctccaggctcagagggctacgacaaagggacgagcagggggagctgagggacgagcaggcgctcgttag

SEQ ID NO: 27456 - DNA, 1818 bp, synthetic construct
  source 1..1818: mol_type = other DNA; note = Synthetic coding sequence
atgagccaattatcgtctaccctgaagcgctacacagaatctgcacggtataccgacgcacactacgcgaagtccggatacggcgcatacaccccctcaagttacggagccaacctcgcagcgtcgctcctggaaaaggaaaaattaggctttaagcccgttcccaccagctcattcctgacacggccaagaacatatgggccttcatcactgttagactacgacagaggtcggccactcttgcgtcctgacatcaccggcggagggaaacgtgctgaatcccagaccagaggcaccgagcgacctctggggagcgggctgagtggtggaagcggcttcccctacggggttacgaacaactgcctgtcctacctgccgataaatgcctatgatcagggagtgaccctgactcagaagctggactctcagagcgatctcgccagagacttttcaagtctgcgaacttctgacagctaccgaattgacccaagaaacctggggagatctccaatgttagccagaacccgaaaagagctttgcaccctccaaggcctgtaccagacagccagctgccctgagtatctggtggactatcttgagaactacgggcgtaaggggtctgcctcacaagtcccaagccaggcaccacctagtagagtaccggagattatcagccccacataccggcctatagggaggtacaccctgtgggaaaccggtaaaggccaggctcccggacctagcagatcctcaagccccggtagagatgggatgaattccaaatctgctcaaggcctcgctggtctgagaaatttggggaacacttgctttatgaattcaatcttgcagtgcctgtctaatacgagagagctgagggattattgtctacaacgcctgtacatgcgggacctccatcacggttcaaacgctcataccgctctagtggaggaatttgcaaagctcatccagacaatctggacaagcagcccaaacgatgtggtgagtccttccgagttcaagacccaaattcagaggtatgcacctaggtttgtgggctacaatcaacaggatgctcaggagtttcttaggttcctgcttgatggcctgcacaacgaggtgaacagggttaccttgaggcctaagagcaatcctgaaaatcttgaccacctcccggacgatgaaaaggggagacagatgtggcgcaagtacctggagcgggaggattcaagaatcggggatctgtttgtcggacaattaaagagctcacttacttgcacagactgcggatactgtagcaccgtgttcgaccctttttgggacctgtcactgcccattgcgaaacggggatatccagaggtcacattgatggattgcatgagattgtttactaaggaagatgtgttggacggggatgagaagcctacatgctgcagatgccgagggagaaagcgctgtataaagaagtttagcatacagcgttttcccaaaattttggtcctccacctgaagcgctttagtgagagtcgcatacgtacaagcaaattgacaaccttcgtgaacttcccactgcgtgatctggacttgcgagaattcgccagcgagaatactaatcacgcggtttacaatctgtacgcggtgtcgaaccactccgggacaaccatgggaggtcactacaccgcttactgtcgatctccagggaccggagagtggcataccttcaatgactcatctgtcacacccatgtccagctcccaagtcagaacctccgacgcttacttgttgttttacgagctcgccagccccccttctcgaatgtag

SEQ ID NO: 27457 - DNA, 1353 bp, synthetic construct
  source 1..1353: mol_type = other DNA; note = Synthetic coding sequence
atggttccgttggtcgccgtggtcagtggccctcgtgcacagctgtttgcgtgtctactccggctgggtacccaacaggtgggtcctctgcagcttcacactggagccagccatgccgctcgaaaccattatgaagtcctcgtactgggcggtggatctggcggaatcaccatggccgcacgcatgaagagaaaggtgggggctgagaatgtagccattgtagagccatccgagagacacttctatcaacctatttggactctggtcggcgcaggcgctaagcagctgtcatcctctggccgaccgaccgcatcggtaatcccctccggagtggagtggataaaggctagggtgacagaactcaatccagataagaactgcatccacacggatgacgatgagaagatctcgtacaggtacctgataattgcactgggaatccagttggattacgaaaagatcaaggggctccccgaaggctttgcccacccaaagattggaagcaattactcagtaaaaactgtggaaaagacctggaaagctctccaagacttcaaagagggcaacgctattttcactttcccaaacacccccgtgaaatgtgccggtgccccacagaagattatgtatttgtccgaagcatatttccgcaaaacgggtaaacggagtaaagccaatatcatcttcaacacgagcctgggtgcaatctttggtgtaaagaaatacgctgacgccctgcaggagatcatccaggaaaggaacctcaccgtgaattacaagaagaacctgatcgaagtgagagcagacaaacaggaggccgtgttcgaaaacttagacaaaccaggcgagacacaagtaataagctacgagatgctgcacgtgacccccccaatgagtccacccgacgtcctcaaaacaagcccagtggctgacgccgcaggttgggtggacgtcgacaaagaaactctccagcacagacggtacccaaacgtgtttggaatcggcgattgtacaaacctgcccacttccaagacggctgcggcagtggccgctcagagcggtatccttgatcggacgatttctgttattatgaagaaccagacccctactaagaagtatgacgggtatacaagctgtccgctcgtgacagggtataacagggtgatacttgccgagtttgattataaggccgaaccactggagacttttccgttcgaccagagcaaagagcggttaagtatgtatctgatgaaggcggatcttatgcctttcctttactggaatatgatgctgaggggatattgggggggacccgcattcctacggaagctgttccacttaggaatgagctag

SEQ ID NO: 27458 - DNA, 5243 bp, synthetic construct
  source 1..5243: mol_type = other DNA; note = Synthetic coding sequence
atggacggggtctcaagcgaggccaacgaggagaacgataacatcgaacggcctgttcgtcggcgacattcttcaatcctaaaacctcctcgcagcccacttcaggacttgcgcggtggaaatgagcgggtgcaggagtctaatgctctgcgaaataaaaagaattccaggcgggtgtcattcgccgacactatcaaggtgtttcaaacagaaagtcatatgaaaattgtgaggaaatcggaaatggaggaaacagagacaggggagaacttgctgttgattcagaacaaaaagttagaagataactactgtgaaataacagggatgaacacactgctatccgctcccatccatacgcaaatgcaacaaaaagagttcagcatcatcgaacacacccgcgagaggaagcatgcaaatgaccagacagtaatcttctctgatgaaaaccagatggatctcacaagcagccacacagtcatgatcactaaagggctgctcgacaatcctatcagcgagaaatccaccaaaatcgacacgacaagttttctagcaaatctgaagctccatactgaagacagccgaatgaagaaagaagtgaacttcagcgtggatcagaacacaagctctgagaacaaaatcgactttaatgacttcattaaacgactgaaaaccggaaaatgttcagctttccccgatgtgcccgataaggaaaactttgagataccaatctattccaaagagcctaatagtgccagctctactcaccagatgcatgtgagtctgaaagaagatgaaaacaatagtaacataaccaggttatttagagaaaaggacgatggcatgaactttactcaatgccacacggccaacatccagacactgattcccactagctctgaaacaaactcacgcgagagtaagggcaatgatattactatttatggaaacgactttatggacctgacctttaatcacacactccagatcctcccagcgacaggaaatttttccgaaattgagaatcaaacccagaatgcaatggacgtgactaccggttacggaacaaaagccagcggcaacaaaactgtgtttaaatcaaagcagaatacagcctttcaagacctctccattaactcagctgacaagatacacattactaggagccacatcatgggtgctgaaacacatattgtctcccagacctgtaatcaggacgcgagaatactggctatgacacctgaatctatctactcaaatccctccatccagggctgcaagaccgtgttttactcctcttgtaacgacgcaatggagatgactaaatgcctgtccaatatgcgggaagagaagaaccttttaaaacacgattccaactatgctaaaatgtactgtaacccagatgccatgtctagcctgaccgaaaagactatatacagcggtgaagaaaatatggacatcactaaatcccatacggtcgccatcgataatcagatcttcaagcaagaccagtccaatgtgcagattgctgcggcacccacccccgaaaaggaaatgatgcttcagaaccttatgacaactagtgaggacggaaaaatgaacgtgaactgtaacagtgtgccacatgtttctaaggagcgcatacagcagagcctctccaaccccctgtctatctcactgacagaccggaaaactgagctgctctctggcgagaatatggatctgactgaatcacacaccagcaatttgggatcacaggtgcctctggctgcttacaacttagccccagaatctaccagcgagtcccactcccagtctaaatcgtccagcgatgaatgtgaggaaataacgaagagcaggaacgagccttttcagcgcagcgacatcatcgctaagaactccctcacagacacgtggaacaaagataaggactgggtgctgaagatacttccataccttgataaagattcaccgcagagcgctgactgcaaccaggaaatcgccactagccacaacattgtctattgcggaggagtgttggacaaacagattacaaatcggaacacagtgtcctgggagcagtcactgttctctacaactaagcctttgttctcatcaggccagttttcaatgaagaaccacgatacagcaatttctagccatactgtgaagtccgttttaggccagaacagcaagttggcagagcctctccgcaagtccctttcaaacccaactcccgattactgccatgataagatgatcatctgttcggaggaggagcagaatatggacctaacaaaatcgcataccgtggttattgggtttgggcctagtgagctgcaggagctgggtaaaaccaatctcgagcacaccaccggacagctgacaaccatgaaccgccagatcgccgtcaaggtggaaaagtgtggcaaatcccccatcgagaagtcgggcgtccttaaatccaactgcatcatggatgtgcttgaggatgaatctgtgcagaaacctaagttccccaaggaaaaacagaacgtaaaaatttggggaaggaaatctgtcggcggaccaaagatcgataagacaattgtcttctccgaggatgacaagaacgatatggacatcaccaaatcctatacaattgaaattaaccatcgccctttgctggagaaaagggactgtcacctggtccctctagcaggaacatccgagaccattttgtatacttgccgccaggatgacatggagataacgcgctcacacacaacagctctagagtgtaaaacggtcagtcccgacgagatcaccacccggcctatggacaaaacagtggtattcgttgacaatcatgtcgagctggaaatgacagaatcccacaccgtgtttatcgattatcaggagaaagaacggactgatcgcccaaatttcgagctcagccaaagaaaaagtctaggaactccaacagtgatttgcacaccaactgaagaaagcgtcttttttcccggaaacggcgagagcgatcggttggtggccaatgacagtcagctcacaccattggaagaatggtccaacaacaggggccctgtcgaggtggcagacaatatggagctctccaagtccgctacttgtaagaatatcaaagatgtgcagagcccgggtttccttaacgagcccctgtctagcaagagtcaacgtagaaagagcctgaagctaaaaaacgacaaaacgattgtattcagcgaaaatcacaagaacgatatggatattactcagagctgtatggtggagattgataacgaatcggcgctcgaggacaaagaggacttccacctggcaggggctagcaagactattctgtattcctgtggccaagatgatatggaaatcacccgctcacatactaccgctctggagtgcaagaccttgctgcctaacgaaattgccatccgccctatggacaagaccgtcctgttcaccgataactactctgaccttgaggtaactgactctcacacggtgtttatagattgtcaggctacggaaaagatcctggaagaaaaccctaagttcggaatcggtaagggaaaaaacctgggcgtcagttttccaaaggataactcttgtgtacaggaaatcgccgaaaaacaggccctagctgtaggcaataaaattgtgctgcataccgagcaaaagcagcagttattcgctgcaaccaaccgaaccactaacgagattattaagttccactccgcggcaatggatgagaaggttatcgggaaagtcgttgaccaggcctgtacgctggaaaaagctcaagttgagtcatgtcaactgaataatcgggatcgcagaaatgtggacttcacctccagtcacgccactgccgtgtgcgggtctagtgacaattactcttgtctgccaaatgtgatctcgtgcacggacaatttggagggcagcgccatgctgctgtgcgacaaggacgaagaaaaagcaaattactgtccggtgcagaatgatctcgcttacgccaacgacttcgcttcagaatactatctggagtcagaaggacaaccactctccgctccgtgtccactgctggaaaaggaggaggtgattcagacgagcacaaaagggcaattggactgcgtcatcaccctccacaaagatcaggatctgatcaaggatccacggaacctactggctaaccagaccttagtatattctcaagatctgggagaaatgaccaaattgaactctaaacgcgtatccttcaagctccctaaagaccagatgaaggtttacgttgacgacatatatgtgatccctcagccccattttagtactgatcagcctcccttacctaaaaaaggccagtcaagcattaacaaggaggaagtcattttgagcaaggcaggcaacaaaagcctaaacatcatcgagaacagctccgccccaatttgcgagaataaacccaaaatcttaaatagtgaagaatggttcgcagccgcatgcaaaaaagagctaaaagaaaacatccaaactactaattacaatactgcactcgacttccacagcaacagtgacgtgactaagcaggtgatccagacacacgtcaacgctggggaagctcctgatcctgttatcactagcaacgtcccctgcttccatagtatcaaacctaacctgaataatctgaacggcaaaaccggagagttcctggcctttcagactgtacacctgccaccactacctgaacagttactcgagttgggaaacaaggctcataacgacatgcacatcgtacaggcaacagagattcataatattaatatcattagtagcaatgccaaagattccagagacgaagaaaataaaaaatcccataatggagctgagacaacctcactgccccctaaaaccgtgttcaaggataaggtgcggaggtgttctctcggtatcttcttacccagactccctaacaaacggaactgttccgtgactggtattgacgatttagagcaaatacccgcagacacgacggatatcaatcacttggagacgcaacctgtatccagtaaggattctggtattgggagcgtggcgggaaagctgaacttgtccccaagccagtacattaacgaagagaacctccctgtgtacccagacgagattaattcctctgactccattaatatcgaaactgagccgaagaaaaacgtgggaacacgtagaaggaggtatagcta

SEQ ID NO: 27459 - DNA, 2061 bp, synthetic construct
  source 1..2061: mol_type = other DNA; note = Synthetic coding sequence
atgattcctggaaagtatcgcagcgtgagcgggagggccgctaacaatgttaattgcggattacacttggtgatccagacctcctccttgcccgagaaaaacaaggtagaattcaaactgaataaagatacaagcagcttccccggacgactcctgcaacacgatctcgagcgcaactattccagcaggcagggggaccacataaacctggtttcgtcatctctctcttcctttccgatactgcagcgatctagcgaggaaaaaatcctttactccgatcggctcagcctggagcgccaaaagctgacagtttgccctatcattaatggcgaagaccatttgaggcttctgaattttcaacacaactttattacccgaatccagaacatttctaacctccagaaactcatttcacttgatctttatgacaaccagattgaagagataagcggcctgtctaccttgcgatgcttacgagttctcctgttaggcaagaaccggattaaaaaaatctccaacctggagaatctgaaatcattggacgtgctcgatcttcacggcaatcaaatcaccaagatcgagaacatcaatcacctgtgtgagctccgagtgctgaatttagccaggaacttcctgtcgcacgtggataatctgaatggcctggatagtctgaccgagctgaacctgagacacaatcagatcacctttgtccgagatgtcgataacttgccctgtttacagcatctgtttctctcattcaacaatatcagtagtttcgacagtgtcagctgccttgcagattcctcaagcttgagtgatatcaccttcgacgggaacccaatcgcccaggaaagttggtacaagcataccgtcctacagaacatgatgcaattgaggcagctagacatgaaacgaattaccgaggaagagcgcagaatggcatcagtactggctaaaaaagaggaggaaaagaaacgtgaaagccacaagcagtctctactcaaggaaaagaagagacttaccataaataatgtggccaggcagtgggacctgcagcaacagcgggtggcaaacatcgccacaaatgaggataggaaagattctgactctccacaggatccctgtcagatcgacggaagcaccctgtccgcattcccagaggaaaccggccctctggatagtgggctgaataacgctttacaggggctctctgttattgacacctatcttgtggaagttgatggcgataccctgtccttatatggatccggagccctcgagtctctggataggaactggagcgtccagacagccggtatgatcacaactgtgtcgtttacattcatagaattcgatgaaattgtgcaggtgttgccaaaactaaagatcaaattccccaactctcttcacctaaagtttaaggaaactaatctggtgatgctccagcagttcaacgctttagcccaactccgtcgcatcgaccaactaactattgatccacagggcaatcccgtggtgaatttcactctctggaaatactacgtgctgtttcggttatctcatttcagcatgcagaagattaacggtaccgaggtcacccagaatgacatgatcatggccgagcgcctcttcggcattttagcccacgttgcctcaagcgagctgcctcagtacagactaatcagcattctgggcgatgcaagaaaaaaacagttccgatacctccttgagtccaaggggaagaaaccagggattattaacgaggagaacaacgattctaaaagactagttggcgaaaacaccaatcgggctaccctcaattacacaacaagggatttttacaacgagaagttggaagaaatcaaagagaagaaaaagttttgcaagacttatatcgaggacctcgtgaaggaggctaccgaaatcaacatgaaaaacgaggctctacagaagctttggcctcagatgttcatcgagctggtccgcgatgctgtgattgagattaggaacaaaaacagctatatgaagctttgcctccagcaaatcaccgaccagaagtag

SEQ ID NO: 27460 - DNA, 255 bp, synthetic construct
  source 1..255: mol_type = other DNA; note = Synthetic coding sequence
atgccgtatctgctgatcagcactcagattaggatggaggtggggcctactatggtcggggacgagcagtcagatcccgaactaatgcaacatctgggggctagtaagcgcagggcgctgggcaacaacttttatgagtactatgtggacgacccaccaagaattgtacttgataagctggaaaggcgcggatttcgcgtgctatcaatgacgggcgtgggacagaccttagtgtggtgtctgcacaaagaatag

SEQ ID NO: 27461 - DNA, 2664 bp, synthetic construct
  source 1..2664: mol_type = other DNA; note = Synthetic coding sequence
atgccaagcttgcctcaggagggggtgattcaggggccttcacccctggatctgaacaccgaactcccttaccagtcgactatgaagagaaaagtaagaaagaagaagaaaaaaggcacaataacggcgaatgtggccggaactaaattcgaaatagttcggcttgtgatagatgaaatggggttcatgaagactcccgacgaggacgaaacgagtaacctaatttggtgtgatagtgcggtccaacaggaaaaaatcagcgagcttcagaattaccagcgcatcaatcactttcctgggatgggtgaaatctgtcgcaaggattttttggcaagaaatatgaccaagatgattaagagccgacctctggattacacatttgtcccccgaacttggattttccccgctgaatacacccaattccagaactatgtgaaagagctgaagaagaagcgtaaacagaagacattcattgtgaaaccggctaacggagcaatgggacacgggattagtctcatacgcaacggcgataagctgccttcgcaggaccaccttatcgtccaggagtacattgagaaaccgttcttgatggaggggtataaattcgatctgagaatctatattttagtgacgtcatgtgatccactaaagatcttcctgtaccacgacggtttggttcgcatggggacagaaaagtatattccaccaaacgagtctaacttgactcagctctacatgcacctgaccaattactcagtgaacaagcataatgaacattttgagagggatgaaacagagaacaaggggagtaaacgctcgattaagtggtttaccgagttcctacaggcaaatcaacacgacgtggctaagttttggagcgacatatcggagctggtggtgaagaccctgatcgtcgccgagccgcacgtactgcatgcataccgaatgtgccgcccagggcaacctcctgggagcgagtctgtatgctttgaggtgttaggattcgatatcctgttggatcgcaagcttaaaccctggttgcttgaaattaatcgggcaccctcatttgggaccgatcaaaagatcgactatgatgtgaagagaggggtactcctcaacgccctgaaactactcaacatccgcactagcgacaaaagacggaacctggcaaaacagaaggctgaggcacagcggaggctttatggacagaatagcattaagaggttgctgccgggatctagcgattgggaacagcaacgccaccagttggaacggcgtaaggaggaactgaaggaaagactggcccaggtgcgcaaacagatctctcgggaagagcatgagaatcgccacatgggcaactacaggaggatctacccaccggaggacaaagcgctgctggagaaatacgaaaatctgcttgcagtggcattccaaaccttcctgtcaggcagagcagctagttttcaacgtgagctgaacaatcctcttaaaagaatgaaagaggaagatatcctggatctgctggaacagtgcgagatagacgacgaaaaactcatgggcaaaaccacaaaaacaagaggtccaaagcccctctgcagcatgccagaatcaacggagatcatgaagcgcccaaaatactgcagcagcgactcctcatatgacagcagtagttcaagttcagagtctgatgagaatgaaaaggaagaataccagaataaaaagcgcgagaagcaggtgacttataacctcaagccctcaaatcattataaactgattcagcaaccgagtagcatcaggcggagcgtctcttgtccacggtcgatctccgcccaatccccgtcttcaggcgacactcgtccttttagtgcccaacagatgatttctgtttctaggcctacgtcagcctcccgttcacactcactgaatcgcgctagttcatacatgagacacctgccccatagcaatgacgcatgtagcactaacagccaagtgtccgagtctctgagacaattaaagacaaaggagcaggaggatgatctcaccagccaaaccctcttcgtgcttaaggacatgaagataagattcccaggcaagtctgacgcagagtcagaactgctaatcgaggacatcattgataactggaaataccataagacaaaggttgcctcatattggttgattaaactagactctgttaagcagcgtaaggtcctggatatcgttaagacaagcatccgaactgtgctgccaaggatctggaaggtgccggatgtggaagaagtaaatctctacagaatcttcaatcgcgtttttaatagactgctgtggtctcgtggacagggtttatggaattgcttctgcgactcagggagcagctgggaatcaatattcaacaagagtcccgaagtggttactccactgcagctacagtgctgtcagaggcttgttgagctgtgtaaacagtgtctacttgttgtgtacaaatatgccactgacaaacgtggaagtttaagcggaattggtcctgactggggtaattccagatacttgcttccagggagcactcaattcttcctgcggaccccgacctataacctaaaatacaattccccgggaatgactagatctaacgtgctgtttacttcccgctacggtcacctgtag

SEQ ID NO: 27462 - DNA, 1140 bp, synthetic construct
  source 1..1140: mol_type = other DNA; note = Synthetic coding sequence
atggccggacctcgcgtagaagttgatggttctatcatggagggtgggggacaaatcctgcgagtgagcaccgctctaagttgtctgttgggtctgccccttagggtacagaagatccgcgctgggaggtcaactcccggtcttagttcggggggatggaaaagcaaaattaaagtgctaacaaggccacagcatttaagtgggttagagatgattagagatctgtgcgatggacagcttgagggcgcagaaatcggatctaccgaaattacatttaccccggagaagatcaaaggcggaatccacactgcagacaccaaaacagccggtagtgtctgcctgctgatgcaagtcagcatgccatgtgtccttttcgccgcttctccaagcgagctgcacctgaagggcggtactaatgcagaaatggcccctcaaatcgattacactgtgatggtgttcaagcctatagtcgagaaatttggcttcatcttcaactgcgatattaagacccgtggctactaccctaagggcggtggggaggtgatagtccgcatgtccccagttaagcaactcaatcccatcaacctgaccgaacggggatgcgtgactaaaatctacgggcgtgcgtttgtcgccggtgttttgcctttcaaagtggccaaggatatggcagcagctgcagtccgctgtatccggaaagagatccgagacctgtacgtgaatatccagccagtgcaagagcctaaggatcaggcgttcggaaatggaaacggcattatcatcatcgccgaaacctccacaggctgtctgttcgcagggtccagcctggggaaaagaggcgtgaatgcggataaagtcgggatagaggctgcggagatgctgctggccaatctgaggcatggtggaaccgtggatgagtatttacaggaccagcttatcgtattcatggctctggcgaacggcgtcagcaggatcaaaacaggtcctgtgactctgcatacccagaccgcaattcactttgcggagcagattgcgaaggcaaaattcattgtcaagaaatcagaggacgaggaggacgcagctaaggatacttatattatagagtgccaggggatcgggatgacaaaccccaacctctag

SEQ ID NO: 27463 - DNA, 1056 bp, synthetic construct
  source 1..1056: mol_type = other DNA; note = Synthetic coding sequence
atgccaagtgagactttatgggagatcgctaaggctgaggtggaaaaacgcggaatcaacgggtcagaaggcgatggcgctgagatcgctgaaaagttcgtattttttatcggcagcaaaaacggcggtaagactacaattattctcaggtgtctggaccgggatgaacccccaaagcctacactggctctggaatacacctatggcagacgcgctaaaggacataacacacctaaggatattgcccacttctgggagcttggcggaggcacaagcctgttagacctcatctctatccccatcactggagataccctgcggaccttctcactggtgctcgtactggatctgagcaagccgaacgatttgtggcctactatggagaatttgctgcaggccactaagtcacacgtggacaaagtcataatgaagttaggtaagacgaatgcgaaggctgttagcgaaatgagacagaagatctggaacaacatgcccaaagatcaccctgaccacgaattgatcgaccccttccccgtcccactggtaatcattggatccaagtacgatgtgttccaggacttcgagagcgaaaagaggaaagtcatttgtaagacactgcgatttgttgcacattattatggagctagcctgatgttcacttcgaagtccgaagctctgctcctgaagattcgaggtgtgatcaaccagcttgcattcggtatcgataagtctaagtccatatgtgttgaccaaaacaaaccactgttcattaccgcaggtctggactccttcggacagatagggtccccacctgttcctgagaacgatatcggaaaactgcacgcccacagccccatggagctgtggaagaaagtgtacgaaaagctgttcccacccaaatccattaacactcttaaggatataaaagatccagctagagacccccagtacgccgagaatgaggttgacgagatgcgaattcaaaaggatctagaacttgagcagtacaagaggagctcatcaaaatcctggaagcagatcgagcttgattcatag

SEQ ID NO: 27464 - DNA, 798 bp, synthetic construct
  source 1..798: mol_type = other DNA; note = Synthetic coding sequence
atgtgtacatccgagacctttcaggccctcgacacgtttgaggctcgtcatgacgatatcgtgctggcttcttacccaaagtgcggatcgaactggattctgcacattgtcagtgaactgatctatgctgtgagcaaaaaaaagtataagtaccccgagttcccggtcctagagtgtggtgattccgagaagtaccagagaatgaagggatttccatcaccgagaattctggccacccatctgcattacgataaactccccggttccatttttgagaataaggccaaaatcttggtgatttttagaaaccctaaagacacagcagtgagcttccttcatttccataacgatgtccctgatatcccgtcctacggcagctgggatgagttcttcagacagttcatgaaggggcaagtgagctggggcaggtacttcgacttcgcaatcaactggaacaaacacctagacggtgacaacgtgaaattcatcctgtatgaagaccttaaagagaaccttgcagcaggaattaagcagatagccgaatttctggggttctttctgacaggcgaacagatccagactattagcgtccagagcacattccaagctatgcgagctaaatcacaggatactcatggcgcagtgggacccttcttgttccgcaagggcgaagtgggggattggaaaaacctttttagtgagatccagaaccaggagatggatgaaaagttcaaagagtgcctagcaggcacttcacttggcgcaaaattaaagtacgagtcctactgtcagggctag

SEQ ID NO: 27465 - DNA, 5343 bp, synthetic construct
  source 1..5343: mol_type = other DNA; note = Synthetic coding sequence
atggaatctaattttaaccaggagggagtgcccaggccttcgtatgtctttagcgccgacccaatagcccgaccttctgagatcaattttgacggcattaagctcgatctgagccacgagttttccttggtggcaccgaatacagaggcgaactctttcgagtccaaagactatctccaagtctgcctgaggataagaccattcactcagtctgagaaggagcttgaaagcgagggatgtgtgcatattctggactctcagacggtcgtgctgaaggaacctcaatgcatactaggacgcctgagtgagaagagcagcgggcagatggcccagaagttctcctttagcaaagtgttcggccctgccacaacccagaaagaattttttcaaggctgtatcatgcagccagtgaaggatctcctgaagggtcagtcaagattaattttcacatacggtcttaccaacagtggcaagacctataccttccagggtactgaggaaaacatcggcatcctgcccagaaccctgaatgtattgttcgatagtctgcaagaacgtctttacaccaagatgaaccttaaaccacacagaagtagggaatacctcagactctcttcagaacaagagaaggaggaaattgcaagcaagtccgcactcctccggcagatcaaggaggtcaccgttcacaacgactcggatgacacactgtacggctcgctgactaactctctgaacattagtgaattcgaagaatctatcaaggactacgaacaagcaaacctgaacatggcaaactcaatcaagttttccgtgtgggtgtccttcttcgagatatataatgaatacatctatgatctatttgtgcccgtttcatcgaagttccaaaaacgcaaaatgctgaggttgagccaggatgttaaagggtactcctttataaaggacctgcagtggattcaggtgtcagacagtaaagaggcgtatcgcttgctgaaactcgggatcaaacaccagtcagtggcattcacaaaactgaacaacgcatcttctaggagccacagtatttttacagttaaaatcctacagatagaggacagcgagatgagcagagttatccgagttagtgaactcagcctgtgtgatctggcgggaagcgaacgaaccatgaaaacccaaaatgaaggagagcgtctgcgcgagacgggtaacattaacacttccctcctgacactgggaaagtgcattaacgtgcttaagaacagtgagaaatctaagttccagcagcatgtacccttcagggaatccaagctcacccattacttccagagcttctttaatgggaaaggtaaaatctgtatgattgtgaacatttctcagtgctatctcgcatacgatgagactttgaacgttttaaaattctccgcgatcgctcagaaggtctgcgtgccggataccttgaacagttctcaggaaaaactgttcggcccagtcaagtcatctcaggacgtcagcctggattcaaatagtaacagtaagatccttaacgtaaagcgtgccaccatttcatgggagaatagcctggaggatctgatggaagacgaagacctggtcgaggagctggaaaacgccgaggaaacccagaacgttgagactaaactgctagacgaagacctggacaaaacactggaggaaaataaggcctttatttcccacgaggagaaacgaaagttgctggacttgatcgaggaccttaaaaagaaactaattaatgaaaagaaggaaaaactgacgctggagtttaagatccgtgaggaggttacccaggagtttacacagtattgggcacagagagaggctgacttcaaggagactcttttacaagagagagagatcctcgaagagaatgccgagcggagactggctatcttcaaagatttggttggtaagtgcgatactcgagaagaggctgctaaggacatttgcgccaccaaagtggaaaccgaagaagctaccgcctgcttggaactgaagttcaatcagatcaaagccgagttagcaaaaaccaagggagaactgatcaaaaccaaagaggaactgaaaaaacgagagaacgagtccgacagtctgattcaggaattagagacctccaataagaagatcatcacccagaatcagagaattaaggaacttattaatatcatagatcagaaggaggacacaatcaatgaattccaaaacctgaagtcacacatggaaaatactttcaagtgcaacgacaaagccgacacaagctccctgataatcaataataaactcatctgcaatgaaacggtggaagtgccaaaggattccaaaagtaaaatctgtagcgagagaaagagggttaatgaaaacgaattgcaacaggatgagccacccgcaaaaaagggaagtattcatgttagttcggccatcacagaggatcagaaaaaatccgaggaggtccggcctaatatcgccgaaatcgaagatatccgggtcttacaggagaacaacgagggtttgagagccttcttgttaacaatagaaaatgagcttaaaaacgaaaaggaagagaaggccgagcttaacaagcagattgttcactttcagcaggagctctccctctcagaaaaaaaaaatctgacccttagtaaggaggtgcaacagatccaatctaactatgacattgctatagcggagctgcacgttcagaagtcaaagaaccaggagcaggaggaaaaaatcatgaagctctccaacgaaattgagactgcaacacgctcaataaccaataatgtctcccagattaagctgatgcataccaagatagacgagctcaggacactggatagcgtgagtcaaattagtaatatcgacctgttgaatctccgcgatttatctaacggttctgaagaggacaacctgcctaatacccaacttgatttgctcggcaacgactatctagtgtcaaagcaagtaaaggagtaccgcatccaggagcctaatcgtgaaaatagctttcactcctctatcgaggctatctgggaggaatgcaaagagatagtgaaagcatcatccaagaagagtcaccagattgaggaactagaacagcagattgagaagctgcaggccgaggttaagggctacaaggacgagaataaccggctgaaggaaaaagagcacaagaaccaagatgacctgctcaaggaaaaagagacattaatccaacaactcaaggaggaattgcaggaaaaaaatgttactctcgacgtccagattcagcacgttgtggaagggaagcgagccttgagtgagctaactcagggagtcacctgctacaaggcgaagatcaaagagctggaaacgattctggagacgcaaaaagtcgagtgttcacatagtgctaaattggagcaagacattctggagaaggaaagcattatcctaaagctcgagcgtaacctaaaggaatttcaagagcatctgcaggactctgttaagaacacgaaggaccttaatgtaaaagagctcaagctgaaggaggagatcacacagctcacaaataatctgcaagacatgaagcacctcttacaattaaaagaagaggaagaagaaacaaacagacaagaaaccgagaaattgaaagaggaactgtcggcctcatctgctagaacgcaaaatctgaaagccgatctgcagcggaaagaagaggactacgctgacctcaaggagaaactcacggacgccaagaaacaaatcaagcaggtgcagaaagaggtgagcgtcatgcgggacgaggacaagttgctcagaatcaaaatcaatgagttggaaaaaaaaaaaaatcaatgttcacaggaacttgacatgaaacaacggacaattcagcaactgaaggaacaattgaataaccaaaaggtggaagaggcaatccagcagtacgagagggcctgtaaagatctcaatgtgaaagaaaaaatcatcgaagatatgcgcatgactctggaagagcaagaacagacccaagtcgagcaagatcaagtacttgaggcaaaacttgaggaggtggagcggctggccaccgagcttgagaaatggaaggagaaatgcaacgacctggagaccaaaaataaccagcgttctaataaggagcacgaaaacaataccgatgtgctaggcaagttgacgaacttgcaagacgaactgcaggaatctgaacaaaagtataatgccgatcggaaaaagtggttggaagagaaaatgatgctcattacgcaggcgaaagaagcggaaaacatccgcaacaaagaaatgaaaaaatatgccgaggacagggagcgtttctttaagcagcagaacgagatggagattctcactgcacagctgactgagaaggacagcgatctgcagaagtggagagaagagcgagaccaattagtcgcagctttggagattcagctgaaggcactaatatcttccaacgtgcagaaagataacgaaattgagcagttaaagcggataatctccgagactagcaaaattgaaacacagatcatggacatcaagcctaagcgaatcagctcagccgacccagacaaattgcagacagagccgctgagtacatcatttgaaatttcccgcaacaaaatcgaggatggttccgtggtgttagactcctgtgaggtcagcaccgaaaacgaccaatctactcggttcccaaagcccgaactggagatccagtttacgccgctccagccaaacaaaatggccgtgaaacacccaggatgcaccaccccggtgactgtgaaaataccaaaggccagaaagcggaaatccaacgaaatggaggaagatctggtcaaatgtgaaaataaaaaaaacgccactccacgtacaaacctgaagttccccatcagtgatgacagaaacagttccgtgaaaaaggaacagaaggtggccattcgcccttcctctaagaaaacctatagtctcagaagccaagcaagcatcattggcgtaaacctggctaccaaaaagaaggagggcaccctccagaagttcggcgactttctgcagcattcaccctcaattctgcagtctaaagcgaaaaagatcatcgagacgatgtcctcctccaagctaagcaatgtagaagcatctaaagaaaacgtctcacagcccaagagggcgaaacgaaagttatatacgtccgaaatttcatccccaatcgacatcagtggccaagtgatcctgatggatcagaaaatgaaggagtcggatcatcaaatcataaaacgcaggttaagaactaagaccgctaaatat

SEQ ID NO: 27466 - DNA, 1371 bp, synthetic construct
  source 1..1371: mol_type = other DNA; note = Synthetic coding sequence
atgaattctagcgatgaagaaaagcagctccagctgattacaagcctcaaggagcaggcaattggtgagtacgaagacctaagggctgagaatcagaaaacaaaagaaaagtgcgacaagataagacaagaacgcgacgaggccgtcaaaaagctcgaggagttccagaagatatcacacatggtgattgaagaagtgaattttatgcagaaccacctggaaattgaaaagacttgcagggagtcagctgaagcccttgcaactaagcttaacaaagagaacaagacccttaagcgaatctctatgttgtacatggccaaactggggcctgacgtgattacagaagaaattaacatcgacgatgaggactcaacaaccgatacggacggcgctgcggagacttgcgtatcagtccaatgccagaagcagatcaaagagcttcgggaccagattgtcagcgtgcaagaagagaaaaaaattttagccatcgagttggagaacttgaaatctaagctagtagaggtgatcgaggaggtaaataaggtgaaacaggagaaaaccgtgctgaattccgaagtgctcgaacagcgcaaagtgttggaaaaatgtaatagggtcagtatgttagctgttgaagaatatgaagaaatgcaggtcaaccttgaactggaaaaggaccttaggaaaaaggctgaaagctttgcccaagaaatgttcatcgagcagaataaactaaaacggcagagtcatctcctgttacagagcagcattcctgaccagcaactattgaaagcccttgacgaaaacgctaagcttactcagcaactggaagaggaacgcatccagcatcagcagaaggtaaaagaactggaagaacagctggagaatgagaccttgcacaaggagattcacaatcttaaacagcagctggagcttctggaggaggacaagaaggaactggagctgaagtaccaaaactcagaggagaaggccagaaatctcaaacactccgtcgatgaactccagaagagggttaatcaatcagaaaattccgtgcccccaccgccaccccctcccccacctctgccacctccacctcctaacccgattcggagccttatgtcgatgatccgtaagagaagtcatccctcaggatccggtgcgaagaaggagaaggccactcaaccggagacaaccgaagaagtcactgatcttaaaaggcaagctgtggaggagatgatggatcgcatcaaaaagggtgtgcacctgagacccgttaaccagacagcacgaccgaagactaaacccgaatccagtaaaggttgcgagagcgccgtcgacgaactgaagggcattttagcctcccaatag

SEQ ID NO: 27467 - DNA, 630 bp, synthetic construct
  source 1..630: mol_type = other DNA; note = Synthetic coding sequence
atgaaaaaagtacgcctcaaagaactggagtcccgcctgcagcaagtcgatggctttgaaaagcctaaactgttactcgaacagtaccccacacggccacatatcgcagcttgcatgctgtacaccatacataacacatatgatgacatagaaaacaaagtggttgctgatctggggtgtggctgcggcgtgctgagcattggaacggcaatgctgggggctggcttgtgcgtcggattcgatatcgacgaggacgccctggagatctttaaccgaaacgcagaggaattcgagctgacaaatatcgatatggtgcagtgtgatgtttgtcttctgagcaacaggatgtctaaaagcttcgatacggttatcatgaaccccccatttggcacgaaaaacaataagggcactgacatggctttcttaaaaaccgccctagaaatggcccgaacagctgtgtattctctccacaagtcatccacgagggagcacgtgcagaaaaaggctgctgagtggaagatcaaaatcgacattatcgcagaactgagatatgacttgcctgcctcctacaaatttcataagaaaaagagtgtggacatcgaagtggatctgattcggttctccttttag

SEQ ID NO: 27468 - DNA, 4719 bp, synthetic construct
  source 1..4719: mol_type = other DNA; note = Synthetic coding sequence
atggcctcatccgctcgtgagcacttactattcgttcgcaggaggaatccacagatgagatatactctctctccggaaaacttacaatctctggccgctcaaagctccatgcccgaaaacatgacattacaacgcgcaaattcggacactgacctggtcacttcggagagtagatctagcctgactgccagtatgtatgagtacaccttgggacaagcacagaaccttattattttctgggacatcaaagaagaggtagatcccagtgactggatcggtctgtatcacattgatgagaattctccggctaatttttgggacagcaagaatagaggggtcaccggtactcagaaagggcagatcgtgtggcggatcgagccaggcccttacttcatggagccggaaatcaaaatctgctttaaatactatcacggaatctccggagccctcagggctactaccccctgcattaccgtaaaaaatccagctgtgatgatgggcgcagaggggatggagggtggagcctccggaaacctccacagtcgtaaactggtgtctttcactctaagcgatctgagggccgtaggcctaaaaaagggtatgtttttcaaccctgacccctatttaaaaatgagcatccagcccggtaagaaaagcagctttcccacttgcgcccaccacggccaggaaaggagaagtactataatttccaacaccaccaaccctatatggcaccgggaaaagtactcttttttcgcattactcaccgacgtcctcgaaatagagattaaggataagtttgccaaaagcagacctattattaaacgcttcctgggaaaactgactattccagtgcagaggcttttggaacgtcaggccatcggtgatcaaatgttgtcatataatcttggtcggcgattacccgcagatcatgtttctgggtaccttcagtttaaggtcgaagtcacctcgtctgtccacgaggacgcatcacccgaagccgtgggaactattctcggtgtgaatagtgtgaatggagatttgggctcccccagtgacgatgaagacatgcccggtagccatcatgactctcaggtgtgcagtaatggacccgtgagtgaggacagtgccgcagacggtacaccgaagcactccttccgcacaagtagcaccctggagattgacaccgaagagctgacctcgaccagcagcaggacatcgcctcctcggggacgacaggattctttgaatgactatctggatgctattgagcacaacggtcactctagaccaggtaccgccacctgttctgaacgctctatgggcgcatcccctaaacttcgctcaagctttccgactgacaccaggctcaatgcaatgcttcacatagatagcgacgaggaggaccatgagttccaacaggatctcggctatcctagctctcttgaggaagagggaggactgatcatgttttcacgggcatcaagggctgacgacggttctctcacgtcgcagaccaaattggaggacaatccggtggagaatgaagaagctagcacacacgaagccgctagcttcgaggataaacctgagaacctgccagagttggccgagtcatctctgcctgctggaccggctcccgaggagggagaaggtgggcctgagccgcaaccctcagctgatcagggtagtgccgagctgtgtggcagccaagaggtggaccaacctaccagcggtgctgatactgggaccagcgatgcatcagggggttctcgcagagcagtttcagagacggagtcgctggaccagggttctgaaccctctcaggtgtcatctgagactgaaccttccgatccagcaagaacggagtctgtgtcagaagcgtccacccgacccgaaggtgagtcagatctcgagtgtgcagactccagctgtaacgaaagtgttacaacccaactcagttctgtggacacaaggtgtagtagcttggagagtgctcgattccccgagacacccgcattttcttctcaagaggaggaagatggcgcttgtgcagccgaaccgacctcttctggccctgcagaaggatctcaggaatctgtgtgtacagcaggttccttgcctgttgtgcaagtcccatctggggaggatgaaggccctggcgcagagtctgcaacagtgccagatcaggaagaactgggcgaagtctggcagcgccgaggcagcctcgagggtgctgctgccgcagctgaaagcccaccgcaggaggaggggagcgccggtgaggcccagggaacatgcgagggggctaccgcacaggaggagggcgcaaccggagggagtcaggctaatgggcaccaacccctgcgcagcctccccagtgtgaggcaagacgtgagccgctaccagcgagtggacgaagcactgccccctaattgggaagcacgcattgactctcatggaagaatcttctatgtcgatcatgttaacagaaccactacttggcaacggccaactgctccaccagccccacaggtcttgcaaaggtctaactctatccagcaaatggaacagcttaatcggaggtatcagagcatccggaggactatgactaacgaacgccctgaggaaaataccaacgccattgacggcgctggcgaggaagcagactttcatcaggcctctgcagacttccgccgtgagaacatactgcctcacagcaccagtaggtcaagaatcacactgctgctgcagtcccccccagtgaagttcttgatcagtcctgaattttttaccgttctgcactccaatccctcagcttatcgcatgttcacgaataacacttgcctcaagcatatgataactaaagtgcgtcgcgatactcaccatttcgaaaggtaccagcacaatcgagacctagtgggtttcctcaatatgtttgctaataagcaactcgaactccccaggggctgggaaatgaaacatgaccaccaagggaaagccttcttcgtggaccataacagtaggacaacaaccttcatcgatccacgactgccattgcagtcgtctcgacctacgtcggccctggtgcatagacagcatctgacaaggcagagatcccactcagctggagaggtgggagaggattcccgtcatgcgggaccgccagttctgccacgcccaagcagcacgtttaacacagtctcaaggcctcagtatcaggacatggttccagtagcctacaacgacaaaatagtcgctttcctacgacagcccaatatcttcgaaattctacaagagcgacagcccgatctcacccgcaatcactcactgcgggaaaagatccagttcatccggaccgaaggaacacccggtctcgtgcggctctcatctgacgccgatctggtcatgctgctgtcactttttgaggaagagattatgagttacgtgcctccccatgcacttctgcatccctcctattgtcaatcccccagaggctcccctgtctcaagtccccagaattctccaggtacccagagagccaacgccagagcacctgccccttacaaacgcgatttcgaagcgaagctgcggaatttttataggaagctggagaccaagggctacggtcagggtcccggaaagctgaagcttattataagacgagaccatttgctcgaagatgcctttaatcagataatgggttactctcgtaaggacctacagaggaataagctctacgtcacttttgtaggcgaagagggcctcgattacagcggacctagtcgcgaattctttttccttgtgagccgcgagctgtttaacccctattatggtcttttcgagtattccgctaatgacacttacactgtgcaaatctcaccaatgtcagcctttgttgacaaccaccatgaatggttccgcttctccggacgtatcctaggtctcgcactgatccatcagtacttgctagatgccttcttcacgcggcctttttacaaggcactcttaaggattctgtgcgatctgtccgatttggagtaccttgatgaagagttccatcagtcactccaatggatgaaagacaatgacatccacgacatactagacctcactttcaccgtgaacgaggaggtttttggccagatcactgaacgagaactgaaacctgggggtgcaaatatccccgtcactgagaaaaacaaaaaggagtacattgaaaggatggtgaagtggaggatcgagagaggggtggtgcagcagaccgagagtctggtaaggggtttttatgaggttgtggatgcgagactggtgtctgtcttcgacgccagggaactagaactggtaattgcaggaacagctgaaatagacctcagcgactggcggaacaataccgaataccgtggaggctaccacgataaccacattgtcattcgatggttctgggccgcagtagaaaggttcaacaatgagcagcgactgagattgctgcaatttgttacgggtacctcatccatcccctatgagggcttcgcctccttgaggggcagtaatggtccaagaaggttctgtgtcgagaagtggggcaagatcaccgcccttcctcgcgctcatacctgctttaaccgattagatctcccaccctatcctagttttagcatgctctatgaaaagctactgactgctgtggaggaaacctccacattcggactcgagtag

SEQ ID NO: 27469 - DNA, 1206 bp, synthetic construct
  source 1..1206: mol_type = other DNA; note = Synthetic coding sequence
atgtcatgcaggtgttggatcagcagacatccatcgtatgaagggtggaacttgcagtcaatcatttttcacaagcagattagaggcgtggatcttgagagcacatttgtcaccaagttcgggaacaactgttcactacgcctgaatgaaacagtggacatacacaaggagaaagtggccagaagagaaattggaatcctcaccacaaacaaaaataccagtagaacacataaaattatcgcacctgccaatctggagcgaccagtacgttacatcaggaaacctattgactacactatactagacgacatcggacacggggtaaaggtatcgacccagaacatgaaaatgggcggtctgcccaggactacacccccaacccagaaacctccttcgccccctatgagcggtaaaggcactctcggcagacactccccgtatcgcacacttgagcctgtcagaccccctgtggttccaaacgattatgtgccgagccccaccaggaatatggcacctagccagcagtccccagtgaggaccgcaagcgtgaaccaaaggaaccgtacatacagctcttctggatccagcggtggctcccacccttctagtcggtctagtagcagagagaatagtggttccggctctgtaggcgtccctatcgcggtcccgacgcctagtcccccttccgtcttccctggacacccagttcaattttatagcatgaacagaccagcttcacggcacaccccccctacaatcggaggttctctgccttacaggcgcccacctagcatcacgtcccaaacctccctgcaaaaccaaatgaatgggggaccattttattcacaaaaccctgtgtcagacacgcccccacctcctccacccgtggaagaacccgtcttcgacgaatcaccaccgcctccgccacctccagaggactacgaggaagaggaagctgccgtggttgaatactccgatccctatgctgaagaggatccgccatgggccccaagaagctacctggagaaggtggtggccatctatgattatacaaaagataaggaagacgaactctctttccaggagggggctatcatctacgtcatcaagaagaacgacgacggatggtacgaaggtgtgatgaacggggtcactgggctctttccaggaaactatgtcgaaagtatcatgcactactccgagtag

SEQ ID NO: 27470 - DNA, 1428 bp, synthetic construct
  source 1..1428: mol_type = other DNA; note = Synthetic coding sequence
atggccgaactgcaaatgctgttggaggaagagatccccggaggtcggagagccctattcgattcctacactaatctcgaacgggtggccgactactgtgagaacaactacatccagtctgctgacaaacagcgagccctcgaagagaccaaagcatacactacccagagtctcgcttcagttgcctacctgatcaatactctcgccaataatgtcttgcaaatgttagatatccaggcctcacagttacggagaatggagtcaagcataaatcatatctctcagaccgtggacatccataaagagaaagtggctaggagggagattgggatcctgacaactaacaagaacacttctaggacccacaagattatcgccccagccaatcttgaacggcctgtgcggtatataaggaaacctatcgattatacaatcctggatgatattggccacggtgttaaggtatccacgcaaaatatgaaaatgggtggcctcccaagaacaacgccccctactcagaaaccgcctagccctccaatgagcgggaagggcactctcggacggcattcaccttatcgcaccctggaacccgtgcgtccaccagtcgtgcctaacgactatgtgccttcgcccacccggaacatggcaccttcgcagcaatcgccagtccgcaccgcctctgtgaaccaaaggaatcggacttattcaagcagtggatcaagtggcggatctcaccccagttctcgtagctcgagccgagagaattctggctcggggagtgtgggagtaccaatcgcagtgcccacgccgtctcctccgtcagtgtttcctggacatcctgtgcaattttacagtatgaaccggccagcttctcgacacacaccgcctactatcgggggatccctgccatataggaggccaccctccatcacttcccaaacctccttgcaaaaccagatgaatggcggacccttctattcccaaaaccctgtgtcccttgcaccaccaccaccatccatactacaggtgactccccagctgccgctaatggggttcgttgcacgtgtacaggaaaatatttcggatactcctccgccaccacctccggtggaggagcctgtcttcgacgagtctccccctccccctcctcccccagaagattatgaagaagaagaagcagccgtggtggagtattctgatccttacgctgaggaggaccccccttgggccccacgcagttacctcgagaaggtagtcgccatttatgactacaccaaggataaggaggatgagctgagcttccaggaaggagccattatatatgtgattaagaagaacgatgacggatggtacgagggtgtcatgaacggggtgacggggttattcccaggcaactacgtggagagtatcatgcactactccgagtag

SEQ ID NO: 27471 - DNA, 900 bp, synthetic construct
  source 1..900: mol_type = other DNA; note = Synthetic coding sequence
atgaaaatgggaggtctgccacgaactaccccaccaacccagaagcccccttcgcctcccatgtccggaaagggtacacttggatcaagcggctccagcggaggatctcacccttctagtcgatcctcctctcgagaaaacagcggtagtggctctgtgggtgtgcccatcgccgtccctacaccatccccaccttctgtcttccccgcacctgcgggaagtgccggtacacctccactgccagcaacatccgcctccgcccctgctccactcgtgcccgcaactgttccatcatccaccgccccagacgcagcagccggaggagctcaaacgttagccgatggcttcacctctccaaccccaccagttgtcagctcaactcctcctaccggacatcctgtgcaattttattcgatgaataggcccgcttccaggcatacgccgcctacaatcggtggcagcttgccatatagacgtccaccctctatcacgtctcagacatcactgcagaatcaaatgaatgggggtcccttctatagccaaaatcctgtgtcagatactcctcccccaccccctccagttgaggagccagtgttcgatgagtctccaccaccaccacccccaccggaagactatgaggaggaggaagctgctgtggtggagtactccgatccttacgctgaggaggacccaccctgggcgccacgctcataccttgagaaggtcgtcgccatctacgactacacgaaggacaaggaggacgagctgtcattccaggaaggcgcaataatctatgtaattaaaaaaaacgatgacggctggtacgaaggagtaatgaacggggtgaccggcttgttccccggtaactatgtggaatccatcatgcactatagcgaatag

SEQ ID NO: 27472 - DNA, 1926 bp, synthetic construct
  source 1..1926: mol_type = other DNA; note = Synthetic coding sequence
atggggagaaggtccacatccagtaccaagtctggcaagttcatgaatcccaccgatcaagctcggaaagaggccaggaaacgagagctgaaaaaaaacaagaagcaaaggatgatggtgcgggcagcagtgcttaagatgaaagatcctaagcagattatcagagacatggaaaaacttgacgagatggaattcaatcctgttcaacagccacaattaaatgaaaaggtcttaaaagataaacggaaaaagcttcgggaaacctttgaacgcattctgaggctgtatgaaaaggagaacccagacatctataaagaactgaggaagttagaagtagagtatgagcagaaaagggcccagctctcccagtactttgacgctgtaaaaaatgcacagcacgtcgaagttgagagcattcccctacccgacatgcctcacgctcccagcaacattctgatacaagatatacccctgccaggagcacagcccccttcgatactaaagaagacgtctgcctatggcccacctactcgtgcagttagcatcctccctttgcttggacatggtgttccccgactgcctcccggaaggaagcccccaggcccacctccgggacccccaccccctcaggtcgtgcagatgtacgggaggaaagtaggattcgcactagacttgccccctcgacggcgagacgaagatatgctgtactcccccgagctcgcacagcgcggacatgatgacgacgtatcaagcacaagcgaggacgatggatatccggaggacatggatcaagacaagcacgacgattccactgacgattccgacacggataagtccgacggggaaagtgacggagacgagttcgtgcatcgcgacaacggcgaacgagacaacaatgaggagaaaaaaagtggactgtcagttcggtttgctgatatgcccggaaaatctaggaagaaaaagaagaacatgaaagagttgacacctctgcaggccatgatgctgaggatggcaggccaagagataccagaagagggcagggaggtcgaggaattctccgaggacgacgatgaggatgactctgacgactctgaagctgaaaagcagagtcagaaacaacataaagaggaaagccactctgacggcaccagcaccgcctcatctcagcagcaggcccctccgcagagcgttccaccaagccagattcaggcgcctcctatgccaggcccacccccattggggcctcccccagctcctcctctgaggccccctggccctcccaccggcctgccacctggtcccccacctggcgcacccccatttctacgcccacctggaatgccaggcctccgcggacccttgccaaggctactccccccagggcctcctccagggagaccgccaggaccccctcctggtcccccacccggactcccccctggaccacctccaagaggcccaccaccaagactgcctccaccggctccaccaggcattcccccacccaggcctggaatgatgcgtccgccattagtcccacctttaggtcctgcgcctccaggacttttccccccagccccactgcctaacccaggagtgctgtccgcaccacccaacctgatccagaggcctaaggccgacgatacttccgctgccaccatcgagaagaaggccactgccacgatcagtgcaaaaccacagattacaaatcctaaggctgaaataactagatttgtgcccacagccctgcgagtgcgtcgagaaaacaagggagccacggctgccccacagagaaagtcggaagacgattccgccgtcccactagccaaggccgcacccaaatccggccctagtgttcctgtgtcagtgcagaccaaggacgacgtctatgaggcgttcatgaaagaaatggagggcctcctttag

SEQ ID NO: 27473 - DNA, 4419 bp, synthetic construct
  source 1..4419: mol_type = other DNA; note = Synthetic coding sequence
atgaaaggaagcgaggtgagcttggagaaaaaaaaaaagatcaaaatgcccgtcaagcgcctccgagaagtagtgtcacagaatcatggcgatcatctcgtgctgctgaaagacgaattaccctgcgttcctcccgcacttagcgccaataaaaggttgcctgttgggaccggaactagccttaatggtacctccaggggttcttctgacctcacatctgccagaaattgctatcagcccttactcgagaatccaatggtcagtgagtcagattttagtaaggacgtggccgttcaggttctgccgctggataaaattgaagagaacaacaagcagaaggctaacgatatttttatatcacagtatacgatgggccagaaggatgcattgcgaacggttttaaagcagaaagctcaatccatgccagtgttcaaagaagtcaaggtgcatcttttagaagatgctggcattgaaaaggacgcggtgacgcaagagacgcgcatttctccctccggcatcgacagcgccaccacagtggcggctgccactgctgcggctatcgctactgccgctccacttataaaggtacagtctgatttagaagctaaagtgaactcagtgaccgagctcctcagtaaactccaggaaacggacaagcacctacaaagagtcacggaacaacagacatctatccaacgtaaacaagagaagcttcactgccacgaccatgaaaagcagatgaacgtctttatggaacagcatatacggcatttggagaagctccaacagcagcagatagacatccagacgcatttcatcagcgccgcactgaagacttcgtcgttccagccggtgagtatgccgagctctcgtgccgtggaaaaatactcagttaagccagaacacccaaacttaggatcatgtaacccgtcactgtacaatacgttcgctagtaagcaggcgccattaaaggaggtggaagatacatcctttgataaacagaaaagcccgctggaaacacctgctccacgaaggtttgcgccagtccctgtctcacgggacgacgaattaagcaaacgcgagaacctactggaagaaaaggagaacatggaggtctcgtgccatagaggcaatgtaagactgctggaacagattttgaataacaatgactccttgactcggaagagcgaatcgtcgaatactacgagcctcacaaggtccaagatcggttggactcctgagaagacgaatcgtttcccaagctgtgaggaattagaaaccacaaaagtgacgatgcagaagagcgatgacgtgctgcacgatctcggacagaaagagaaagagacaaactcaatggtgcagcccaaggaatcactgtcgatgctcaagctgcccgatcttccacaaaacagtgttaagctccagaccactaatacgacaagaagcgtactgaaagacgcagagaaaattttgaggggtgttcagaacaacaaaaaagtgctggaggaaaacctggaggccatcatacgcgctaaggacggggcagctatgtatagtctgatcaacgctctgtctacgaacagagaaatgtctgagaaaatccggatccgaaaaaccgtggatgagtggataaagacaatcagcgcggagattcaggggctgctaaaggcgactacagtcatccaggacgaagattacatgctgcaggtctatggaaagcctgtgtaccagggtcaccgatcaactctgaagaagggaccatacctgcgatttaattccccaagtccaaaaagcaggccccagcgcccaaaggtgattgaacgagttaagggaacaaaggtgaagagtattcggacgcagactgacttctacgcaaccaagcctaaaaaaatggacagtaaaatgaaacactcggtgccagttctgccacacggagatcaacaatatttattctctccttcccgcgagatgcccacatttagtggtaccctcgaagggcacctgattccaatggccatcctccttggccagacccagtccaacagcgacaccatgccaccagctggcgttattgtttccaaaccgcacccggtcactgttaccacctcaatcccaccgtcctccagaaaggtagagaccggcgtgaaaaagcccaacatcgccattgtcgagatgaagtcggaaaagaaggacccgccacagctgactgtgcaggtcttgcctagcgtagatatcgatagtatctcaaattcatccgctgatgtacttagccctctgtccagtccaaaagaagcttcgcttcccccagtgcaaacatggattaaaacccctgagattatgaaggttgatgaggaagaggtcaaatttcccggtacaaatttcgacgagatcatcgatgtgatacaagaagaggaaaagtgcgacgaaatccccgactccgagccaattttggagttcaaccggtctgtgaaggcggattcaactaagtataacggaccccctttccccccagtggcctccaccttccaaccaactgctgatattctcgacaaggtgatcgagagaaaggaaaccctggagaactctctgatccaatgggtcgaacaggagatcatgagtcggataatttccggactgttccccgtgcagcaacagattgcccctagtattagcgtgtccgtatccgagacatcggaaccacttactagcgatatagtcgaaggaacctcaagtggcgcactgcaattattcgtggatgctggggtcccagtgaactctaacgtcattaaacatttcgtgaatgaggcactcgcagaaacgatcgcagtgatgctcggggatcgtgaggctaagaagcagggcccagtggctacgggggttagcggcgacgccagcaccaacgaaacctacctaccagcaagagtctgcacccccttgcccacgccccagcctactccgccatgttctccttcctcacctgcaaaagagtgtgtgcttgtgaagactcccgacagctccccctgcgattcagaccacgacatggcgtttcctgtgaaggagatatgcgcggaaaaaggggacgatatgccggcaatcatgctagtgaacaccccaaccgtgacccccaccacaacgccccctcccgcagctgccgtgtttacacccacgctgtcagacatatcaatcgataaactgaaggtctcctcccccgagctgccaaaaccatggggcgacggtgaccttcctctggaagaggagaaccctaatagcccccaggaggaactgcacccaagggcaatagtgatgtcagtggcgaaggatgaggagccagaatccatggatttccctgcacagccaccacctcctgagccagtccccttcatgcccttccccgctggcactaaagctccgagcccctcacaaatgcccggttcagatagctctaccctcgagtcaactctgagtgtaacagtgaccgagaccgagaccctggacaaaccaatctcggagggagaaatcctgttctcctgcgggcaaaagctggctcccaaaatattggaagatatcggtctttacctgactaacctgaatgactctttgtcctccactctgcacgacgcagtcgagatggaagatgaccccccatcagaagggcaggtgataagaatgtcgcacaaaaagtttcacgccgacgcaatcctctctttcgccaaacagaatcaggagtcagctgtttcacagcaagcagtataccattcagaggacctggaaaattccgtgggagaactgtccgaaggacaaaggccgcagttgaccgcagctgccgagaacattctaatggggcacagcctatatatgcagccccctgtcactaatacacaaagccttgaccagcagtgtgacccaaagccactaagcagacaattcgatactgtctcaggttctatatatgaggattcctgtgcgtcccatggacctatgtccctaggcgaactggagttggagcctaatagtaagcttgttcttcccaccacgctcctgaccgctcaggagaacgacgtgaatctgccagttgctgctgaggatttttctcagtaccagctgaagcagaatcaagacgtcaagcaggtggaacacaaaccatcccagtcttacctgagggtcaggaacaagtctgacattgccccatcacagcagcaggtgtcccccggtgacatggatcggacccaaattgagctaaacccatatctgacctgcgtttttagtggaggaaaggcagtccccttatcggctagtcagatgcccccagctaaaatgagtgtcatgctcccttccgtgaacctagaagactgtagccagtcactgagcctttccacaatgcaagaagatatggagtccagtggagccgataccttctag

SEQ ID NO: 27474 - DNA, 1986 bp, synthetic construct
  source 1..1986: mol_type = other DNA; note = Synthetic coding sequence
atggaaggagccgctgccccagtagcgggagaccgacctgacctaggactcggcgcacccggatccccaagagaggcagtggcaggggcaaccgccgctctcgagcccaggaaaccccatggcgtgaagagacatcatcacaaacacaacctgaagcaccggtatgaactgcaagaaactcttggcaaaggtacgtatggcaaagttaagcgtgccacggaaagattctctggcagagtggttgctattaaatcaatacgtaaagacaagatcaaagacgagcaggatatggtgcacatcaggcgagagatagagataatgtcaagtctgaaccaccctcacattatttccatatacgaggttttcgagaataaagacaaaattgtgatcataatggaatatgcaagcaagggggagctgtacgactacatatcagaacgtcgtaggctctctgagcgggagactaggcatttctttcgccaaatcgtatcagctgttcactattgtcataagaatggtgtggtgcaccgtgacctgaagcttgagaatatcctgctcgatgataactgtaatataaagattgccgatttcggcctatccaatctgtatcagaaggacaagttcctgcagactttttgtggatctccgctttatgcctcacctgagatcgtgaacggacggccttacagaggccctgaagtggactcgtgggcactgggggtgttgctctatactctggtttacggtacaatgcccttcgatgggtttgatcacaaaaacctcataaggcagatcagttccggggagtaccgggagcccacacagccatcagatgcgcgtggcctaattcgatggatgttaatggttaatcccgaccggagggctacgatagaggatattgcaaaccactggtgggtcaactggggctacaagtcctccgtatgtgactgcgatgccctgcacgattccgaatcccctctactcgccaggattattgactggcaccatcggagcaccggcttacaggccgacacagaggccaagatgaaagggctggcgaaaccgacaacgtccgaagtgatgctggaacggcagagaagtctcaagaaatcgaaaaaagagaacgactttgcacagtccggccaggatgctgtccccgagagcccatctaagctgtcttcgaaacggccaaagggcattctgaaaaagagatccaattcagagcaccggagccattctactggattcatcgaaggcgtcgtgggcccagctttgccatctacattcaagatggaacaggatctctgtaggaccggggtcctcctcccctcctctcccgaagcagaagtgcctgggaaactttccccaaagcagagtgccactatgccgaagaagggaattctgaagaaaacccaacaacgggagagcgggtactattcttcacctgagcggtccgagtccagtgagttgctggactcaaacgacgtgatgggaagttccattccaagtccttcaccacctgaccccgctagggttacatcacatagcttatcctgtcgcaggaagggaatcctaaagcactcctccaagtactctgctggaaccatggatccggctttggtgtctccagagatgccgaccctagagtctctctccgaacctggcgtgcctgccgaaggcctgtctcggagttacagccggccatcatctgtgatctctgacgacagcgtgctctctagtgactctttcgacctcctcgatttgcaggagaatagaccagcccgacagcggatccgatcctgcgtctcagccgaaaattttttacaaatccaggacttcgaagggcttcagaatcgccctcggccacagtacttaaagcgttatcgcaaccgcctggccgactcatccttctctctgctgacagacatggatgacgtaacccaagtttataagcaggccctcgagatctgcagcaagttaaactag

SEQ ID NO: 27475 - DNA, 603 bp, synthetic construct
  source 1..603: mol_type = other DNA; note = Synthetic coding sequence
atggcaaatatagcggtgcagcgtatcaagcgtgagtttaaagaggtattgaaatctgaggaaaccagtaagaaccagattaaggtggatctggtggatgagaactttacggaactgcgcggagaaattgctggcccacctgacaccccatacgaggggggtcgataccagctggaaattaaaatccccgagacctaccctttcaatccacccaaagtccgctttattaccaagatctggcatcctaacatctctagcgtcaccggcgctatatgtctcgacattttgaaagaccagtgggccgctgctatgactttaagaaccgtgttgctgtcactccaagccctgctggccgctgcggaacccgacgaccctcaggacgccgtagttgcaaatcagtacaaacagaacccagaaatgttcaaacagacagccaggctctgggctcacgtttacgctggcgcacccgtgtcctcccccgaatatactaaaaagattgaaaatctctgcgctatgggattcgatcggaacgccgtcatagtagcgcttagcagtaagtcgtgggacgtcgaaactgcaactgagctgctgctctccaactag

SEQ ID NO: 27476 - DNA, 5313 bp, synthetic construct
  source 1..5313: mol_type = other DNA; note = Synthetic coding sequence
atgcctcgcagacggaagaacctgggtggcaacccttttagaaaaaccgctaatcccaaggaagttgtcgtctctagcgtcgccagtagagaagaacctaccaccactctgccttctatgggggagacaaaggttgatcaggaggagctctttaccagcattagtgagatcttttcggatctggatccggacgttgtctaccttatgctcagtgagtgtgactttaaagtggagaacgctatggattgcctcctggagctgagcgccaccgacactaagattgaggagtcaagctcacagagctttgttgccagtgagaaccaggtgggtgccgctgaaagcaaaatcatggagaaacgcccagaggaagagagcgaggatagtaaaatggactcattcctggacatgcagcttaccgaggatttggattccctgatccagaatgcttttgagaagctcaatagctctccagatgatcaagtatatagcttcctgccttctcaggacgtcaatagttttaatgattccagtgaattcattaatcccgactcatccaacatgacacctatcttcagtacccagaatatgaacctcaacggggagaacctggaaaatagcgggtcaacgctgtctttgaaccccctgccaagccattcagttttgaatgagagtaagtgcttcattaaggataacactctcgctttagaatcaaattaccccgaggatagcctcctgtcatcaagtttaaacgtggcgagcgattcgattgccggttgcagtagcttgaaccagaagcagaaagaactccttgagtccgaatgcgtggaggcacagttctcagaggcccctgttgacctagatgcatcagagccccaggcgtgtctcaacctgcccggacttgatttacccggtacaggcggtgatcagaaatcaactagagtatctgacgtgtttctgccttccgagggatttaacttcaaaccacataagcaccctgagctcccgaccaaaggcaaggacgtctcctactgcccggtcttagcaccactcccgctgctactcccacctccaccccctccacccatgtggaacccgatgataccagccttcgacctgttccaaggaaaccacgggttcgtggcacctgtggtgacaaccgcagctcattggcggagtgtgaactatactttcccaccctcggtcatctcccacacaagtccaactaaggtgtggcgcaacaaggacggcaccagcgcctaccaggtgcaggagacgcctgtctcccaggtcgtgcgaaagaaaacatcttatgtgggcttggtcctcgtgctgctgagagggttgccaggcagtgggaaatcttttctggcacgtacccttcaggaggacaatccctccggggtgatcctgagtaccgatgattatttctacataaacggtcagtaccaatttgacgtcaaatacctaggagaggcccatgaatggaaccaaaatcgagccaaggaggcttttgagaagaagatttccccaatcattattgacaatactaatttgcaggcctgggagatgaagccttacgtagcactgtcccagaaacacaaatacaaggtcctgtttagggaaccggacacatggtggaagttcaaaccgaaggaactggctcgacgtaatatccacggggtatctaaggaaaaaatcacccgtatgctggagcactatcagagattcgtttctgttcccattatcatgagttctagcgtgcccgagaagatagagcggattgaactgtgtgcctatagctgtgaggacaggagcacatctccacgggatgatgaagacatcataagtgaaaaagaggagaatatcctgtccttaagtctgaagcacctggaatttactgaagaaaaaaatctggatgtcacaaaagagacaatgctgcccgagaacgttgcatatttgtctaacgctgatctgaacaagagacgtaaggagatctcagacatgaatccatccatccagagcgccctgattttagagaccccacacatgtacttcagcgacagcgagtcaaagctccaagccactgataaaagcgaaaacgagcagatcgagatggtggcagtgaaaggttactccaagaccgacaccgattctagcatggagagggtgagcccctctacatgttgcagcgaaaataaccaggaggattgcgatctcgccaattccggcccactgcagaacgaaaagagcagccctggcgaaattgtggaggagcgagctactgtgactaagaaagccttcggcaagcagaaaagcaagtccaccctcgagaaattcccaaggcacgagctcagcaattttgtgggagactggcccgtagacaagaccatcggtcagcgtaccaagcgcaaccgcaaaaccgagaaaacctcttctgttcaatccgataagaaatataattacccacaatcgcacaaactcgtgaactcagtgagcgtgaataccgattgtgtgcagcagagaggcagtccccacgagtcagtggaagatggtcgaaaaagtcagtgcgatgacgctagcgaacccctgaattcctataaatatgatgcctataaaaatattgacaaaaatagctttaacatcatgggggattggccttcatctgactctctggcccagagggaacataggtctaggatgcctaagaccggcctctccgaaccgaacttggaaatcggtacaaatgacaaaatgaacgagatcagtctctcaactgctcacgaagcctgctggggcaccagttcgcagaaactgaagaccctgggaagctccaacctgggcagttctgagatgttattgtctgagatgacctgcgagtcccagacatgtttatctaagaagtcacacggccagcacacaagtttgccgttgacatttacgaatagtgctcccacggtttctggagttgttgagccccaaacgctcgcagagtgccaagagcaaatgcccaaacgcgatccagggaaggaggtcggaatgtgtacccagactgagccacaggatttcgcattactctggaagattgagaagaacaaaatcagtattagtgactcaattaaagtgctcaccgggaggctagacgggtttaaaccaaaggtgttcaacattaacaccaagagtgatgtccaggaagctattccctatcgggttatgtacgacaaatctacatttgtcgaagagagcgagctcacgtcagcagatgagtcagagaacttaaatatcctctgcaagctgtttgggtcattttcgttagaagccctgaaagatctgtacgaacgatgtaacaaggacattatttgggccacctctctcctgctggatagcgaaactaagctgtgcgaggataccgaatttgagaacttccaaaagtcttgcgacgggagtcagatcgggcctttctccctggggttgaatttaaaggagattatcagtcagaggggaacactcgaaaatagcaattctcctgttccagagttctctcacggcattggaatctcgaatgctgattcacaatccacttgtgatgctgagcggggaaattctgagcaggcagaaatgcgcgctgtcacgcccgaaaaccatgagtctatgacctccatattcccaagtgcggcagttgggctgaagaacaataacgacatcctccccaattcccaggaagaactcttatactcctccaagcagtcgttccctggcatacttaaggctaccacaccaaaggacatgtcagaaacagagaagaacctggtggttacagagactggtgataatatccactctccgtctcattttagtgatattttcaattttgtatctagcacatcaaatttggaactgaacgaggaaatctactttaccgactcgctggaaataaagagaaatgagaactttcccaaagactatgtgaaattttctgacgaagaggagttcatgaacgaggacgagaaggagatgaaggaaatccttatggcgggtagcagcctttctgcaggcgtgtcaggagaggataagactgaaatcctcaacccaaccccagctatggccaagagtctgaccattgactgtttagagctggctctcccaccagagctagccttccaactgaacgaattgttcgggcctgtgggtatcgactccggatcactgacagtcgaagactgtgtagtacatattgatctaaatctggccaaggttatccacgaaaagtggaaagaatccgtcatggaaagacagagacaggaggaagtaagttgcggcaagttcatgcaagatcccagcctagttggtcatacaggcctggataaccctgaacagaagagctctcagcgaaccggaaaaaagttactgaagaccctgaccgctagcgagatgttgccattgctagatcattggaatacccagaccaagaaagtttctctaagagagataatgtccgaagagattgctctgcaagagaaacataatcttaagagggagaccctaatgtttgaaaaagattgcgcgactaagttgaaagaaaagcagctgttcaaaatttttccggcaattaaccagaacttcctggtcgacatctttaaggaccataactactctctcgagcacaccgtgcagttccttaattgtgtcttagaaggtgatcctgtaaagactgtggtcgcccaagaattcgtgcatcaaaatgagaacgtaactagccatacaggccagaagagcaaggagaagaagcccaagaaactgaaggagacggaagaaactccatccgagctgtcttttcaagactttgaataccccgactatgatgattatcgggcagaggcttttctgcatcagcagaagcgcatggagtgctactccaaggcgaaggaagcttaccgtattggcaagaaaaatgtagcaactttttatgctcagcaaggtaccttacatgaacagaaaatgaaggaagcaaatcaccttgcagcaatcgagatttttgaaaaggtgaatgcctctctgctgccgcagaatgtgctcgatttacacgggttgcatgttgatgaggcacttgagcatctgatgagggtcctcgaaaaaaagaccgaggaattcaagcagaatggcggtaagccttacctctcagttataaccgggagaggtaaccacagccaggggggtgttgcccgaattaagcccgctgtgatcaagtacctgatcagtcacagtttcagattttctgaaatcaagccaggctgtctcaaagtaatgctcaagtag

SEQ ID NO: 27477 - DNA, 1362 bp, synthetic construct
  source 1..1362: mol_type = other DNA; note = Synthetic coding sequence
atggactggaaggaggtgctgcggaggcgtcttgctacacccaatacgtgccccaataagaaaaaatccgaacaggaactcaaggacgaggaaatggacctgttcacaaaatactactccgagtggaagggcggtaggaaaaatacgaacgagttttataagacaattcctcgcttttattaccggcttcccgcagaagacgaagtgctgctgcagaaactgagggaggaaagccgagccgtgttcctgcaacgcaaatcccgggaactgctggataatgaagaactacaaaacttgtggttcctgctggacaagcaccagactcccccaatgattggtgaagaggccatgatcaattatgaaaactttctgaaggtgggagaaaaggctggcgctaaatgtaagcagttctttacagctaaggtctttgctaagctactgcacacagattcgtatggccgtatttctatcatgcaattctttaactacgttatgcgcaaggtctggttgcaccaaacccgaattgggctgtcactctacgacgtcgctggacagggctatcttcgcgagtccgacttggaaaactatatccttgaactgatccctacattgccccagcttgatggcctggagaaatccttttattcgttctacgtctgcacggcggttcgcaagttcttttttttcctcgacccactacggaccggaaagattaagatacaggacatcttagcctgctcgtttcttgacgacctgctcgaactgagagacgaagaactttctaaagaaagccaggaaactaattggtttagcgcccctagtgccctgagagtctatggacagtatctgaatttggacaaagaccataacggcatgctgagtaaagaggaactcagccgatatggcacagcaactatgactaatgtgttcctggaccgggtctttcaggagtgtcttacctacgacggagagatggattacaagacctaccttgacttcgtcctggctctggagaaccggaaagagcccgcagctttacagtatatcttcaaactgctggatatagaaaacaaaggttacctcaacgtcttcagccttaactacttttttagagctatccaggagttaatgaagattcacggccaagaccccgtaagctttcaggacgtcaaggatgagatattcgacatggtcaagccgaaagaccccctgaagatctcattgcaggacttgatcaactcaaaccaaggggacacagtaacaacgatcctgattgacctgaacggcttttggacatatgagaaccgagaggccctggttgctaacgatagtgagaattcagccgatcttgatgacacatag

SEQ ID NO: 27478 - DNA, 3348 bp, synthetic construct
  source 1..3348: mol_type = other DNA; note = Synthetic coding sequence
atgcctgaagatcaggtcggtaaactggaagctacggagaatactatctcggccatggcagctgctgcagctgagcagcaacagttttacctacttctcgggaatctgctgtcccctgacaacgtggtccgaaagcaagcggaagagacctacgaaaacattccaggtcagagcaagattacctttctgcttcaagccattaggaacaccaccgctgccgaggaagctaggcagatggctgccgtcttgctgcgcaggctgctcagttctgcatttgatgaagtgtatccagctctgccctccgatgtccagacagctatcaagtccgaactgttgatgattatccagatggagacacagtcaagtatgcgaaagaaggtctgtgacatagcagccgaactcgccagaaaccttattgacgaagatggcaacaaccagtggcctgaaggactgaaattcctttttgattcggtctccagccagaacgtggggctgcgcgaagccgcactgcatattttttggaactttcccggaatcttcggcaatcagcagcagcactacctggatgtgatcaaaaggatgctcgtgcagtgtatgcaagaccaagagcaccccagtattcgtaccctgagcgctagagccaccgccgcattcattttggcaaatgagcataatgtagccctgttcaagcactttgccgacctgctaccgggatttctacaggccgtgaatgacagctgttaccaaaacgatgatagcgtgcttaagagccttgtggagatcgctgacacggtaccgaaatacttgagaccacatttggaagctaccctgcagctgtctctgaaactgtgtggggatacatcattaaacaacatgcaacgacaacttgcattggaagtaatcgtgaccctgtccgaaactgccgcagctatgctcagaaagcacacaaatatcgtggctcaaactatacctcaaatgctggccatgatggtggacttggaggaagacgaagactgggctaatgcggacgaactggaagatgacgattttgactccaacgctgtcgccggtgaaagtgccttggatcgcatggcctgtggcctgggtgggaaattggtgctgcccatgataaaggagcatataatgcagatgcttcaaaacccggattggaagtacaggcatgccggtctcatggctctttctgcaattggcgagggctgccaccaacaaatggagggcatcctgaatgagatcgtgaacttcgtgctgctgttcctgcaggatccccatcccagagttcgttacgctgcttgcaatgcagtggggcaaatggccactgacttcgctcctgggtttcagaaaaaattccatgagaaagtgattgccgctctcctgcagaccatggaagaccaggggaatcagcgcgtgcaggctcatgctgctgctgccctgattaactttaccgaagactgccctaaatcactgctgattccttacttggataatcttgtcaagcatttgcattcaattatggtgttgaaactgcaagagctcatccagaagggaactaagctcgtcttggaacaagtggtgaccagtatcgcatctgtggcagataccgccgaagagaaatttgttccatattacgacctgttcatgcccagtctgaagcacatcgtcgaaaatgcagtgcaaaaggagctgaggctcctgcgcggtaagactatcgagtgtatttcgctgataggccttgccgtgggcaaggagaagtttatgcaggacgcctcagacgtgatgcagctgctgctcaaaacccagaccgatttcaacgacatggaagatgacgatcctcagatcagctatatgatatcagcatgggccagaatgtgtaagattctcgggaaggagttccagcagtatctgccggtggttatgggaccgctgatgaaaaccgcttctatcaaaccggaagtggccttgttggacacccaggatatggagaatatgtctgacgatgacgggtgggagttcgtgaatctgggcgaccagcagtccttcggtatcaagactgccggactggaggaaaaatctacagcctgccaaatgctcgtttgttacgctaaagaactgaaggagggatttgtagagtacactgaacaggtggttaagctgatggttccactgcttaagttttactttcacgatggggttagggtggctgctgccgagtctatgcccctgttgctggaatgcgctcgggtccgtggccctgagtacttgacccagatgtggcactttatgtgcgacgctctcattaaagctatcggcaccgagccagattctgacgtgctttcagagatcatgcactcgtttgccaaatgtattgaggtcatgggagatgggtgcctcaataacgagcattttgaggagttaggcggaattctgaaagcaaaattggaagagcacttcaaaaatcaggaactcaggcaggtaaagagacaagatgaggattatgatgaacaggttgaagagagtctacaggacgaggacgataatgacgtttacattttgacaaaagtgtctgacatcctgcacagcatctttagcagttacaaggagaaggttctgccatggttcgagcaactgttgcccctgattgtgaacctgatctgccctcaccgcccttggcctgacaggcagtggggcctatgcatcttcgacgatgtgattgaacactgctcgcctgcttcattcaaatacgcagaatattttttgcgccctatgctgcagtacgtgtgtgacaactcgccagaggtaaggcaggccgcagcatacggcctgggagtgatggcacaatatgggggtgacaattatagacccttttgtacagaagccttgccactgcttgttagagtcatacagtctgccgactccaaaacgaaggaaaacgtcaacgcaacagaaaactgtatcagtgcagtcggaaagatcatgaagtttaaacctgattgcgtgaacgttgaggaggtcttgccccattggctgagttggctgcccctacacgaggataaagaagaggccgtccagaccttcaattacctgtgtgacctaattgagagcaatcaccctatcgtcctggggcctaataatactaacttaccaaaaatctttagcatcatcgccgagggtgagatgcatgaagccataaagcatgaagacccttgtgccaaaaggctcgctaatgtggtgcggcaggtccagacctcggggggactgtggactgagtgcatcgcccagctgtcccctgaacagcaagcagcgatccaggagctgctgaacagcgcctag

SEQ ID NO: 27479 - DNA, 1929 bp, synthetic construct
  source 1..1929: mol_type = other DNA; note = Synthetic coding sequence
atgaagaggtcgagtgtgagcagtggaggagccggaagactgtcaatgcaggagctgcggtctcaggacgtgaacaaacagggcttgtataccccacaaaccaaggagaagccaactttcggtaaattatctatcaacaagccaaccagtgaaaggaaggtgagtctgttcggaaagcgtacctctgggcatgggagcaggaacagccagcttggaattttctccagctctgagaagatcaaggaccccaggcctctgaacgataaggcatttattcagcagtgtatcaggcagctgtgtgaattccttactgaaaatggttatgctcataatgtgagtatgaaatcgttgcaggccccatcagtcaaagatttcctcaaaatattcacttttctttacggttttctgtgcccttcatatgagctgcctgacacaaaatttgaagaggaagtgcctcggatttttaaggacctgggatacccatttgccctttcgaagagtagcatgtatacggtgggcgctccccacacttggccacacatagtagccgctttggtgtggctcatcgactgcattaaaattcacacagccatgaaggaatcaagtccgctgtttgacgacggacagccatggggggaagagaccgaggacggcatcatgcataataagctgtttttggactacactattaaatgctacgaatccttcatgagtggcgctgatagtttcgacgagatgaacgccgaactccagagcaagctgaaagatttgttcaacgtcgatgcatttaagcttgagtcgctcgaagcaaagaatcgtgccttgaacgagcagatcgcaagactggaacaagagagagagaaggaaccaaaccggctggaaagtctgcgaaaactaaaggcctctctccagggcgacgtccaaaagtatcaagcctacatgtctaacctggaatcccattccgccatcctcgatcaaaaactcaacggcctgaacgaagaaatagctagagttgagctcgaatgtgagacaatcaaacaagagaatacgagactacagaacattatcgataatcagaaatatagcgtcgccgacattgaacggattaaccatgagcggaatgagttgcagcagacaatcaataagctgactaaggacctggaagctgagcagcagaagttgtggaatgaagaactcaaatatgcgaggggtaaagaagcaattgagacgcagctcgccgagtatcataagctcgcacggaagttgaaactcatccctaagggagcagagaattccaagggatacgatttcgagataaaatttaatccagaagcaggggctaattgcctggtgaaatatcgagcccaggtgtacgtacctctcaaggaattgctgaacgaaaccgaagaggaaataaataaagcactcaataagaaaatgggattagaagatactctggagcagttgaacgcaatgatcactgaatccaaacgctctgtgcgaacactgaaagaggaggttcagaaactcgacgatctgtatcagcaaaaaatcaaggaggccgaggaggaggacgaaaaatgcgcaagcgagctggaatccctcgagaaacacaagcacctactggaaagcacggttaaccagggtctttcggaagctatgaacgagctggatgcggtacagcgggaataccagcttgtcgtccaaacaaccacggaggaacgtagaaaagttgggaacaatctccagcggctgctggaaatggtggcaacgcacgttggatcagtcgaaaagcatctggaggaacaaatcgcgaaggtggaccgagagtacgaagagtgtatgtccgaggatttgagcgagaatatcaaagaaatccgggataagtacgaaaagaaggcaacattaattaagagctccgaagaatag

SEQ ID NO: 27480 - DNA, 4770 bp, synthetic construct
  source 1..4770: mol_type = other DNA; note = Synthetic coding sequence
atgagccttccattctaccagaggtgccatcaacactacgatctttcatacaggaacaaagatgtccgatctaccgtgtctcattaccaacgagagaaaaaacggtccgctgtgtacacccagggatccacagcttatagctcccgttcctccgctgctcaccggagggagtccgaggcatttaggagagccagtgcctccagttcacagcagcaggcatcccagcacgcgttgagtagcgaagtttcccggaaggccgcatccgcatatgattatgggagctctcacgggctcacagattcatctctgttgctcgacgactacagctccaaactgagcccgaaacccaaacgcgcaaagcatagtctcctgtccggtgaggaaaaggagaacctcccaagcgattacatggtgcccattttcagcggccgacaaaagcacgtttctgggatcactgatacggaggaagagaggatcaaggaagctgccgcttacatcgcacagcgcaatcttcttgcatcagaggaaggcatcactacctccaaacagtcgacggcatccaaacaaaccactgctagcaagcagtctactgcgagtaaacagagcaccgcatccaaacaatccaccgcttcgcgtcagtctaccgcatctcggcaatctgttgtatctaagcaggcgacatcagccttgcaacaggaagagactagcgagaaaaagtcccgcaaagtcgtgattcgtgaaaaagccgaaaggctgagtttgcggaaaaccttggaggagaccgagacctatcacgcaaagctgaatgaggatcatctcctgcatgcccctgagtttatcattaagccgcgttcgcacaccgtgtgggagaaagagaacgtgaagctgcattgttccatcgcgggatggccagaacctagggtgacctggtataagaaccaggtacctatcaatgtgcacgcaaaccccggtaaatatataatcgaaagtaggtacggcatgcacactctcgaaataaatggatgtgattttgaggatacagcccaataccgggctagtgctatgaacgtaaagggtgaactgagtgcttatgcttctgtggtggtgaaacgatataagggcgagtttgatgagaccaggtttcacgcgggtgcttcgaccatgccgctctcgtttggcgtgacaccatacggctatgcttcacggttcgagatccatttcgacgataagtttgatgtatctttcggcagagagggcgaaaccatgtcactcggctgcagggtggtgattacgccggagatcaaacactttcagcccgagatccagtggtacaggaatggggtcccattgtctccgtccaagtgggtgcagactctctggagcggagagagagcaaccctgacgtttagccacctgaataaggaggacgagggtctctacacaatcagggttagaatgggcgagtattacgagcagtacagcgcttacgtgtttgtgcgggacgccgatgctgagatcgagggggctcctgcagccccattggacgtcaagtgtttggaggccaacaaagactatattatcatttcctggaagcagccggcagtggacggcggaagcccgatccttggctattttatcgacaaatgtgaggtcgggactgacagctggtcccagtgtaatgacacccctgttaaattcgccagattccctgtgaccggcctgattgagggccgatcctatatctttagagtaagagccgtaaataagatgggcatcggattcccatctagagtctcagaaccagtcgccgcactggatcctgccgagaaggctcgtctcaaatcaaggcctagcgctccttggacagggcagatcatcgtgacagaggaggaaccaagcgaaggaattgtgcctgggcctccaactgacttgtctgtgacagaagccactcgttcttacgtggtgctgagctggaagcctcccggacagaggggtcacgaaggaatcatgtatttcgtggagaagtgcgaggcagggaccgagaactggcaacgagtgaatactgagttgccagtcaagtcccctcgattcgctctgtttgacctcgcagaaggcaaaagttattgctttcgcgttcggtgttccaactccgctggcgtaggcgaacctagcgaagcaactgaggtgacagtcgtgggtgacaaattggacataccaaaagcgccagggaaaatcatcccgtctcgcaataccgataccagtgtcgtggtctcatgggaagagtccaaggacgctaaggaactggtgggatactacatagaagcttctgtggccggatccggcaaatgggagccgtgtaataataacccagtcaagggcagtcgttttacctgccacggcttggtgacgggccagtcatatatattccgagtgcgggctgtgaatgccgcaggattaagcgagtattcccaggactccgaagccatagaagtcaaagccgctatcgctcctccgagtcctccttgtgatatcacgtgcctggagtctttccgggactctatggtccttggctggaaacagcctgataagatcggcggagcagagattactggctattacgtgaactaccgggaggtcattgacggagtacctggtaagtggagggaggcgaatgtgaaggctgtcagcgaggaggcctataaaatcagtaacctgaaggagaatatggtctatcagtttcaagttgccgctatgaacatggctggtttgggtgcccctagcgctgtgagcgagtgtttcaaatgcgaggagtggactatagccgtacccggacccccacactccttaaaatgttccgaggtgagaaaagattcgctcgtcttgcagtggaaaccaccagtgcactcaggcagaactcctgtgacaggatactttgttgatttaaaagaagccaaagctaaggaagaccagtggcgaggactgaacgaagcagcaatcaaaaatgtctacctgaaggtcagaggcctaaaagaaggtgtctcatatgtctttcgtgtgagagccataaaccaggctggagtaggaaaaccgagcgatttggcaggccctgtagttgccgagacccggcctggaactaaggaggtcgttgtgaacgtcgatgacgacggagtgatctcactcaactttgaatgtgacaaaatgactcctaaatctgagttttcctggtcaaaagactacgtctctaccgaggactctccacggctggaagtggagtctaagggtaataagaccaagatgacttttaaagacctcggcatggacgatttgggcatttactcctgtgacgtaactgataccgatgggatcgcctcatcctatctcatcgatgaggaggagctgaagagattgctggccttgagccatgagcataaatttccgacagttccagtaaagtcagaattagctgtggagattttagagaaaggtcaagtgaggttctggatgcaggccgaaaagttgagtggcaacgcgaaggtgaattacatattcaatgagaaggaaattttcgaggggcctaagtataagatgcacatagatcgcaatactggaatcatcgaaatgttcatggaaaaattacaggacgaggacgaaggaacctatacttttcagctgcaggacggaaaggctacgaaccactctaccgtagttttagttggggacgtctttaagaaacttcagaaagaggccgagttccagcgccaggaatggatccgtaagcagggtccgcattttgtagaatacctatcctgggaagttacgggagagtgtaatgtgctgctcaaatgcaaagtcgccaatataaaaaaggagacccatatagtctggtacaaggatgagcgggaaattagcgtggacgagaagcatgacttcaaagacgggatctgcacgcttttaataactgagtttagcaaaaaggatgccggaatctatgaagtgattctgaaagatgaccgaggaaaggacaagtctcggctgaagctggtggacgaggcctttaaggaactgatgatggaggtgtgcaagaagattgccttgagcgccaccgatctgaagatccaatctaccgctgagggcattcagttatacagctttgtaacctactatgtggaggacttaaaggtgaattggtcacacaatgggtcagctatccggtacagcgatcgcgtgaaaacaggagtcaccggcgagcagatctggctgcaaataaacgaacccacaccaaatgacaagggtaaatacgtgatggagctgttcgacggtaaaacgggtcatcaaaagactgtagatcttagcggccaagcatacgacgaggcttatgctgagtttcagaggttgaaacaggcggctatcgccgaaaagaacagggccagagtcctgggaggactccccgatgtggtgacgatccaagaagggaaagctctgaatctcacatgcaatgtttggggcgatccccctcctgaagtatcatggttgaagaatgagaaagctctggcgtctgacgaccactgtaacctgaaattcgaggccggtagaaccgcctactttactatcaatggggtgtctaccgcagacagcgggaagtacgggttggtcgttaaaaataaatacgggtcagagacctcggactttacagtctctgttttcatccctgaagaagaggcaaggatggcggctcttgaaagtctgaaggggggaaagaaggctaagtag

SEQ ID NO: 27481 - DNA, 546 bp, synthetic construct
  source 1..546: mol_type = other DNA; note = Synthetic coding sequence
atggggggatttttctcatcgattttttccagcctgttcggcacgagggagatgagaattctgattttaggactcgatggcgcaggtaagaccaccattctctaccgactccaggtgggggaggtcgtgactactatacccacgattggtttcaatgttgagacagtcacgtataaaaatctgaagttccaggtttgggatctgggcggacagactagcatacgaccatattggagatgttactacagtaatactgacgccgtgatatacgtggtggactcctgcgacagagatagaatcgggatatcaaaatccgagctggttgccatgctggaggaggaagagctgagaaaggccatcctggtcgtgtttgccaataagcaggacatggagcaggccatgaccagcagcgagatggccaacagcttaggcctgcctgcactcaaggacaggaaatggcagatttttaaaacttcggccacaaaggggacaggattagacgaggcaatggagtggctcgtcgaaactctgaaatcaagacagtag

SEQ ID NO: 27482 - DNA, 1269 bp, synthetic construct
  source 1..1269: mol_type = other DNA; note = Synthetic coding sequence
atggccgctgccgctgttgtagagtttcaaagggcccagagcctcttatccacggatcgagaagcatccattgatattctgcacagcatagtaaagcgggacattcaggaaaacgacgaggaagctgtgcaggttaaagagcagtccattcttgagctcggaagcctactggccaaaaccgggcaggccgcagagcttggtggactcctgaagtacgtcaggcccttcttaaatagcatatcgaaggcaaaagcagctcgccttgtaagatcattgctggacctcttcctggacatggaggccgcaaccgggcaagaggttgagttatgcctggagtgcatcgaatgggccaagagcgaaaagagaacgtttctgaggcaggccttggaagcccgactggtgtccctatactttgacactaagaggtaccaggaagccttacatttaggcagccaactgctcagggaacttaaaaagatggatgataaggcattgctggtcgaggtgcaattacttgagtcaaagacttaccatgccctttctaacctgcctaaggctcgagccgctctgacttctgctaggaccaccgctaatgctatctattgcccgcctaagctccaagcaacgctcgacatgcaatcaggcatcatccacgctgccgaagagaaggactggaaaacagcttacagctatttttacgaggctttcgaaggatatgactccattgactcccccaaggcaatcacaagccttaagtacatgttgctatgcaagatcatgctgaacacccctgaggacgtgcaggcactagtatccggcaagttagccctgcgctacgcgggacggcagacagaggctcttaaatgtgtggcccaagcttctaaaaaccgctccttggcagacttcgaaaaggccttaacagactatagggccgaattaagagacgatcccataatctccactcatctcgccaagttgtatgacaatctgctggaacagaacctgattcgggtgattgagccgttctccagagtccagatcgaacacatatcaagcctgatcaagctgagtaaggccgacgtggagcgaaagctgagccagatgatcctggacaaaaagttccatgggatcttggatcaaggcgagggggttttgatcattttcgacgaaccccctgtggacaagacctacgaggctgcgctggaaaccatccaaaatatgagcaaggtggtcgactcactctataacaaagctaaaaagctgacatag

SEQ ID NO: 27483 - DNA, 1449 bp, synthetic construct
  source 1..1449: mol_type = other DNA; note = Synthetic coding sequence
atggccagcctgggacccgcagctgccggagagcaagcaagcggtgcggaggcagagcccggaccagctggcccaccacctccaccaagtccgagctcgctaggacccttgctgcccctgcagcgcgagcccctctataactggcaggccaccaaggcctcactcaaggagagatttgcattcttattcaacagtgagctcttgtccgatgtgcgctttgtgctgggaaaaggcagaggcgctgccgcagccggtggtcctcagcgaattccggctcacaggtttgtgttagctgcgggatccgccgtttttgacgctatgtttaatgggggaatggcgaccacctcagcagagatagaattgccggacgtggaaccggcagccttcctcgcactcctgcgttttttatactctgacgaggtgcagattgggcctgaaaccgttatgaccacactctacacagccaagaaatacgccgtcccggctctcgaagcacactgtgtggaattcctcactaagcacctcagggcagacaatgcatttatgctgttaacccaagccaggctatttgatgagcctcagctggcttctttgtgtctagatacgattgataagtcaactatggatgctatttccgcagagggcttcactgacatagacatcgatacactatgtgcagttctggagcgcgataccttgagcattcgagagtccagactcttcggcgcagtcgtcaggtgggccgaagccgagtgccagaggcagcagttgcccgtaacattcggtaataagcagaaagtgttgggaaaggcgctctccctgatccggtttcctctgatgacaattgaggagtttgccgctggtcccgctcaaagcggcattctgtcagaccgtgaggttgtaaatttgttcttgcattttaccgtgaatccgaagcctcgggtggagtatatagaccgtccacgctgctgcttaagagggaaggaatgttgcattaaccgcttccagcaagtggagagcagatgggggtatagcggcacttcggatcgaatcaggttcaccgtcaataggagaatctccattgtggggtttggcctgtacggttcgattcacgggcctaccgattaccaggtgaacatccagattattgaatatgagaagaaacagaccctagggcaaaatgatacaggcttctcctgcgacggtaccgccaacaccttccgcgtaatgtttaaagagcccatcgagatcctgcccaatgtttgctacactgcttgcgctacgctgaagggtcccgacagccactatggcaccaagggactgaagaaggttgttcacgaaaccccagcggcaagcaaaactgtattcttctttttctcttccccgggtaacaataacgggacatccattgaggacggccagattcctgagataattttttacacttag

SEQ ID NO: 27484 - DNA, 2883 bp, synthetic construct
  source 1..2883: mol_type = other DNA; note = Synthetic coding sequence
atgtcccggttgatcgttaagaatcttcccaacggaatgaaagaagaacgcttcaggcagttattcgcagcctttggaacactcactgattgttcactcaagtttactaaggatggcaagttccgcaaattcgggttcatcgggttcaagtctgaggaggaggcccagaaagcccaaaagcattttaacaagtcttttatagacacttcaaggataactgttgaattctgtaagagtttcggggaccccgcaaagccaagagcctggtctaaacacgcccagaaacctagccagcccaaacagccaccaaaggactccacgaccccagaaatcaaaaaagacgaaaagaaaaaaaaggtagcgggtcagcttgagaaactgaaggaggacacagaattccaggaatttttatcagtccatcagcggcgtgcgcaggccgctacctgggctaatgatggcctcgacgcagaaccaagcaagggcaagtcgaaacccgcttccgattacctgaatttcgattccgacagtggacaggagtccgaagaggagggagccggagaggatctggaggaagaagcctcgctcgagcctaaagcagcggtgcagaaggaactctctgacatggactacctcaaatccaagatggttaaggccggaagctctagctctagtgaggaggaagaatctgaggacgaagccgtgcattgcgacgagggttccgaagccgaggaggaggatagtagtgccactcccgttcttcaagaacgagattccaaaggagctggtcaggagcagggaatgccagctgggaagaaacgacctcctgaggcccgagccgaaaccgagaagcctgccaatcagaaggagccaaccacttgtcatacagttaagctgcggggtgccccattcaacgtgacagaaaagaatgtgatggagttcctcgctcccttgaaacccgtcgccataagaattgtcagaaatgcccacggcaataaaaccgggtacatctttgtagacttctccaatgaggaggaagtgaaacaagccctgaagtgcaatagggaatatatgggtggtcgctacattgaggtctttcgcgagaagaacgtgcctacaaccaagggtgccccaaagaacaccactaagagctggcagggaaggatcctaggagaaaatgaggaggaggaggacttggctgagtctgggaggctgttcgtcagaaacttgccttatactagtacagaagaggatcttgagaagctattttcaaagtacggacccctgagtgagcttcattatccaatcgactctctgacgaagaaacccaaaggattcgccttcatcactttcatgtttccagagcacgccgtgaaggcttattccgaggtagacgggcaggttttccagggcaggatgctgcatgtccttccgagcactatcaaaaaggaggcttcagaggatgcttcagccctgggctcctcctcttacaaaaaaaagaaagaggcacaagataaggccaatagcgcttcttctcacaattggaatacgctgttcatgggcccaaatgctgtggccgatgcgatagcgcagaagtacaatgcaactaagagtcaggtgttcgaccatgaaactaagggctcagtggccgtaagagtagccctaggggaaacccagctcgtccaggaagtcagacgattcctcatcgataatggggtgagcttagattcttttagtcaggccgcagccgagcgctcaaagacagtgatcctggtgaaaaatttgcccgctggcaccctggctgcccagctgcaagaaaccttcggtcacttcggatcactgggaagagtactgctgcccgaaggtggaatcactgctattgttgagtttctggagcctctcgaagcacggaaggcatttaggcacctcgcatatagcaagtttcatcatgtccccttgtacctagaatgggccccagtcggagttttttccagtactgctccgcagaagaagaaactgcaggacaccccatcagagcctatggagaaagatcccgcagagcctgagactgtgcccgacggtgagacgccggaagacgagaacccgacagaagagggcgctgacaactcatctgccaaaatggaggaagaggaggaggaagaggaggaagaagaagagtctctccctgggtgtactctgtttatcaagaacctgaattttgatacgactgaggaaaagctcaaggaagtctttagcaaagtgggcaccgttaaaagttgctcgatctcgaagaagaaaaacaaggccggagtactcctgtcgatgggatttggctttgttgagtacaggaaaccagaacaagcacagaaagccctcaagcagctgcagggacacgtagttgacggccacaagctcgaagtcagaatctcagaaagggctacaaagcctgcagttacgctagccaggaagaagcaggttcctagaaagcagacaacttccaagatcctggtccgtaatatcccatttcaggctcattcccgggaaattcgtgagctgttttccaccttcggtgagcttaaaactgtccggctgcctaagaaaatgactggtacgggcacacatcgcggatttggcttcgtggatttcttgactaaacaggacgcaaaacgcgcatttaacgcgctatgccatagcacccacctttatggtcgcaggttggtgcttgagtgggctgattccgaggtgaccctccaagccctcagacggaaaaccgccgctcatttccacgaaccccctaagaaaaagcgaagtgtagtgctagacgaaatcttggagcagctagagggctccgactccgattccgaggaacagactctgcagctgtag

SEQ ID NO: 27485 - DNA, 2919 bp, synthetic construct
  source 1..2919: mol_type = other DNA; note = Synthetic coding sequence
atggccacgagggggcatgttcaggaccctaatgaccgcaggctgagacccatctacgactatcttgataatggcaacaacaagatggccatacaacaagctgacaagttgttaaagaagcataaagatcttcactgcgccaaggtgcttaaagcgataggcctgcaacgtaccggcaagcaggaagaagcattcaccctggcccaagaggtagccgctcttgaaccaaccgacgacaattcccttcaagcgctcacaatcctctatcgcgagatgcaccgaccagagctggtgaccaagctctacgaagctgcagtcaagaaagtgccaaattcagaggaataccattctcatctcttcatggcctacgccagggtcggagagtataagaagatgcaacaggccggtatggccctctacaagatcgtgcccaaaaatccttactacttctggtcagtgatgtcgctgattatgcagtcaatttccgcccaagacgaaaatctgtctaaaacaatgtttttgccattagccgagagaatggtggaaaagatggtgaaagaagataaaatagaagcagaggccgaggtggaactctattatatgatcctggagcgtctcggcaagtatcaggaggccctggacgtgatccgtggcaagctgggtgaaaagctgacatccgagattcaatcgagggagaacaagtgcatggccatgtataagaaacttagtaggtggcccgagtgcaatgccttgagcagaagactcctcttgaaaaactcagacgactggcaattctatctaacatattttgacagtgtgttcaggctgatcgaggaggcatggtctccacctgcagagggtgagcatagcttagagggcgaagtccactatagtgctgaaaaagctgtgaaatttatcgaagatcgcataacagaggaaagtaagtcttcacgtcacttacgtggcccacacctggctaaactggaactcattagaaggttgcgttcccagggctgcaacgatgagtacaagctgggtgacccagaggaactcatgtttcaatactttaagaagttcggcgacaagccctgttgcttcaccgatctcaaggtttttgtggatctcttgccagctactcagtgcacaaaattcattaaccaattgctaggcgtcgtgcccctcagtacacccactgaagacaaactggcccttcctgcggatataagggccctacagcagcatctgtgcgttgtacagttgactaggctgctgggactatatcacacaatggacaagaatcagaagttgtccgtggtgagagagttgatgttgaggtatcagcacggacttgagttcggcaagacttgccttaagacagagctccagttttccgactactattgcctactggctgtgcacgctttgatagatgtatggagagagaccggcgatgaaactactgtgtggcaggctctcacactcctggaagaaggcttgacacactcacctagcaacgcccagttcaagctgctgcttgtccgaatctattgtatgctgggcgctttcgagcctgtcgtcgacctgtacagcagcctggacgctaagcacatccagcacgacaccatagggtatcttctgacacgatacgctgagagccttggccagtacgctgccgctagtcagtcctgtaactttgcattaagattttttcacagcaaccagaaggacacatcggagtacataatccaggcttacaagtatggtgcgttcgaaaagattccggagttcatcgcctttaggaatcggttaaataacagtttgcacttcgcacaggtgaggaccgagcggatgctcctagatttacttctcgaggccaatatatctacgtcccttgctgagtctatcaagtccatgaacctgaggccagaagaagacgacatcccctgggaggatttgcgcgacaacagggacctcaacgtatttttctcatgggaccctaaggaccgagatgtgagtgaagagcacaaaaaactcagcttagaggaagagacactctggctaagaatcagatctctgactctaaggctgatttccggactgccctcactgaatcaccccgttgagccaaagaactccgaaaaaaccgctgagaatggtgttagctccaggattgacatcttgcggctgctgctgcaacagctcgaagccaccctggagaccggaaaacgcttcatcgagaaggacatacaatacccgttcttggggccagtgcctaccagaatgggaggcttttttaattccggctgcagtcagtgccagattagcagtttttacctcgtaaatgacatatacgaactagacacttccggcctcgaagatactatggagatacaggaaagaattgagaactccttcaagtctttgctggatcaactgaaagatgtattctctaaatgcaagggcgatttactggaagtcaaggatgggaatcttaaaactcacccaactctcctggaaaacctcgtgttctttgtcgagactatttccgtaattctctgggtgtcgagctattgcgagtccgttctgcgcccttataaattgaaccttcagaaaaaaaagaagaagaaaaaagaaacttctatcattatgccccctgtgtttacttcctttcaggactacgtcaccgggctgcaaacactgatctcaaatgtggttgatcacattaaggggctggagacgcatttgattgctctgaagctggaagagctgattctagaggacacttcgctctccccggaggagagaaaattcagcaaaactgtgcagggcaaagtgcaaagctcttacctccattctttactggagatgggagaactcctgaaaaagcgcctggaaacaacaaagaaacttaagatttag

SEQ ID NO: 27486 - DNA, 2166 bp, synthetic construct
  source 1..2166: mol_type = other DNA; note = Synthetic coding sequence
atggcagaaaaattcgagagtctgatgaacattcatggtttcgacctgggcagccgctatatggacctgaaaccgctgggctgcgggggaaatggccttgttttttccgctgtggacaacgactgtgataaaagagtggctattaagaagatcgtcctgaccgaccctcagtcggtgaaacacgccttgcgcgaaataaaaattatcaggcggctggaccacgataatatcgtcaaggtgtttgaaattctgggtccttccgggagccaattgacagacgacgtgggctctttaaccgagctaaattccgtgtacatcgtgcaggaatacatggagaccgacctcgcgaatgttctggagcagggtcccttgctcgaggaacatgccaggttatttatgtatcagttgttgaggggcctcaaatacatccatagcgcaaacgtcctccacagagaccttaagccagctaacctttttatcaacacagaggatctggttctgaagatcggtgactttggtctggccagaattatggaccctcactatagccataagggccatttatccgaaggcctggttaccaagtggtaccggagccccagactgctgctgtctcctaataactatacgaaggctatagacatgtgggcagccggttgtattttcgccgaaatgctgacaggtaaaactctgtttgcgggagcccatgagctcgagcagatgcagttaatcttggaatcaataccagtagtccacgaagaagaccgacaggagctcctgtccgtgatccccgtctatattaggaacgacatgacggagccacataaaccgctgacccagctgctgcctggaatctctcgcgaagctttagatttcctggagcagattttgacatttagtcctatggaccgcctgactgcagaggaggccttgagtcacccatacatgagcatatacagctttccgatggacgagcccatatcgtcccatcccttccacattgaagacgaggtcgacgacatccttcttatggatgagacgcacagccatatatataattgggaacgctaccacgactgtcagttttctgagcacgattggcccgtgcataataattttgacatcgatgaagtgcagctggatcctcgcgcactatcagatgtgacggacgaagaagaagtgcaggttgaccctcgcaaatacctggacggagatcgggagaaatatctggaggacccagctttcgataccaattactccactgagccctgttggcagtactctgaccaccacgagaataaatactgtgacctagagtgtagccatacctgcaattacaagacaagaagttccagttatctggacaacctcgtttggcgcgagagtgaggtgaaccactactatgagcctaaactcataattgacctgagtaactggaaggagcaaagcaaggagaagagcgacaaaaaagggaagtcgaaatgtgagaggaatggacttgtaaaagcccagatcgccctagaagaggcgagtcagcagctggcagggaaggagcgggaaaagaatcaggggttcgatttcgatagctttattgcgggtaccatccagctgtcctcacagcacgaacccaccgatgtggtagacaaactgaacgatttaaattccagtgttagccagttggaactcaaaagccttatctcaaagtcagtttcacaggagaagcaggaaaaaggaatggccaatctagcccagttggaggccttgtaccagtcatcctgggactcacagtttgttagtggaggcgaggattgctttttcatcaatcaattctgtgaggtaaggaaggacgagcaggttgaaaaagagaacacctatacgagttacctagacaagttcttctcacgaaaagaggacacggaaatgctggaaacggaacctgtggaagatggaaagctaggagagcgcggtcatgaggagggatttctcaataactccggcgaattcctgttcaataagcaactcgagtccatcgggattccacaattccactcgcccgtggggagtcccctaaagagtattcaggcaacccttaccccttccgccatgaagagctcaccacagatacctcatcagacctactcaagtattctgaaacacttgaactag

SEQ ID NO: 27487 - DNA, 948 bp, synthetic construct
  source 1..948: mol_type = other DNA; note = Synthetic coding sequence
atggccgctggcgtgccatgtgcgctcgtaacgagttgctcttccgtatttagcggggaccagctcgtgcagcacattctggggacagaagaccttattgtggaggtcacgtctaacgatgccgttaggttttacccctggaccattgacaacaagtattactccgccgatattaacctgtgcgtcgtgcccaataaattcctcgtaacagctgaaatagctgagagcgtccaggcattcgttgtgtacttcgacagcacacaaaagagcgggttagactcagtgagctcatggctgccactagctaaggcctggctgccagaagttatgatcctggtttgcgatcgcgtctctgaggatggcataaatcggcagaaagctcaggagtggtgtatcaagcatggattcgaactggtcgaactgtcccccgaggagcttcccgaggaagacgatgattttcccgagtccacgggagtgaagcggatcgttcaggccctcaacgccaacgtgtggtccaacgtcgtgatgaagaatgataggaaccaaggtttctctctcctgaactccctcacgggcacgaatcattccatcggcagcgccgatccgtgccaccctgaacagccgcacttgccagccgcagacagtactgagagtctgtctgatcaccggggtggggcaagcaacacaaccgatgctcaggtggattcgatcgtcgaccccatgttggatctcgatatccaggagttagctagtctgacaacaggcggaggggacgtcgagaatttcgagagattgttttctaagctgaaagagatgaaggataaggccgctactctgccccatgaacagcgtaaggttcatgcggaaaaagttgccaaggctttttggatggccattgggggagatagggacgaaattgagggactgagctctgatgaggagcattag

SEQ ID NO: 27488 - DNA, 1338 bp, synthetic construct
  source 1..1338: mol_type = other DNA; note = Synthetic coding sequence
atggccgcacccgaggagcgggatctcacacaggaacagacagagaagctcctgcagtttcaggacctgactggaattgagtcaatggaccagtgccgtcacacgctggagcagcataactggaacatagaagccgcagtgcaggaccggctcaatgagcaagagggcgttcccagtgtgttcaacccccctccttctagacccttgcaggtcaatacagctgatcacaggatctatagctatgtggtctccaggcctcagcctagagggttgctcggatggggttattatttgatcatgcttcccttccggtttacttattataccattttggatatattcagattcgcactgaggttcatacgcccagatcctaggtcaagagtgaccgatcctgttggagacatcgtttccttcatgcatagcttcgaggagaagtatggcagggcacatcctgtgttctatcaagggacttactcccaagcgctcaatgatgccaagcgggagctgaggtttcttctggtgtatctgcacggggacgaccaccaggactctgatgaattctgccggaatacactgtgcgccccagaggtcatcagcctcatcaacacccgaatgctgttctgggcgtgctccacaaacaaacccgagggctaccgggtgagccaggcccttagggagaacacctatccttttttggctatgattatgctcaaggaccgcagaatgactgtggtggggaggctggaggggctcattcagcctgatgacctcattaaccagttgactttcattatggacgcaaatcagacctatttggtcagcgagaggctggagagagaggagagaaatcagacgcaggtactgagacaacaacaagacgaagcctacctggcatcactccgggctgaccaggaaaaagaacggaagaaacgcgaggaaagggaacggaagcgacgaaaggaagaggaggtgcagcaacagaagctggctgaagagaggcggagacagaacctgcaggaggagaaggaacgcaaacttgaatgtctgccacctgaaccttcccccgatgatccagagagtgtaaagatcattttcaaattgccaaacgatagccgggtggagcggagatttcatttctctcagtccctcacggtcatccacgattttctattctctttaaaggaaagtccagaaaaattccagatcgaagccaattttcctcgacgtgtcctcccctgcatcccctcagaagagtggcccaatcccccaaccctccaggaagcgggtctgtcccacacagaggtcttgtttgtacaggatctgacagacgagtag

SEQ ID NO: 27489 - DNA, 2724 bp, synthetic construct
  source 1..2724: mol_type = other DNA; note = Synthetic coding sequence
atggccaccccagatcaaaagtcccctaatgttttgctccagaacttgtgctgccggatactcgggaggagtgaggccgatgtcgcacagcagttccagtatgcagttagggtcattggatctaacttcgcacccaccgtggaacgtgatgagtttctggtggctgaaaaaatcaaaaaagagctcattagacagcgaagggaggcagacgcagctctcttcagtgaactgcatcggaaattgcactcccaaggggtcttgaagaacaaatggtccattctgtacctgcttttaagcctcagcgaagatccaaggcgacaacctagtaaagtatcctcctacgcaacgctgttcgcccaggcactgccccgtgatgcacacagtactccgtactactacgctaggcctcagacactgccactgtcataccaggaccgtagcgcacagagcgcccagtcttcaggatccgtgggttcttccgggatttccagtattggactatgtgccctctccggacccgcaccagcaccccagagtttattgcctgggcagtctaaccaggcccctggagtcggcgactgcctgagacagcagctgggcagtcgccttgcttggacactcacggcgaatcaacctagttcacaggctacaacaagcaaaggcgttccctctgcagtatcacggaacatgacccgttcgcggagggagggggatactggcggaaccatggaaattaccgaggccgcactggtcagggacattctgtatgtatttcagggcatagatggcaagaatatcaagatgaataatactgagaattgctacaaagtcgagggcaaggccaatctttccagatccttgagagatacagcagtgagactgagcgagctggggtggctgcacaataagattcggcgttatactgatcagcgcagtctggatagaagctttgggctggtgggtcagagtttctgcgccgctttacatcaggagcttcgtgagtactatagattactgtccgtcctgcattctcagctgcagctcgaagacgaccagggcgtcaatctgggcctcgaaagttctctgacactgcgaaggctccttgtctggacatacgacccgaagatcagactgaaaactctagcggctctggtggaccactgccagggtaggaaaggtggagaacttgcttcggctgtacacgcttatacaaagactggggacccatacatgcggtcactggtacaacacatcctgtccttggtgagtcacccagtcctgtcctttctctacaggtggatctacgacggagagttggaagacacttatcacgagttcttcgtggcctcggatccgaccgtcaaaacagatcggctatggcacgataagtacacccttaggaaaagtatgatcccctcctttatgacgatggatcagtcacgaaaagtgctactgattggtaagtccataaactttctgcaccaagtgtgccatgatcaaacccctaccacgaaaatgatcgctgtgaccaaaagtgcggaaagtcctcaggacgcagctgatttatttacagacctggagaacgccttccagggcaagatcgacgccgcatacttcgaaacgagcaaatatctccttgacgtgctgaataagaaatacagcttgctggaccacatgcaggctatgcgacgttacctactgctggggcagggtgactttattcgccatcttatggacttactcaagcctgagcttgttcggcctgccacgacactgtaccagcacaatctaaccggcatcctggaaacagccgtgagagctactaatgcccagttcgatagcccagaaatcttgcggcgattggacgtgcgtctgcttgaggtgtcccccggagatacaggctgggatgtcttcagtctggactaccacgtcgacggccctatcgccacggtttttaccagggagtgcatgtctcactacctgagagtcttcaacttcttgtggagagcgaagaggatggagtacattctgacagacatccgaaaggggcatatgtgtaatgccaagctactgcggaatatgcccgagttctcaggcgtgctgcaccagtgccacattctagcctcggaaatggttcattttatccaccaaatgcagtactacattaccttcgaagtgctggaatgctcatgggacgaactttggaacaaagtccagcaggcacaggacctggatcatataatcgccgcacatgaggtcttcctggacaccattatcagcaggtgcctgttggatagtgacagtcgggctctgctgaatcagcttcgcgctgtgttcgaccagatcatcgagcttcagaacgctcaggacgcaatataccgcgcagccttggaagagcttcagaggcgattgcagtttgaggaaaagaaaaagcaacgcgagatcgagggccagtggggggtgactgcggctgaggaggaagaagaaaataagcggattggtgagtttaaggaatcaatccctaaaatgtgcagtcagcttagaatcctgacacacttctaccagggaatagtgcaacagttcttggtgctcttaacaacgtcatctgacgagtctctacgcttcctcagcttccggttggactttaatgagcattacaaagccagagagcccagactgagagtctccctgggaactcgaggacggagaagctcacacacttag

SEQ ID NO: 27490 - DNA, 1086 bp, synthetic construct
  source 1..1086: mol_type = other DNA; note = Synthetic coding sequence
atgacaggcaaggcaggagaggccctatccaagcctaaaagcgaaactgtcgcaaaaagtacctcaggtggggcacccgctaggtgtaccggcttcgggattcaggagattctcggactcaacaaagaacctccctcttctcaccccagggctgcactggacggtctggctccaggccatcttctggcagcaaggtctgtgctttctccggctggtgtaggaggaatggggttgcttggccctgggggattgccaggtttctacacccagcccacatttctggaagtcctgagcgatccccagtcagttcaccttcagccacttgggagagcttccggtcctctggacactagccagaccgcgtcgagtgatagtgaggacgtgagttccagtgacagaaagatgtccaagtcagctttgaaccagacaaagaaacgcaagaaaaggcggcaccgaaccatatttacatcctaccaactagaggaactggagaaggccttcaatgaagcccattatcctgacgtatacgcgcgtgagatgttagctatgaagactgagctacccgaggaccggatacaggtatggttccaaaatagaagagctaagtggagaaaacgtgaaaaatgttggggcagaagcagtgtgatggccgaatacgggctgtacggggctatggtacggcactccatcccattgcctgaaagtattctgaagtctgccaaagacggaatcatggactcttgcgctccatggctcctggggatgcacaagaaatccttggaagctgctgccgagtccgggaggaaaccagaaggggagcgacaagccctccctaagctcgataaaatggaacaggacgagcgagggccagacgcccaggcagccatcagccaggaggaattgagagaaaactcaatagcagtactgcgcgctaaggcacaagagcatagcactaaagtactcggtaccgtatctggaccagacagcttggcccgatccacggagaaacccgaggaggaagaggccatggatgaagatagacctgcggagaggttgtctccgcctcagcttgaagatatggcatag

SEQ ID NO: 27491 - DNA, 2073 bp, synthetic construct
  source 1..2073: mol_type = other DNA; note = Synthetic coding sequence
atggaagaatcaccactgtcgagagctccatcgaggggaggggtcaacttcttgaacgtggcacgaacttatatacccaacacgaaagtggagtgtcattatacacttcccccaggcaccatgccttccgcttcagactggattggcattttcaaggtcgaggccgcatgcgttagggactatcatacctttgtctggagttcagtgccagagagcacaacagacggcagcccaatccacaccagcgtccagttccaagcatcctatctccctaagcccggagcacagctttatcagttcaggtacgtcaacagacagggtcaggtttgcggtcagagcccaccgttccagtttagggagcctcggccaatggacgagctagttaccctggaagaggcagacggaggcagtgacatactgttggtcgtgcctaaggccaccgtgttgcagaaccagctggatgagtcccagcaggagcgtaacgacttgatgcagctgaaacttcaactggaagggcaggtgacagagctcagatcacgcgtgcaagaactggagagagcactggcgactgccaggcaggagcataccgaactgatggagcagtacaagggtattagtaggagccatggcgagattacggaagagcgcgatattttatctcgacagcagggggaccatgttgcacgcattttggaacttgaggacgacattcagacgattagtgagaaagtacttaccaaggaggtagagctggatcgacttcgtgataccgtaaaggcactcacacgggagcaggagaagttgttggggcagctcaaggaggtacaagcggataaagaacaaagcgaggcagaactgcaggtggcacaacaggagaatcaccacttgaacctggatctcaaagaggccaaatcatggcaggaggagcagtccgctcaagctcagcggctgaaggataaggtggcccaaatgaaggacaccttgggccaagctcaacagagggtggctgaactagagccactgaaagaacagctcaggggagctcaggaactcgccgcttcatcccagcagaaggcaacactattaggggaggagctggcgtctgctgcagctgccagagataggacaatcgccgaactccacagaagtaggttggaggtcgccgaagtaaacgggaggttggccgagctcggcttgcatttaaaggaagagaagtgtcaatggtccaaagaacgggcagggctgctccaaagcgtggaagccgagaaggacaaaattctgaagttgagcgctgagatactgcgactcgagaaggctgttcaggaggaaagaacccagaaccaggtgtttaaaaccgagctcgctcgggagaaggatagctctctggttcagctctcagagtccaaaagagaactcaccgagttgcgcagtgcgctccgggtgttgcagaaagagaaggagcaactccaggaggagaagcaggagctgttagagtacatgagaaaacttgaggctcgcctggaaaaagtcgctgatgagaaatggaatgaagatgccacaaccgaggatgaagaggcagccgtagggctgtcgtgccccgcagcgctgaccgacagcgaggacgaaagtccagaagatatgagactgcctccttacgggctgtgcgagcggggagatcccggatcctccccggctggaccccgagaagcttccccactggttgtgattagtcagccagctccgatctctcctcatctgagtggccctgctgaggattcttcaagtgactccgccgaggatgaaaagagcgtgttaatggccgctgttcagagtggaggcgaggaggccaacctgttgctccccgaactaggaagcgccttctacgatatggccagtggcttcactgtcggtactttgtccgagacgtctaccggcggacccgctacaccaacttggaaggagtgccccatttgcaaagaaagatttccagcagaaagcgacaaggatgccctcgaggaccatatggacggccactttttcttctccacacaggacccttttaccttcgaatag

SEQ ID NO: 27492 - DNA, 1980 bp, synthetic construct
  source 1..1980: mol_type = other DNA; note = Synthetic coding sequence
atgtcactgcctcctgaaaaggcatctgagctgaagcagcttatccatcagcaattaagcaagatggatgttcacggaaggattcgcgaaatcctggccgaaacaatccgagaggaacttgcaccagatcaacagcacctgtccaccgaggaccttattaaggctctccgtcggagagggataatagatgacgtgatgaaagagctcaactttgttacggatagtgtggagcaggaattaccttcgtcacctaaacagccaatttgtttcgaccggcagagcacactgaagaagaccaacatagaccccacccggcgatatctgtatttacaggtgctaggaggcaaggcatttttggaacacctgcaggaacctgaacccctccccggacaggtttgcagcacctttaccctctgcttacattataggaatcagcggtttcgctctaagcccgtgccttgtgcctgtgagcctgactttcatgacggttttctgctggaagtgcatcgtgagtcactgggggacgggacccgcatggccgactctactaccatgctgtccatttccgaccctatacacatggtgctgatcaagacagatatttttggtgagaccacccttgtcgcaagttatttcctggaatggcggtctgtgctgggcagtgaaaatggggtcactagcctgacggtggaactgatgggcgtagggactgaatccaaagtgagcgtcgggatcctgaacattaagctggagatgtacccaccgctgaatcaaactctgtcgcaggaggtcgtcaatacccagctcgcccttgagagacaaaaaactgccgagaaggagcgcctgttccttgtgtatgccaaacaatggtggagagagtacctgcagattagaccgtcacataacagccgcctggtgaaaatcttcgcgcaggacgagaatggcatcaacaggcccgtttgcagctacgttaaacccctcagggcaggacgcttgctggatacacctcgtcaggctgcacggttcgtgaatgtccttggctatgagcgagcaccggttataggtggtggaggcaaacaggagcagtggtgtactctgctggcatttctgtgccggaacaagggggattgcgaagatcacgcaaatctgttgtgttcccttctcctaggatacgggttggaagcgtttgtatgcgtcggtacaaaagctaagggggtgccgcatgcatgggtgatgacctgcgggactgatggcgctattaccttttgggagtctctgaccgggcaccgttacatccacaagcctacaaatccagatgaaccgcctgtggcagaacagcctaaacccctctacccctacagaactatcggatgtgtcttcaaccaccagatgttcctcgggaactgtcagccttcggatgccgtagagacatgcgtctttgacttgaacgacgaatctaaatggaagccgatgtctgaggaggcaattaaatctgtgtgtgctcccggtgcgacgacatcattgcctcctttccctccattgtgtgccagcaccattgacgcaagtgtgacctccaatgaaatagagatgcagctgagactcctggtttcggaacaccgtaaggaccttgggctgacgaccgtttgggaggaccaattgtcttacctactttcacccgcactggcctcttacgaatttgagcgcaccacctctatcagcgccggaaatgaggagtttcaagacgccattaggcgggctgtgcccgacggccataccttcaagggattccctatccactttgtttatcggaacgctagacgcgctttcgcaacttgtcttcgttcccctttttgtgaggagatcatctgctgtaggggagaccaggtgaggctcgcggtaagggtgcgtgtctttacataccccgaatcggcgtgtgcggtgtggattatgtttgcctgcaagtataggtccgtgctgtag

SEQ ID NO: 27493 - DNA, 1500 bp, synthetic construct
  source 1..1500: mol_type = other DNA; note = Synthetic coding sequence
atgctggagaggccgccagccctcgctatgcccatgcctactgaggggacacccccacctttgtcaggtacaccaatcccagtgcccgcatatttccgccatgcggagccaggtttcagcttaaagagaccacggggtctctctcgctctctgccccctccacccccagcaaaaggaagcattccaatcagtagactcttccctccacggacccccggttggcatcaactgcagcccaggagagtgtcctttaggggggaggcttccgagacccttcagagtcccggttatgacccatcccgccctgaaagctttttccagcaatcctttcagaggttatctcggctgggacatgggagctacggcgaggtgttcaaggtccgaagtaaggaggatggtcgcctgtacgctgtgaagcggtctatgagcccatttagaggcccaaaagaccgagcgaggaaactagccgaagttggcagccacgaaaaagtggggcagcacccttgttgtgttaggttagaacaggcctgggaagaaggtgggatactgtacttgcagacggagctctgtggaccctcactccagcagcactgtgaagcatggggggcttctctgccagaggcacaagtgtggggttacctgcgggacaccctcctggcccttgcccacctgcacagtcagggtctcgtgcaccttgatgtgaagcctgcgaatatctttttgggtcctcgcggaagatgcaaattaggggactttggcctcctggtggaattgggcacagccggtgccggagaggtgcaagagggagaccctagatacatggcaccggaattgctgcagggcagttatggaactgccgctgacgtgttctctctgggactgacgattttggaggttgcgtgcaatatggaattacctcacggaggagagggctggcagcaactacggcaaggataccttcccccagaatttacggcaggcctcagcagcgagctaaggtcagtgttggtaatgatgttggaacctgacccaaaactgcgcgctacagcagaggctctgctagccctccctgtcctgcgtcaacctagggcctggggtgtgctgtggtgcatggccgcagaggcactaagtcggggttgggcactgtggcaggcgcttctcgcactactgtgttggctgtggcacggactcgctcatcctgcctcctggcttcagcctcttggacctcccgcaacaccgccagggagcccgccttgctccctcctgcttgactctagtctatcgagcaattgggacgacgattctcttggccctagtttgtccccagaagctgtgttggccaggacggttggttccactagtactcctagaagccgatgcacacctagggatgcgctcgatctctccgacatcaacagcgaacctcccagaggatctttcccgtcttttgagcccagaaacctcctgagcctgttcgaggataccctagatcccacctag

SEQ ID NO: 27494 - DNA, 486 bp, synthetic construct
  source 1..486: mol_type = other DNA; note = Synthetic coding sequence
atggatgtcttcctcatgataagacggcacaagacaactatattcaccgacgctaaggaatcttcaactgtctttgaattaaaaaggatcgtggagggtatcctgaaacggcctcctgatgagcaacggctttacaaggacgatcaacttctggatgacggcaaaacactgggcgaatgtggttttactagtcagaccgccagacctcaggcccctgctacagtaggtctcgcctttagggccgatgacaccttcgaggccctctgtatagagccgttcagctcgcctcccgaactcccggacgtaatgaaacctcaggattctgggagctccgccaacgaacaggccgtccatctccatgtgcactcacagaccatggcaaagtcacggaacacgtcatggtcacagtgccctggccttactgcttgcagcacacgggagccccaggatggacccacacaggtgcatccaagatgggggctgtag

SEQ ID NO: 27495 - DNA, 1521 bp, synthetic construct
  source 1..1521: mol_type = other DNA; note = Synthetic coding sequence
atgacaggggagaagataaggtccttgcgacgtgatcataagccttcgaaagaggaaggtgatctgctcgaaccgggtgatgaggaggcggcagctgccttaggcggaacttttacgagaagccgtatcggcaaaggtgggaaggcttgccacaaaatctttagcaaccaccaccatagactgcagttgaaagccgcaccagcctcatctaaccctcctggagcgcctgccctgccactgcacaatagcagtgtgacagctaattcacagtcaccagcactcctggccggtaccaatccagttgctgttgtggccgatgggggatcctgtcctgcacattaccccgtccatgagtgcgtatttaaaggagatgtccgtcgactgtcatccctgatccgaacccacaacatcggtcagaaagacaatcacggaaataccccccttcacctcgctgtaatgctggggaataaggtcactgcgctgctacggaagcttaagcaacaatctagggaaagtgtagaggagaaacgtccgcgattgttgaaagctcttaaagaactcggcgacttctacttggagttacactgggactttcagtcctgggtacccctgttgtcaaggattctgcccagcgatgcgtgcaagatttataagcaagggatcaatatacgccttgatacaactttgatcgatttcacagacatgaagtgccagcgcggagatctttctttcatcttcaacggtgacgccgctccatctgagtctttcgtggtcttagataacgagcagaaagtataccagagaatccaccatgaggagagtgagatggagacagaagaggaagtggacattctcatgtcatccgatatctattccgctacactgtcaacaaagagcatatcatttactcgagctcaaaccggttggctgttccgggaagacaaaaccgagcgcgtgggtaactttttggccgatttttatctggtgaatgggttggttttagaaagcaggaagcggagagaacacttgagcgaggaagacatcctccgcaataaggctatcatggaatccctgtctaaggggggaaatatcatggaacagaattttgagcccattcgcaggcagagcttgactcctcccccacaaaacacgatcacatgggaggagtacatctcagcagaaaatggtaaggctccacaccttggcagagagctagtctgcaaagaatctaagaagactttcaaggcaacaattgccatgagccaggagtttccactgggcatcgaactcctgcttaatgtgctggaggttgtcgccccatttaagcacttcaataaacttagagagttcgtccagatgaaactgcccccaggcttcccagtcaaactggatattccagtgttcccaacaatcacagcgacagtaactttccaggaattccgttatgatgagtttgacggcagtatcttcaccatccccgatgattataaagaagatccaagccgcttccccgatctgtag

SEQ ID NO: 27496 - DNA, 699 bp, synthetic construct
  source 1..699: mol_type = other DNA; note = Synthetic coding sequence
atgcaaccaccggcacctcctgccgaactggcagccccacttccaagcccactgccggagcagcccttggactccccagcagcgcctgcgttgtcaccatccggcttggggctgcagcccggtcctgagcgtacctcaaccaccaaaagcaaggagctgtccccaggttctgcccagaagggcagtcccggttccagccagggcactgcctgtgccggtacgcaacctggggcacagcctggtgcccagcctggagcttcgcccagccctagtcaacccccagcggaccaaagtccacataccctgcgcaaggtcagtaagaaactcgccccaattccacctaaagttccctttgggcagccaggagccatggctgaccagtcagccggacaaccgtccccggtgagtctgtcccctacacctccttccactccgtcaccttacgggctctcatatcctcagggatattctctagcctctgggcaactatcccccgctgccgctccacctctggcctcgccctctgtgttcacttccactttgagtaaatcccggcctacccctaagccgagacagagacctacgctcccaccaccccagcccccaactgttaatctgagcgcatcaagtccccagagcactgaggccccaatgctggatgggatgtcacctggagaaagtatgtcaacagcagtatag

SEQ ID NO: 27497 - DNA, 1221 bp, synthetic construct
  source 1..1221: mol_type = other DNA; note = Synthetic coding sequence
atgcatccagccgtgttcctgtccttgcctgatctgcgttgcagtttgctactactggtgacatgggttttcactcccgtgacaactgagattacttcgcttgacacagagaatatcgatgaaattctgaacaacgccgacgtcgccctggtgaacttctatgctgactggtgtcgattctcgcaaatgctccatccaatcttcgaggaggcttcagacgtaataaaggaagagttccccaacgagaatcaggtagtattcgccagagtggattgcgaccagcattccgacatcgctcagaggtatcgcatcagcaagtatcccaccttgaagctgttccggaacggaatgatgatgaaaagagaatatcgcggacagagatcagtaaaggcactggccgattacataagacagcagaaaagcgacccgatccaagagataagagatctggccgagattacaacactagatcggtctaaaaggaacatcatcgggtacttcgagcagaaagattcggataactatcgcgtttttgagcgggttgccaacatcctccatgatgattgtgcgttcctgtcggccttcggcgacgttagtaagcctgaacgttacagcggtgacaacataatatataagccccctggacactccgcacccgatatggtctatctcggggctatgactaactttgatgtgacttacaactggatccaggacaagtgcgtgccactggtgcgcgagatcactttcgagaacggagaagagctgacagaagaaggcttaccttttttaattttgtttcacatgaaggaggacacggaaagccttgaaatttttcaaaacgaggttgctcgacagctgattagcgagaaggggaccatcaattttttgcacgcagactgtgacaagtttcgtcaccccctgctgcacatccagaaaacacctgccgattgcccggtcattgctattgattcctttcgccatatgtacgtctttggcgattttaaggatgtgctcatccccggtaagcttaaacagtttgtcttcgacctacattctgggaagttgcacagggagttccaccacggacctgacccaacagacactgcccctggcgagcaagcacaggatgtagcctcctctcccccagaaagctctttccagaagcttgcaccgtcagaatatcgatataccctgctgagggatcgtgacgaactctag

SEQ ID NO: 27498 - DNA, 5601 bp, synthetic construct
  source 1..5601: mol_type = other DNA; note = Synthetic coding sequence
atggatcctgttggactgcagctgggaaataagaatttgtggagctgcctcgtgcgcttactgactaaagacccagaatggctgaacgctaagatgaagtttttcctgcccaacactgacctagactccaggaacgagactctggatccagaacaaagggtaattctgcagctgaacaaactccacgtacagggctccgacacctggcagtcttttattcattgcgtgtgtatgcagctcgaagtccctttagacctcgaggtcttgttgctcagcactttcggttacgatgacggcttcacaagccaactaggagccgaaggcaaaagtcaaccagaatcacaactccaccatggcctgaagaggccacatcagagttgtggctctagtccaaggaggaaacaatgcaagaagcaacagctggaattggcaaaaaaatatctgcaactgctgcggacatccgcgcagcagcggtacaggagccaaattccaggatctggtcagccccatgcctttcaccaagtgtacgttccccctattctgagaagggcaaccgcctctcttgataccccggaaggagccatcatgggggacgtgaaggtcgaagacggagccgatgtgagcatttcagatttattcaatactagagtgaacaaggggcctcgagttaccgtgctattgggcaaagctggaatgggcaagacaaccctggctcacaggttatgtcaaaagtgggctgaagggcatttaaattgttttcaagctctgtttctgtttgaattcagacagcttaacctgattacccgctttctaaccccatctgagcttcttttcgatttatatctgagtcctgagtctgatcatgacaccgtgttccagtacctggagaagaacgccgatcaggtcctcctgatcttcgacggtcttgatgaggctctgcagcccatgggacccgacgggccaggacccgtgttgaccttgttctctcacttgtgcaatgggacactgttgccagggtgtcgcgtgatggctacttccaggcccggtaagctgcctgcctgtctgcccgctgaagcggctatggtgcacatgttaggattcgacggaccgcgagtcgaagagtacgtgaatcatttctttagcgcccaaccttccagggagggagcgctggtggagctccagaccaacggacggcttcgttctttgtgcgctgtccctgcattgtgtcaagttgcttgcctctgcctgcatcacttgctgccagaccatgcccctggacagtcagtggccctgctgcccaatatgactcagctttacatgcagatggtgttggcgctgtcccccccaggccacctgccaactagctccctgctggacctcggggaagttgctctcaggggcctggaaaccgggaaggtgattttttatgccaaagacattgctccgcctctcattgcgtttggtgccactcacagcctgctgacttccttttgtgtatgcaccgggcctggccaccagcagacaggatatgctttcacacatttatccttgcaggagttccttgcagcactccacctcatggcatcacccaaagtgaacaaagacacactgacccagtacgtgacactacacagcaggtgggtgcagagaaccaaagcacggttgggactgagtgatcatctcccgacgttccttgcaggcctggccagctgtacatgcaggccctttttgagccatctggctcaaggcaatgaggattgtgtaggcgctaagcaagccgctgtcgtgcaggtactcaagaagttggccactcggaaactgacaggaccaaaggtcgtggagctctgtcattgcgtggacgagacacaggaaccagagttagccagcctgaccgctcaaagtctcccctaccaacttccatttcataatttcccattgacatgtacagatctggctacactgaccaatattttagagcatcgagaggcgccaattcatttggatttcgatgggtgcccccttgaacctcattgtccagaagcactggtgggatgtggtcagattgaaaacctctcatttaaatccagaaaatgtggtgacgcctttgcggaggccctctccagaagccttcctacaatgggcaggttgcagatgttaggactagctggcagcaagattactgctcgcggaatctcccacctggtgaaagcactgcctctttgccctcagttaaaggaggttagcttccgtgataatcagctgtcagatcaggtggttctcaatatcgtggaggtcttgcctcacttgcccagactgcgaaagctcgacctgtccagcaacagtatatgtgtcagtacactgctctgtctggccagggtagctgtgacatgtcctacagtgcgcatgctccaggcacgagaagctgatttgatctttctgctgagccctccaaccgagacaaccgcagaactccagcgtgctcctgatttacaggagtctgatggccaaagaaagggagcacaaagccgttctctgactcttaggctgcagaaatgccagttgcaggtgcacgatgcggaggcgttaatagccctactccaggaagggccacacctggaagaggtggatctcagcggtaaccaactggaagacgagggatgcagactgatggccgaggctgcgagccagctgcacatagccagaaagttagatctttcaaacaacggactttctgtggccggagtccactgtgtcttgcgcgcagttagtgcctgctggactctggcagaacttcacatttccctccagcacaagaccgtcatctttatgtttgcccaagagccggaggagcaaaagggtccccaggaaagagccgcttttctcgacagtcttatgcttcagatgcctagtgagctccccctatcctctcgcaggatgaggctcacacattgcggtctgcaagaaaagcacctggaacagctttgcaaggccctgggagggtcatgccacctgggtcatctccacctggactttagcgggaatgcactgggcgatgagggcgcagcccgattggcgcaactgctgcccggattgggcgcactccagagcctgaatttgtcagaaaatggactgagcctcgacgccgttctgggcctggtgaggtgtttctcaaccctacagtggctttttcgtcttgatattagctttgaatcccagcatattcttttaaggggggataagacctctcgggatatgtgggctacaggctctctgcctgatttcccagcggcagccaagtttctgggcttccgtcagagatgcatccccaggagtttgtgcctgagcgaatgcccactggagccgccatcactgacacggctgtgcgctaccctgaaggattgccccggaccactcgagctgcaactcagctgtgagttcctttcagatcaatctctcgagaccctgttggattgcttaccacaactcccacagctctccttactacagttgtcccaaaccgggctgagtccaaaaagtccattcctcttagctaatacactgtccctttgcccacgggtcaagaaggtggatctccggtctttacaccatgccacgctgcacttccggtccaatgaagaggaggaaggtgtgtgttgcggacgcttcacaggttgctccctgagccaggagcatgtggagagcttatgctggctgcttagcaaatgcaaggatttgtcacaagtggacctgtccgcaaacctgctcggtgactccggactgcgctgtcttttagaatgtctgccacaggtccctatctccgggttgctcgacctaagccacaattcgatttcccaagagagcgcactctacctgcttgagaccctgccctcgtgccccagggtgcgagaagcgtctgttaacttgggttccgagcaatccttcagaatccatttctctcgggaagatcaggcgggtaagacgctgcggctgtctgaatgctcatttagacctgagcacgtctcgagacttgccaccggactgtccaaatcgctccaactcaccgaattaaccctcactcagtgctgtttgggtcagaagcaactggcgatactactgagtctggtgggccgtcctgcaggcttgttttcgcttcgggtccaggaaccatgggctgatagagctcgcgtgctgagtttgctggaagtgtgtgcccaggcatccggctcggtcacggaaatttcaatctccgaaactcagcagcagctgtgcgtccaacttgaatttcccaggcaggaggagaaccctgaggccgttgcgctccgcctcgcccactgcgacctgggtgcccaccattcactgctagtgggccaactgatggaaacttgcgcccgtctccaacagttgtctctgtcacaggtgaacctgtgtgaggacgacgacgctagcagtctgctgctccagtcattgctgttgagcctttcagagctaaagacattcaggcttacgagctcctgtgtgtccactgaaggcctggctcacctggcttcagggcttggtcattgccatcacctggaggaattggacctctctaataaccagttcgacgaggaggggactaaggccctgatgagggctctagagggtaaatggatgcttaaacggttggaccttagccatctcttactgaattcatccacgctggcacttctgacacacaggttgagtcagatgacatgccttcagtccctaagattgaacaggaactctattggagatgttggttgttgtcacctgtccgaagccctacgtgctgccacgtcccttgaagaactcgatttgtctcacaatcagattggggacgccggtgttcagcatctggcgaccatcctcccgggtctacctgagctgaggaaaatcgatctgtctggcaactccatatcctccgccggtggcgtgcagctcgccgagtccttggtcctgtgccggagactagaagagctgatgctgggctgtaatgcactgggggaccccaccgctctgggcctggcacaggagttaccccagcatttacgcgttctgcacttgcccttcagtcacctgggacctgggggtgccctcagtctggctcaagccctcgatggttctccccacctcgaggaaatatctttggccgaaaataaccttgctggcggagtcttgaggttctgcatggaactgccactattgcgccagattgacctggtgagctgtaaaatagataaccaaactgcgaaattactgacttcctccttcacatcttgtcccgctcttgaggtaatactcttgagttggaatctcctgggcgatgaagcagccgcagagctagcccaagtcctgcctcagatggggaggttgaagcgggtggatctcgagaagaaccagattacagcgctgggcgcatggcttctggcagaaggtctggcccagggtagctctattcaagtgatacgcctctggaataaccctattccatgtgacatggcccaacatctgaagtctcaagaacccaggcttgatttcgcctttttcgataatcaaccccaagctccttgggggacataa

SEQ ID NO: 27499 - DNA, 897 bp, synthetic construct
  source 1..897: mol_type = other DNA; note = Synthetic coding sequence
atgatgaatgtgaacacaaggggtacttatctagcaagcaaggcctgcattccatacctgaagaagagcaaagtggctcatattcttaatatcagccctcctctgaacttaaacccagtgtggtttaagcaacactgcgcttataccattgctaagtatggtatgtctatgtacgtgctcgggatggcagaggaattcaaaggggaaatcgctgtgaacgcgctatggccaaaaacggccatacacacagccgcaatggacatgctgggcggacccggaatcgaatctcaatgcagaaaggtcgatattatcgcggacgctgcttatagcatctttcaaaagccaaaatcgttcactgggaactttgtgatcgatgagaatatactgaaagaggagggcattgaaaattttgatgtctatgccattaagcctgggcatccgctgcagcctgatttcttcttggacgaataccctgaagcggtttccaaaaaggtggagtctacaggcgcagtgcccgagttcaaggaggagaagttgcagttgcaaccaaagcctcggagtggcgcagttgaagagacatttcggatcgtgaaagatagtctgagcgatgacgtggttaaagcaacccaggccatttacttatttgaactgtccggagaagatggtgggacctggtttcttgacctcaagagcaaggggggaaatgtcggctacggagagccaagtgaccaggccgatgtggttatgtcaatgacaaccgacgatttcgtcaagatgtttagcggcaaactcaagcctaccatggccttcatgagcgggaagctgaaaatcaagggtaacatggcattagctattaaattagagaagctcatgaatcagatgaacgcgagactgtag

SEQ ID NO: 27500 - DNA, 4026 bp, synthetic construct
  source 1..4026: mol_type = other DNA; note = Synthetic coding sequence
atgtggagacgaaaacaccccagaacatcaggtggtactcgcggtgtcctaagtgggaatcgaggcgtggagtacggcagcggtcgcggacacttggggacattcgagggacggtggcgtaagcttccaaagatgcccgaagccgtgggcacagacccgtccacgtctaggaaaatggccgagctggaagaggttacactcgacggcaaacctctgcaggccttgagggtcacagatctaaaggctgctctggagcagcggggtctggcgaaaagcggtcaaaaaagcgccctggttaagcgcttgaaaggggctctaatgctcgagaatctgcagaagcattctacgccccatgctgcgtttcaacctaattcccagataggcgaggagatgtcccaaaattctttcataaaacaatacctggagaagcaacaggagctgttaaggcagcgcctcgagcgcgaagctcgtgaagccgcagagctcgaggaggcttcggcagaatctgaggacgaaatgatccaccctgagggggtcgccagcctgctgccgccagactttcagtcaagcctcgagagaccagagctagagctctcccgtcacagtccccgaaaaagcagtagcatatctgaggagaagggtgactccgatgacgagaagccccgaaagggggaaagacgctcgtcaagggtcagacaagcccgagccgcaaaattgagcgaaggcagccagcctgctgaagaagaggaggaccaggagaccccttcccgcaacctgcgggtaagggcagacagaaacctgaaaaccgaggaagaagaagaggaagaagaggaagaggaggaggacgatgaggaagaggagggggatgacgagggccagaagtcaagggaggctccaattctgaaagaatttaaggaagagggggaggagataccccgagttaaacccgaagagatgatggatgagcgccctaaaacccgttcccaggagcaggaagttctggaaaggggaggccgttttacgaggtcccaggaggaggcccgaaaatcacacctggcacggcagcagcaagagaaggagatgaagacaactagtccgttggaggaggaagagagagaaatcaagtcctcccaggggttgaaggagaagtctaagtcccccagcccaccacgcctaaccgaggaccgcaaaaaggccagtctggtggcactgccagaacagactgcctctgaagaggagacaccgccaccactgttaaccaaagaagctagctccccccctcctcacccacagttgcatagcgaggaggagatcgaaccaatggaaggacccgcaccagccgttttgatccaactcagccctcctaacaccgatgccgacacccgggagttgttagtcagccaacacactgtgcagctagtcggagggctgtccccactctcttctccgtctgacacaaaagctgaatccccagccgagaaggtccctgaagagtccgtgttgcccctcgttcagaagagtaccttagctgactattctgcccagaaagacctcgaacccgaaagcgataggagcgcacagccgctccctctgaaaatagaagagctagctttggcaaagggcatcacagaggaatgcttgaaacaacccagtctggagcagaaagaggggaggagggcatctcacactctgttgcctagccatcggttgaaacaatccgcggatagttcgtcctccaggtcttcttccagctcttctagttcttccaggagtcgctcaagatccccggatagttctggctcccgctcacacagtccccttcgaagtaaacagcgggatgtggcccaagctcgcactcatgctaatcccagagggagacccaaaatggggtcacggagcacaagtgaatcaaggagcagatccaggtctcgatcccggagcgcctcaagtaactcacgcaaatccctgtctcctggcgtgagtcgagactcatcaactagctacaccgaaactaaagacccaagtagtggacaggaggtagccaccccccctgtacctcaattacaggtgtgtgagcctaaggagcggacctcaacctccagtagcagtgtgcaggcgcgacgcttaagtcagccagagtccgccgaaaagcacgttacacagcggctgcagcccgaacggggttctcccaagaaatgtgaagccgaagaagccgagcctcccgcagccacccagccccagacttcagaaactcagacatcacatctcccagaatctgagcgcatacatcacaccgtggaggaaaaggaagaagttactatggacacctccgaaaaccggccagaaaacgatgtaccagagcctccaatgcccatagctgaccaagtgtcaaatgatgatcgccctgagggttccgttgaagacgaagagaagaaggagtctagcctgcccaagtccttcaaaagaaaaatcagcgtggtgtcagccaccaagggagtcccagcagggaacagcgatactgaaggcggacagcccggaaggaaaagaagatggggggcaagcacggccaccacacagaagaagccatccatctcaataaccaccgaaagcctcaagtctttaataccagatatcaagcccctagcaggccaggaggctgtggtggacctgcacgccgatgactccagaatatcagaggacgagaccgagaggaatggggacgatggcacacacgataaaggtctcaaaatctgtcggaccgtcacccaagtggtgcccgctgagggacaggaaaacggtcaacgagaggaagaggaggaggagaaggagccggaagcggaacccccagtgcccccacaagtctcagtggaggtggccctacctccgccagccgaacatgaggtgaagaaagtgacactgggggataccttaactaggaggtctatcagtcagcagaaatctggtgtctccattactatcgacgatcccgtcagaaccgcacaggttcccagtcctccacggggaaagattagcaatattgtccacataagcaatctggtgcggccttttaccctgggccaactaaaagagctcctgggaagaacaggcactctggtggaagaggccttctggatcgataagattaaatctcactgttttgtgacgtactcgaccgtcgaagaagccgtggcaaccagaaccgccttacacggcgtgaagtggccacagagtaatccgaaatttctctgtgcagattatgcagagcaagacgagctggactatcacagagggctgctggtcgaccgcccaagcgaaaccaaaactgaggagcagggtatcccccgacctttgcacccgccaccgcctccgcctgtccagcccccacagcacccgagggcagaacagcgggagcaagagcgagctgtccgggaacagtgggctgagagggagcgcgaaatggaaaggagagagaggaccaggtccgagagagagtgggacagggacaaagtgagggaagggccaagatctcggagtaggtcgagagaccgcaggcggaaagagagagccaagagcaaggaaaagaagtccgaaaaaaaagaaaaggcacaggaagagcccccagctaagttactggatgacttatttcggaagaccaaagccgctccgtgcatatactggctgccactgaccgatagtcagatcgttcagaaagaggctgaacgcgcagagagagccaaagagagggagaaacgacggaaggagcaggaggaagaggaacagaaagagagggagaaggaagctgagagagagcggaacagacagctggagagagaaaaaagaagagagcattctcgtgagcgggatcgcgagagagagcgggagcgggaacgcgacagaggagaccgggatcgtgacagagaaagagatcgcgagaggggacgcgagcgtgataggagggataccaagcggcattcccgatctcgatccagatctacaccagtgagagaccgcggtgggcgaaggtag

SEQ ID NO: 27501 - DNA, 600 bp, synthetic construct
  source 1..600: mol_type = other DNA; note = Synthetic coding sequence
atgtcttctggtaacgctaaaatcgggcacccggctcctaacttcaaggcaacggctgttatgcctgatggtcagttcaaagatatcagcctttcagattacaaaggcaagtacgtggtctttttcttctatccccttgatttcaccttcgtctgcccgaccgagatcatcgctttctctgaccgggctgaagagtttaagaaactcaactgtcaggtgatcggggcttcggtcgacagtcacttttgccatctggcctgggtcaacactccgaaaaagcaagggggtttgggcccaatgaatattcctctggtctccgatccgaagagaaccattgcccaggattatggcgttttgaaagccgatgaggggatctcttttcgagggctattcattatcgatgacaaaggcattctccgtcagatcacggtcaacgacctccccgtgggtcggagcgtcgacgaaacactgcggctggtccaggctttccagttcaccgataagcatggtgaagtttgccctgctggatggaagccaggcagcgatacaataaagcctgatgtccagaaatccaaggaatacttctccaagcaaaaatag

SEQ ID NO: 27502 - DNA, 1077 bp, synthetic construct
  source 1..1077: mol_type = other DNA; note = Synthetic coding sequence
atggaaaagaagaagatggtcacacaagggaaccaagagccaacaacgacaccagacgcaatggtgcagcccttcactaccatcccgttccccccacccccacagaatgggattcccaccgaatatggtgtcccccacacccaggattatgccggacagaccggagagcataacttgaccctatacggctctacccaggcgcacggcgagcagagtagtaacagccctagtacccaaaatggctctctcaccaccgaagggggagcccagactgacggacaacagtcgcaaacacagagcagcgagaactcggagtctaagtcaacacccaagcggctgcatgtctcaaacattcctttccgtttccgggacccagatctgcgccagatgtttgggggattcggctttgtcacgtttgaaaactctgcggatgctgacagggccagagagaagctgcatggcacagtggtggaagggaggaaaattgaggtgaataacgccaccgcccgtgtgatgactaataaaaagatggtgacgccctacgctaatggctggaagctgagtcccgtggtgggtgctgtatatggtccagaactgtacgctgcaagttcatttcaagccgatgtctcactagggaatgatgcagcggttcccctatcggggaggggaggcattaatacctatatccccttgataatcccgggatttccgtatccaactgcagccacgactgccgcagcgtttcggggtgcccaccttaggggtagaggacggacagtgtacggtgccgtgcgggctgtcccccctacagcaatccccgcatacccgggagtcgtgtaccaagatgggttctacggtgccgatctctatggaggctatgctgcatataggtacgcacagcctgccaccgccaccgccgctacagcagctgcagctgccgctgccgcttattcagacggctatgggagagtgtacacagctgatccttaccacgccttggcaccggctgcgtcatacggtgtaggggctgtggcatcactgtacaggggcggatatagcaggttcgctccctattag

SEQ ID NO: 27503 - DNA, 1596 bp, synthetic construct
  source 1..1596: mol_type = other DNA; note = Synthetic coding sequence
atgagctatccagccgatgattatgaatctgaggccgcatatgacccgtacgcatacccctcagattacgatatgcatactggtgacccaaagcaggacttggcctatgagagacagtatgagcagcaaacataccaggtgatccctgaggtgattaagaacttcattcagtattttcacaaaaccgtgtccgacctcattgatcagaaggtttatgagctccaggcctcgagggtcagcagtgatgtgattgatcagaaggtatacgagatccaagacatttatgaaaattcttggacgaagctgacagaaaggttttttaagaacactccatggccagaggccgaggctatcgctccccaagtagggaacgatgctgtgttcctgatcctgtacaagattcttcaggcccacggacccgcaccgttggaacttcctaatcaatggctgtgggatataatcgacgaattcatctatcaattccagtcgttctcccagtaccgctgcaaaaccgcgaaaaagtcagaggaggaaatcgatttcctaaggagtaatccaaagatctggaacgttcattccgtgctgaatgttctacacagtctagtggacaagagtaacattaaccgccaactggaagtgtatactagtgggggagatcctgagtccgttgcaggagagtacggccgacattcgctctacaagatgttaggctatttctcgctcgtggggctgctgcggctgcattcactgctgggtgactactaccaggccatcaaggttttggagaatatcgaacttaataaaaagagcatgtactcccgcgttcctgagtgtcaagttactacctactactatgtcggttttgcttacctgatgatgagacgctaccaggacgctattagggtcttcgccaacatactcttatacattcagcggacaaaaagcatgtttcagaggactacctacaaatacgagatgatcaacaaacagaacgagcagatgcacgctttgcttgctatagccctaactatgtatcccatgcgtattgatgagagcatccacctccagctgcgggagaaatatggggataaaatgctgcggatgcagaaaggtgacccacaggtctacgaggaacttttcagttattcttgcccgaaatttctcagccccgtcgtcccaaactacgataacgtccacccgaattaccataaggaacccttcctacaacaactaaaagtgttcagtgatgaagtgcaacagcaggcacagctcagtaccataaggagcttcttaaagctgtataccactatgcctgtcgccaaactggccggttttcttgatctgacagaacaggagtttcgcatccagctgctggttttcaagcacaagatgaaaaaccttgtgtggacctccggcatctctgctctcgatggggaatttcagagcgctagcgaggttgatttttatatagataaggacatgatacacattgccgacactaaggtcgcccgaagatatggcgattttttcatacggcagatccacaaatttgaggaactgaatcggacgctcaaaaagatgggccagcggccatag

SEQ ID NO: 27504 - DNA, 5952 bp, synthetic construct
  source 1..5952: mol_type = other DNA; note = Synthetic coding sequence
atgagtgggaataaacgagggtctagagcatcttgtcctcaccggggagctgagtgtctgctgccatgggccgctttaaaccttcaggggttccagttgctattacttcaccccagcgcaacagccatgatggacgtgtccgaactgggagagagcgcaagatatttacggcagggctaccaagagatgactaaggtgcacacaatcccatgggatggaaaaaagcgcgtgtgggtcccggacgagcaggacgcctacgtagaggcggaggtgaaatcagaagccacagggggacgcgtgaccgtggaaacaaaggatcagaaggttctgatggttcgggaggctgagcttcagcccatgaatccaccacgattcgacctgcttgaagatatggcaatgatgactcacttgaacgaggcctccgtgctgcataatttgagacagcgctacgcaagatggatgatctatacatatagcggtcttttctgcgtcaccatcaacccctataaatggttacccgtctacaccgcctcagtcgtggcagcatataaggggaagcgtaggtcggactcaccccctcatatttacgcagtggccgataacgcctacaacgatatgcttcgcaatagggataatcagagcatgcttataactggcgaaagtggcgctggtaaaaccgttaacactaaacgggtcatccagtactttgcaatagtggctgccctgggggacggccctggcaagaaagctcaattcctcgccaccaaaaccggcggtacccttgaagaccagataatcgaggcaaacccagctatggaagcctttggcaacgctaaaaccctccgaaatgataacagcagtcgcttcggaaaattcatccggatacattttggccctagtgggaagctggcctctgctgacatcgattcctatttgttggagaagtcccgagtgattttccaattacctggcgagcggtcatatcatgtgtactatcaaatactgtctgggagaaagccggagctacaggatatgttgctgctgtctatgaacccctacgactaccatttttgtagtcaaggagtgattaccgttgacaacatgaacgatggcgaggagctcatagccacagaccacgccatggatatactcggcttcagtgtggatgagaaatgcgcctgttacaaaattgtcggtgctcttctacatttcggaaatatgaaatttaaacaaaaacagagggaagaacaggccgaggccgatgggaccgaaagtgctgacaaggccgcatacctcatgggagtgtccagcggtgatttgttaaagggactgctgcatccgagagtgagggtcggtaacgagtacgtcaccaagggacagtctgtcgagcaggtggttttcgcagtcggagccctggcaaaggctacctatgataggctctttcggtggctagtgagccgaattaatcaaaccctggacacaaaattaccgagacaattctttattggcgtgttggatatcgcagggttcgagatcttcgaattcaatagctttgaacaactgtgcattaatttcaccaacgagaagttgcagcagttttttaatcagcacatgtttgttctagaacaagaggagtataagagggagggaatagactgggtttttatcgacttcggattggatttgcaaccatgcattgacttaattgagaaacccctgggcatcctcagcatccttgaagaggagtgtatgtttccaaaagcgtcagacgccagctttcgagcaaaactgtatgacaatcacgcaggcaagtcgcctaactttcagcaacccaggccggataaaaaaagaaaataccaggcccatttcgaagttgtgcactatgccggtgtggtgccttactcaatcgttggatggttggagaagaacaaagatcctctgaatgagactgtggtgcccatctttcagaaatcgcagaatcgcctgttagcaactctatacgaaaactatgcaggttcatgtagcactgagccccctaaaagcggggtgaaagagaagaggaagaaagccgcaagctttcagacagtcagtcaactccataaagaaaatctcaataaactgatgactaatttacgtgcaacccagccacacttcgtgagatgtattgttccaaacgagaacaagactccaggcgttatggatgcctttctagtcctccaccagctgagatgcaatggtgtgttggaaggcatacgaatctgcaggcagggctttccaaataggctactgtataccgacttccgacagagatatagaattctgaatccctccgccatcccggatgatacgttcatggactcccgcaaagcaacagagaagctgcttggttcattagacttggatcacacccaatatcaattcgggcacaccaaggtttttttcaaggccggactgctaggcgttctagaagaattaagagaccagcgcctggcgaaggtactgaccctcttgcaggcgaggtccaggggacgcctgatgcggctggagtaccagagactcttgggagggagggacgctctcttcaccatccaatggaacattagggccttcaacgccgttaaaaattggtcttggatgaaactgtttttcaaaatgaagcccttactaaggagcgcccaagctgaggaggaactcgcagctctgagagccgaactgagaggcttacgaggtgcgctcgccgcagctgaggccaaacgccaggagctggaggagacacatgtgtccataacccaggagaaaaacgatctggctcttcaattgcaggccgagcaggataatctggctgacgctgaggaacgttgccacctcctgattaagagcaaggtccaactggagggtaaggtgaaagagctgagcgagagattggaggacgaggaggaggtgaatgcggacctggccgctcgtagaagaaagctggaagatgagtgtacagaacttaagaaggatatcgatgacctaaaactgacacttgccaaagccgaaaaggagaaacaggcaacggaaaataaggtaaaaaatctgacggaggaaatggccgcactggacgagagcgttgctagactgacaaaggagaagaaagcactgcaagaggcacaccaacaggcactcggcgacctgcaggccgaagaggatcgcgtgtctgcgctcacaaaggccaagcttcgtctggagcagcaggtggaggatcttgagtgttcactcgaacaggagaagaagctgaggatggacaccgagagggcaaaaagaaaattggagggcgatctgaagttgacccaagagagtgtggctgatgccgcacaggataaacaacagttagaagagaagctgaagaaaaaagattcagagctgtcccagctctccctcagggtggaagacgaacaactgctaggagcccagatgcaaaagaagattaaggaactgcaggctcgagccgaggaactggaggaagagctcgaggcagagagggctgctcgtgccagagtggagaaacagcgcgctgaggccgcacgagaactcgaggaactgtccgaacgcctggaggaagcagggggagccagtgcagggcaacgcgagggatgcagaaaacgcgaagccgaacttggcaggctgaggcgcgagttagaggaagctgcactaagacacgaagcaacggtggcagccttgaggcggaagcaagctgagggggctgccgagctgggcgagcaggtcgattccttgcagcgggttcgccagaagttagaaaaagaaaagagcgaacttcgcatggaggtcgatgacttggctgcgaatgtcgaaactctcacccgtgcgaaagccagcgcagagaaactgtgtcgaacatacgaagaccagctcagtgaagccaaaatcaaagtagaggagcttcagcgacagttggccgacgcgtcgacccagagagggagattgcagactgagtctggagaactctcccgcctcctggaagagaaagaatgtctcatttcgcagctgtcgcggggtaaggctctggctgcccagtccctcgaggagctgaggaggcagttggaagaggagtccaaagccaagagcgctctcgcacacgccgttcaggcactgaggcacgactgcgacctcctgcgcgaacagcacgaggaggaggccgaggcccaggcagagctgcagagactgctcagcaaggccaatgccgaagtcgcacagtggaggtctaagtatgaagccgatgcaattcagcgaacagaggaactggaggaggccaaaaagaagttagctctgaggctgcaggaggctgaggaaggtgtggaagccgcaaatgccaagtgcagtagtcttgagaaagccaagctacgcttgcagacagagtctgaggatgtgaccttggagcttgagcgggctacaagcgctgccgcagccttagataagaaacaacgacatctcgagagagcgctggaagaacgacggcgacaggaggaggagatgcagcgcgagctggaagctgcacagcgggagtccagaggactgggaacagaactattccgcctgaggcacggacacgaggaggccctggaagccctcgagaccctgaagcgagagaacaagaatctgcaggaagagatctcagacctgactgaccaagtctctctttccggcaaatcaatccaggaacttgaaaagactaaaaaagcactcgaaggggagaagagcgagatacaggccgctctggaggaagcggaaggcgctctggagctcgaggagaccaagaccctgcgaatccaactggaactctcccaggtaaaagccgaggtggatcggaagcttgctgaaaaggacgaggaatgtgccaacctgagaaggaaccatcaacgtgccgttgagtcccttcaggcatcactggacgccgagacaagagcccgaaacgaggccctaaggctgaagaagaaaatggagggcgatcttaatgaccttgaattgcaactgggacatgccacacggcaggctacagaggcgcaggccgctactaggctcatgcaagcacaactgaaagaagagcaggccggtcgcgacgaagagcagcgcctggctgcagagcttcatgaacaggctcaggctctggagcggagagccagtttgctggccgcagaactagaggaattaagggccgctctcgaacagggagagagatcacgcagattagcagaacaggagctgctggaagccaccgaacggttgaacctcctgcacagccagaataccgggctgctgaaccaaaaaaaaaaattagaggccgatctggcgcagctcagcggagaggtggaagaagccgcacaggaacgacgcgaagcggaagagaaagctaaaaaggccatcactgacgccgctatgatggccgaggagctgaaaaaggaacaggatacgagtgcacatctagagcgtatgaaaaagacactcgaacagaccgtcagggagttacaagcacggctggaagaggccgagcaagccgcactgcgcggaggcaaaaagcaggtccagaaacttgaagctaaagttcgcgaactcgaggctgagctcgatgccgagcagaagaaacatgccgaggctctgaagggcgtccgcaaacacgaacgaagggtgaaagagctggcctaccaggccgaggaggatcgcaagaacctcgcacggatgcaagatctggtcgataagctccagtcaaaggtgaaatcatataaacgtcagtttgaagaggcggagcagcaagctaatacaaacttggcaaaataccggaaggctcagcacgagctcgacgatgctgaggagagggccgacatggcagagacccaagcaaataagctgcgggctagaactcgggatgccttaggtcctaagcataaagagtaa

SEQ ID NO: 27505 - DNA, 2730 bp, synthetic construct
  source 1..2730: mol_type = other DNA; note = Synthetic coding sequence
atggaaagagccatggagcagctgaatcggttgactcgctccctgaggagggcacgcacagtggagctccctgaggataacgaaacagctgtttacactctcatgccaatggttatggcagatcagcaccggtcggtcagcgaactactctcaaatagtaagtttgatgtcaactacgcgtttgggcgtgtgaaaaggtccttgctacatattgcagccaattgtggcagtgtggaatgccttgtgctgctacttaagaaaggagcaaaccctaactaccaggatatttctggctgcactcctctccacctcgccgctagaaatggtcaaaaaaaatgtatgtccaaactgcttgagtattccgctgacgtgaacatatgcaacaatgagggacttacggcaatacattggttggccgtcaacggaagaacagagctgctgcacgacctcgtgcagcacgtgagcgatgttgatgttgaagacgccatggggcagactgctctccacgtggcatgccagaacggacataagacgacagtgcagtgcttgttggacagcggggcagacattaaccgtccgaatgtctcaggggcaacacctctgtattttgcatgtagtcacggtcaacgcgatacagctcaaatcttactgctgcgtggggctaagtatctgcctgacaaaaatggtgttacgcctctagatctgtgtgtgcagggcggttacggtgaaacttgcgaggtgttgatccagtaccacccacggttgttccagacaatcatccagatgacgcagaacgaggatctaagggaaaacatgctgcgacaggttcttgaacacttgagtcaacagtcagaaagccaatacttgaagatccttacctcactggcggaggttgccaccactaatgggcataagttgctgtcactgagtagcaattacgatgcgcagatgaaatccctgctgcgcattgttcggatgttctgccacgtgtttaggatcggaccttcctccccctccaatggtatagatatgggttataacgggaacaagacccctcgatcccaggtgtttaaacccctggagctcttatggcactcccttgacgagtggctggtgctcatagccacggagctgatgaaaaataagagggactccaccgagataacttctatcctcctgaagcagaaaggacaggaccaggatgcagcaagcatcccacctttcgaaccacccggacccggatcttatgagaatctgtccacaggaaccagggagtcgaagcctgatgcattagctgggcgtcaggaggcaagcgcagactgtcaagacgtgatatctatgacggctaacagactgtcagcagtcatacaggccttctatatgtgttgtagttgtcagatgccccctgggatgacgtctccacgcttcattgaatttgtgtgtaagcacgatgaggtcctgaaatgtttcgtaaatcgcaatccaaaaatcattttcgaccattttcactttctgctggagtgtcctgagctgatgtcccggttcatgcatattatcaaggcccagccctttaaggatcgctgtgagtggttttacgagcatctgcatagtgggcagcccgattcggacatggtacatcgaccagtgaacgagaatgacatcctgctggtgcatagggatagtattttcagaagttcatgtgaggtggtgtcaaaggctaactgtgcgaaacttaaacagggtatcgcagtgcggtttcacggcgaggagggcatgggacaaggagtggttagggagtggttcgacattttgagcaatgagatcgtgaaccctgactacgcactcttcacccaatccgccgatggaacaacatttcagccaaactctaattcttatgtaaatcctgaccacctcaattacttcaggtttgccggtcagattctgggcttggccttgaaccatcgacaacttgtgaatatctacttcactcggtccttctacaagcacatactcggtatccccgttaattaccaagacgtggcttctattgaccctgagtatgctaaaaatctgcagtggattctcgataacgatatcagcgacctgggcctggaattgacgttctccgtggagaccgatgtgtttggagcgatggaagaggtccccctgaagcccggagggggatcaattctcgtgactcaaaacaacaaagccgaatacgtgcagttggtcactgaattaagaatgaccagagcgatccagcctcagataaacgctttcctccagggattccacatgttcatcccaccatctctcatccagttgttcgatgaatacgaattagagctcctgttgagtggaatgcctgagattgatgtttccgattggataaagaacaccgagtatacatcaggatatgagcgtgaagatcccgttatccagtggttctgggaggtcgttgaggatatcacccaggaagagcgcgtcctactccttcagttcgtgactggcagctctcgtgttcctcatggtgggtttgctaacataatgggtggcagtgggctgcagaactttaccattgccgctgttccatatacccctaacttgctgcccacctcctccacttgtatcaacatgctgaaattgcccgaatatccctccaaagagatactgaaagataggctcctagttgcacttcactgcgggagctacgggtacactatggcctag

SEQ ID NO: 27506 - DNA, 2679 bp, synthetic construct
  source 1..2679: mol_type = other DNA; note = Synthetic coding sequence
atgcgaaaggtgaagaaactgcgcctcgataaagaaaatactggatcctggcggtcgttttctctgaattccgagggggctgagcgcatggccacaactggcacacccaccgctgatagaggggatgcagccgctacggatgaccccgcagcaaggttccaagtgcagaagcatagctgggatggactacgttcaatcattcacggttcccgaaaatattctgggctcatcgtgaacaaggctcctcatgactttcaattcgttcagaagactgacgaaagtggaccacacagtcacaggttgtactaccttggaatgccgtatggctctcgagagaattctttactctacagtgagattcctaagaaggtgcgcaaggaggcactcctgctactatcctggaagcagatgttagatcactttcaagccacaccgcaccatggagtgtattcccgggaagaggagctgctccgcgagagaaagcgcctgggcgtgttcggcattacatcatacgattttcactctgagtcgggactgttcctcttccaggcctcgaatagcctgtttcattgtcgagacgggggaaaaaatggatttatggtaagtcccatgaaacccttggaaatcaaaacccagtgctcgggtcctcgcatggacccgaagatttgccccgcagacccagctttcttcagttttattaataactcagacctgtgggtcgctaatatagagacaggagaggagcgcaggctaaccttctgccaccaaggactgtcgaatgtcctggatgatcccaagtcagccggagtggcgactttcgtgatccaggaagagttcgatcgattcaccggatattggtggtgcccaaccgcctcatgggaaggtagtgaaggcctgaaaacactcagaatcctgtacgaggaagtggacgaaagcgaggtcgaagtcatccatgtccccagtcctgcgcttgaggagcgaaaaacagactcataccgttatcctaggactggatccaagaatcccaaaatcgcccttaaactcgctgaattccagactgattcacaaggtaagatcgtctctacgcaggaaaaagaactggtgcagcctttcagttccctattcccgaaagttgagtacatcgccagagccggatggacacgcgacggcaaatacgcatgggcgatgttcctcgaccgaccacagcagtggttacagttggtgttactgcctcctgctctgttcatcccgagcaccgagaatgaggagcagcgtctcgctagtgccagggcggtccctcgcaacgtccagccatacgtcgtgtatgaggaggtgacgaacgtttggatcaatgttcacgatatcttctatcctttcccacagtccgaaggcgaggacgagctatgctttttgcgtgcaaatgagtgtaaaaccggattttgtcacctctataaggttaccgccgtccttaaatctcagggttatgactggtcagaacccttttcccccggtgaagacgaatttaaatgtcctattaaggaggaaatcgccttaacatcaggagaatgggaggttctcgcccgacacggttccaagatatgggtcaatgaggaaacgaagttggtgtattttcagggcacaaaagacacaccactagaacaccacttgtatgtggtgagctacgaggcggcaggcgagatcgtgcgcctgacgactccaggatttagccactcctgtagcatgtcacagaactttgacatgttcgtatcccactatagtagtgtgtcaacccccccatgcgtacatgtctataagctctcgggcccagacgatgacccactccacaagcagcccagattctgggcctccatgatggaggctgcttcatgtccccctgattatgtgccgcctgaaatcttccactttcacacgaggtctgatgtcagactgtatggcatgatttacaagccacacgctctgcaaccaggaaagaaacatccgaccgtcctgttcgtctatggtggaccacaggtgcagcttgttaataacagttttaaggggataaagtacctgagactgaacacgctcgcctcattgggatatgcagtggtggtgattgatgggagaggaagttgccagcgtggcctcaggtttgagggtgctctcaagaatcagatgggccaagtcgagattgaggaccaggtggaaggcttgcagtttgtagcggagaaatacgggtttatcgatctttcccgggtggcgatccatggctggtcatatggtggctttctctcactcatgggtctcatccataaaccccaagtatttaaagtcgctatcgcgggagcccctgtgacggtttggatggcctacgatacgggatatactgagcgttacatggacgtgcccgagaataaccagcacgggtacgaagccggaagtgtagccctccatgttgaaaaactgcctaacgaacctaacaggctccttatcctgcacggtttcctggatgagaacgtacattttttccacactaactttctcgtgtcgcagcttatcagagccggaaaaccttatcaactgcaaatctacccgaacgagcgtcattctattcggtgtccggaaagcggagagcattatgaagtgacactgctgcactttctacaagaatacctctag

SEQ ID NO: 27507 - DNA, 1533 bp, synthetic construct
  source 1..1533: mol_type = other DNA; note = Synthetic coding sequence
atggctgccgaactggtagaggccaaaaacatggtcatgagctttcgggtgtcggacctgcaaatgctactcgggtttgtcgggcgatcaaagagcggcctgaagcacgaactggttactagggcccttcagctcgttcagttcgactgttctcccgaacttttcaagaaaatcaaggaattatacgagacccgttacgctaagaaaaattccgaacctgctccccagccccacagacccctggatcctctgaccatgcattccacctacgatcgcgcaggggctgtgccacgaacgccgctcgctggccctaatattgattaccccgtgctgtacggtaagtacctcaacggactgggacggcttcctgctaagaccctgaagcccgaagtccgcctcgtcaaactgccgttcttcaatatgctggacgaactcctgaagccgacagagctagttcctcaaaacaacgagaaacttcaagaaagcccatgtatattcgcactaacacccaggcaggtggaacttatcaggaatagccgagagctgcaaccgggtgttaaggcggtgcaggtggtgcttcgaatatgttacagtgacaccagttgcccacaagaggaccagtatccaccaaacattgctgtgaaagtgaaccactcctattgctccgttccaggctattacccatctaacaagcctggtgtggagcccaaacgcccatgtaggcccattaacctgacacacttgatgtacctctctagtgccacaaacagaatcacagtcacatggggtaactacggaaagagctacagtgtggcattgtatttggttcggcaactgacgagctccgagctcctgcagaggctaaaaaccatcggagtgaaacaccctgagctgtgtaaggcccttgtaaaggagaagctgagactagaccctgactcagaaatagcaacaacaggagttagagtgagcttgatatgtcccctggtgaagatgcgcctgtcagtcccctgccgggcagaaacttgcgcccaccttcagtgctttgatgctgttttctacctgcaaatgaacgaaaagaagcccacctggatgtgccctgtatgtgacaagcctgccccttacgaccaactgataattgatggtctgctttccaagattctgtctgagtgcgaagacgcagatgagattgagtatttggtggacggcagctggtgtcctattcgtgcagaaaaggaaaggtcatgttctccccagggggctattctggtgctgggcccatctgatgcaaatgggctgttgcccgctccttcagtaaatgggtctggagccctgggatcaactggaggaggaggccctgtgggcagcatggaaaatggcaagccaggcgctgatgttgtggacctcactctggactcttcaagttccagcgaagatgaggaggaagaggaagaggaggaggaagacgaggacgaggaggggcctcgacctaaaaggaggtgcccatttcagaagggcctggtgcccgcttgttag

SEQ ID NO: 27508 - DNA, 684 bp, synthetic construct
  source 1..684: mol_type = other DNA; note = Synthetic coding sequence
atggcagcccagcggcctttgagagtgctgtgcttggcgggattccgccagtccgagcgcggtttcagggagaagacgggggctctgcgcaaggccttgcggggtagggccgaattagtttgtctgtctgggccacacccagtaccagatcctcccggtcccgagggggcacgctccgacttcggaagctgtcctccagaagagcaacctagaggctggtggttttctgaacaagaggctgacgtcttcagtgccttggaggagccagccgtctgcagaggtctggaagagtcgttaggcatggtggctcaggcactgaacaggctaggtccgttcgatggactgcttggtttctctcagggcgctgctctggctgccctggtctgtgccctaggtcaggctggggacccccgatttcccctgccacgcttcatcctcctggtgtccggcttctgtcctaggggtatcggctttaaggaatccattctgcaaaggcctttgagccttcctagcctgcacgtatttggcgatacagacaaagttatccccagccaggagtcagtccagctcgccagccagttccctggggctattaccctgactcacagtggaggacatttcattccagcagctgcccctcagcggcaggcttatctcaagttcctggatcagttcgccgagtag

SEQ ID NO: 27509 - DNA, 1656 bp, synthetic construct
  source 1..1656: mol_type = other DNA; note = Synthetic coding sequence
atggaagaagctgagcttgtgaaaggtcgcctgcaggccatcaccgacaagcggaaaatccaggaggaaatcagtcagaagcgtcttaagatcgaggaagataagctgaagcatcagcatctaaagaagaaggcgcttcgtgaaaagtggcttctggacgggatttcaagtggtaaggaacaggaagagatgaagaagcaaaatcagcaagatcagcaccagatccaggtactggaacagagcatattgagactcgaaaaggaaatacaggatttagagaaggccgagctgcagatctccactaaggaagaggctattctcaagaaactgaaatctatcgagaggactactgaggatataatccggagtgtgaaggttgaaagagaggagagggccgaggagtccatagaagacatctacgcgaacattccagacctgcctaagtcctacatccctagccgcttgcgaaaggagatcaatgaggaaaaagaggacgacgaacagaaccgcaaggctctgtacgccatggagatcaaagtagaaaaagaccttaaaactggtgaatccacggttctgtcaagcatccctctgcccagtgatgattttaaggggactgggataaaggtctatgacgatgggcaaaagagcgtttacgctgtgtctagcaaccactcagccgcttataatggtactgatgggctggcaccagtggaggtcgaagagctgcttcgacaggcctctgagcgtaatagcaagagtcccacagagtatcacgagcccgtctatgccaatccattttaccggcctactactccccaaagagaaaccgtgacgccgggtcctaattttcaggagaggattaagatcaagaccaatggtttaggaatcggagtcaatgaatccatccacaatatgggcaatggtctttcggaggagcgagggaataatttcaaccatattagccctattcctcccgtgcctcacccacggagcgtaatacagcaggccgaagagaagctgcacactccgcagaagaggctgatgaccccctgggaggaatccaacgtgatgcaggacaaagacgccccatcacctaaacctaggttgagccccagggaaacgatttttggtaagagtgagcaccagaatagttctcctacctgccaggaggacgaagaggatgtcaggtacaatatcgtgcatagtctgcctcccgacataaacgataccgagccagttactatgatatttatgggataccagcaggcggaggactcagaagaagataagaaatttttgaccgggtatgatgggatcattcacgccgagctggtggtcattgatgacgaagaagaggaggacgaaggagaagccgagaaaccatcataccacccaatcgctccacacagtcaggtgtatcagcctgcaaaaccaacacctcttcctcgtaagcgcagtgaagccagtccacatgagaacaccaatcacaagagcccccataaaaacagcatctcattaaaagaacaggaggagtcattaggctcacctgtgcaccactcgccgtttgatgcccagacaaccggtgacggcacagaagacccatccctcaccgctttgcggatgcgcatggccaagcttggcaagaaggtgatatag

SEQ ID NO: 27510 - DNA, 1701 bp, synthetic construct
  source 1..1701: mol_type = other DNA; note = Synthetic coding sequence
atgttcgtctctgatttccgcaaggaattctatgaggtggttcagtctcagcgtgtactgctctttgtcgcttcagatgtggatgccctgtgtgcttgcaagatcttacaggctctgtttcagtgtgaccacgtgcagtatacactggtgcctgtgtcagggtggcaggagctggagacggccttcctggagcataaagaacagttccattattttattctaataaactgtggcgcaaacgtggacctcctggatatcctgcagcctgatgaggataccatcttctttgtatgcgatactcaccggcctgtcaatgtggtcaacgtctacaacgacacccagattaagctcctgataaaacaggacgatgatctcgaggtgcccgcatacgaggacatcttccgcgatgaagaggaggacgaggaacattctggtaacgatagcgacggttcggaaccctcagaaaagagaacccgtctggaggaggaaattgtggaacagacgatgaggcggcgtcagcggcgagagtgggaggccaggaggcgcgacatcctctttgactacgaacagtatgaataccacggcacttcctccgcaatggtgatgtttgagctcgcttggatgctctctaaggacctcaacgacatgctgtggtgggcaattgtgggcttgacagatcaatgggtccaggacaaaattacacaaatgaaatatgtcacggatgtcggagtgttgcagcggcatgttagtcggcataaccaccgcaatgaggacgaggaaaacaccctatcagttgattgtacacggatcagtttcgaatacgatttgcgtcttgtcctgtaccaacactggagcctccacgactcgctgtgcaatactagctatacagctgcacggttcaaactgtggtccgtacacgggcagaagagactgcaggagtttctggccgacatgggactgcccctgaaacaggtgaagcagaaatttcaggctatggacatctctcttaaagagaatcttcgcgagatgattgaggaatctgccaataaattcggaatgaaggatatgagagttcaaaccttcagtatccacttcgggttcaagcacaaatttcttgccagcgacgtggtgttcgccaccatgagcctgatggagagccctgaaaaggacggttccgggacagatcattttatccaagcgctagattctctgagtcgctctaatctagataagttataccacggactggaactcgcgaagaaacagctccgagctacgcaacaaacaattgcgtcgtgtttatgcaccaacctggtaatttcccaagggccatttttgtattgtagtcttatggaggggactcctgacgtgatgctgttcagccgtccagcaagtctctctctgctgagcaagcacctgcttaagtcattcgtgtgcagcactaaaaatcggaggtgcaagctgttgccactagtcatggccgctcctctttcaatggagcacggtactgtaaccgtcgttggaatcccaccagagaccgactcttccgatcgcaagaacttttttggacgagcgttcgaaaaagccgctgagtctacatcaagccggatgttacacaaccacttcgaccttagcgtgatcgaattgaaggctgaggacagatctaaattccttgatgctttgatctccttgctgagttag

SEQ ID NO: 27511 - DNA, 1461 bp, synthetic construct
  source 1..1461: mol_type = other DNA; note = Synthetic coding sequence
atgtccgttacctatgacgactccgtgggagttgaagtctcttccgatagtttttgggaggttggaaactacaagcggactgttaaaaggatcgatgatggacaccgtctgtgtagcgatctgatgaattgcctccacgaaagagcacggatcgagaaggcatacgctcagcagctaaccgagtgggcgagacggtggaggcagctggtggagaaagggcctcaatacggcacagtggagaaggcttggatggcctttatgtctgaggctgagagagttagcgagctacatctggaagtcaaggcatctttgatgaacgatgatttcgagaaaattaaaaactggcaaaaggaggcattccataagcagatgatggggggattcaaagagacaaaggaggccgaggacgggtttcgaaaggcacagaagccatgggccaaaaaattgaaggaagtcgaagccgctaaaaaagctcatcacgcagcatgcaaggaagaaaagttagccatctcccgcgaagcgaacagtaaggccgatccgtctctgaacccagaacagttaaagaaactgcaggataaaatcgagaaatgtaagcaagacgtgctgaaaaccaaggagaaatacgagaagtcacttaaggagctagatcaaggaacacctcaatatatggaaaatatggagcaggtcttcgaacagtgtcagcagtttgaggagaagcggctccggtttttcagggaggttttgctcgaagtgcagaaacatctggaccttagcaatgttgctggctacaaggccatctaccacgacctggagcagagtatcagagctgctgatgcggtggaggatttgaggtggttccgcgctaaccacggcccaggaatggcaatgaactggccacagtttgaggagtggtccgcagacctcaaccggactctgtcccgaagagagaaaaagaaagccactgacggcgttacccttacagggattaaccagactggcgaccagagcttaccaagcaaaccgtcctctactcttaacgtacctagtaaccccgctcagagtgctcagagccagagtagctataatccctttgaagacgaagatgacaccggcagtacggtgagtgaaaaggatgatactaaggccaagaatgtgtccagttacgagaaaacacagtcttatcctacagattggtcggatgacgagagcaacaatccattcagtagcaccgatgcaaacggcgattccaatccttttgatgacgacgcaacgagtggtactgaggtcagagtccgggcactttacgactatgaaggccaggaacatgatgaactgtcctttaaagcaggtgatgaactaacgaagatggaggacgaggacgagcaagggtggtgcaagggcagactagataacggacaggtgggcctgtacccagctaactacgtagaagcgatccagtag

SEQ ID NO: 27512 - DNA, 2262 bp, synthetic construct
  source 1..2262: mol_type = other DNA; note = Synthetic coding sequence
atgatggaggaaagagcggctgcagcagtggctgccgctgcctcttcttgtcggccattaggatctggagccggtcccggaccgaccggcgctgccccagtctccgcacccgctcccggacctggtcctgccggaaagggaggagggggagggggtagcccaggaccgaccgcgggacctgaacccctgtcactgccaggaatcctgcattttatacagcatgaatgggcccgatttgaggcagaaaaagcaagatgggaggctgagcgcgctgaattgcaggcccaagttgcattcctgcagggcgagcgtaagggacaggagaacctcaaaaccgatctggtccggaggattaaaatgttggagtatgccttaaaacaggaaagagcgaagtaccacaaactgaagttcggcaccgacctcaatcagggtgagaaaaaagccgacgtatccgagcaggtttccaatggtcctgtggagagtgtgaccctcgagaactcccccctcgtgtggaaagaggggaggcagctccttcgccagtatttagaggaagtgggctataccgatacaattctcgacatgcggagcaagcgagtcaggagtctgctgggtcgaagcttggagctgaatggagcagtcgagccctccgaaggagctccccgtgcccctcccggtcccgcaggcctctctggaggcgaaagcctacttgtgaaacaaatcgaggagcagataaaacggaatgccgctgggaaagacggaaaggaacgattaggtggttcagtgctggggcagattccatttctgcagaattgcgaagacgaggacagcgacgaagacgacgagctggacagtgtgcagcataagaaacagagagtgaaactgcctagtaaggctctggtaccagagatggaggacgaagatgaagaggatgacagcgaggacgcgatcaacgaatttgactttttagggtctggggaagatggagaaggagcacccgatccgagaaggtgtacagtggatggtagcccacatgagctggagagccgcagagtcaaactccagggcatcctcgccgacctgcgggacgtggatggtctcccaccaaaagtcacaggcccacccccaggaacgcctcagcctcgtccacacgaagacgtctttattatggacaccatcggaggtggcgaagtgtctctgggggacctcgcagatctcaccgtaaccaatgataacgacttgtcttgtgacctgtctgactccaaggacgcctttaaaaagacatggaaccctaagtttaccctgcgttcccactacgacggtattcgctctttagcctttcatcattcacaatccgcacttctgaccgcgtccgaggacgggaccctgaagctctggaatcttcagaaagccgtaaccgcaaaaaagaacgccgctctagatgttgagcccatccacgcattcagagctcacaggggccctgtgctggcagtggctatgggctcaaacagcgaatactgttattctggcggagcagatgcctgtatccatagctggaaaatcccagatctgagtatggatccttacgacggatacgacccctccgtgctgtcacatgtgctggaaggtcatggagacgccgtatggggtctggcattttctcccacaagtcagcgcctggccagttgttccgcagacggaaccgtgcggatctgggacccctcttcttccagcccagcttgtttgtgtactttcccgactgcttcagaacacggagtgccgacctcagtagccttcacctccaccgaaccggctcacattgtagcttccttccgttctggggatactgtgctgtatgatatggaggttgggagtgccttgctcactcttgagtccagagggagcagtgggcctactcagattaatcaagtcgtttcacacccaaatcaaccactcaccatcacagctcacgacgatcgcggaataagatttctggataaccgtaccggcaagcctgtgcattcgatggtcgctcacctggatgcggtgacttgcctcgctgtagatcctaacggggcatttctgatgagcggaagccatgactgctccttgcgcctctggagtctcgacaataagacctgcgtgcaagagataacagcgcacagaaaaaaacatgaggaagctatccacgccgtggcctgccaccccagcaaggccctgatagcaagtgccggtgctgacgccctggctaaggttttcgtttag

SEQ ID NO: 27513 - DNA, 1596 bp, synthetic construct
  source 1..1596: mol_type = other DNA; note = Synthetic coding sequence
atgaggatgcatacgcgcctgagcctgccgggacctcctcaccatgttggtgcggcataccctcccgctgggggaaacagatccgagaatgctggcagttggggcggtgcgggagcttcttccgtcgagccattagccagaagggtcgcctccggggaagctaccctggccatggaccagccagccggactccaggtggattacgttttcaggggcgttgaacacgcagttagagtgatggtgagcggccaggtgctcgagctggaagtggaagaccgcatgacagcggaccagtggaggggagagtttgacgcagggtttattgaggatttaacacataaaaccggcaatttcaagcagtttaatatcttctgtcacatgctcgagagcgctcttacgcagtcgtccgagagcgtcacactggaccttttgacttataccgatttggagtcactccggaatcggaaaatggggggtcggccaggctctctagcccctcgatccgcccaactcaattccaaacggtaccttattctcatttatagcgtggagtttgatcggattcactaccctctcccccttccctatcaaggcaaacccgaccctgtagtgctgcaaggcataattcgcagcctcaaagaggagttgggcagactccagggactagatggccagaacactagagacacccgggaaaatgagatctggcacttgagggaacaggtttccagattggcttccgagaaaagagaactcgaggcacaactcggtcgctcccgcgaggaggcactagcagggcgagcagcccgacaggaggcagaggcactcagaggacttgttcgcggactcgagttggagctccgtcaggaaagaggattgggacaccgcgtggccggacgtcggggtcaggattgtcggagactggctaaagagctggaggaagccaaggcctctgaacgatctctaagagccaggttaaagactctcaccagcgaactggccctttacaagcgaggcggaagggggtccagagggagaggacgacccgctcgtcctagcccatcacctacaggcggacgcgcactgagattcgatcctactgccttcgtcaaggcaaaggagcgtaagcagcgggagatacaaatgaaacagcagcagaggaaccgcttggggtccggcggaagcggcgatggcccaagcgtctcatggagtcgccagacacagcctccagccgctttgactggacgaggggacgcacccaacagaagcaggaaccggtcgagttccgtggattccttcagaagtagatgtagctcggctagttcctgcagtgatctggaggactttagtgaaagcctaagtcggggaggtcataggcgcaggggaaaaccaccctcaccgacgccctggtctggttccaatatgaagagtcctcctgttgaacgatcgcaccaccagaaaagtttagcaaatagcggcggttgggtgcctatcaaggagtacagtagcgagcatcaggcggctgatatggccgagatcgacgctagactaaaagccctccaggagtatatgaatcgactggatatgcgtagctag

SEQ ID NO: 27514 - DNA, 1452 bp, synthetic construct
  source 1..1452: mol_type = other DNA; note = Synthetic coding sequence
atggcgtccttgctctggggcggagacgcaggtgcagcagagtccgagcgactcaacagtcatttctcaaacctctctcaacctaggaaaaacctttgggggatcaagtctactgccgtgcgtaacattgatggcagtattaataacattaacgaggatgacgaggaagatgttgtcgatctggccgctaatagtctcctgaacaagctgattcatcagtctctcgtggagtcgagtcaccgcgtggaagtgttacaaaaagatccatcatcgccgctctactccgtgaaaacctttgaggagctgaggctgaaagaggagctgctcaaaggcatctacgctatgggatttaatcgcccaagcaaaatccaggaaatggctctgcccatgatgctggctcacccccctcagaatctgattgcacaatctcagtctgggaccgggaagaccgctgccttcgtgttggcgatgctttcccgggtgaacgcccttgaactttttccccagtgcctgtgccttgcccctacatacgagttggcattgcaaactggacgggtggtcgagcagatgggaaagttttgtgtggatgtccaggtaatgtacgccatcagaggcaacagaatcccgagagggacagacatcactaaacagatcattattgggactccaggcaccgtgttggactggtgttttaaactgaaactgatcgatctgacgaagatccgcgtttttgtcctggacgaggccgacgtgatgattgatacccaaggattcagtgatcacagtattcggatacagagggctctgccatcagagtgtcagatgctcctgttctcggccaccttcgaggacagcgtctggcacttcgcagagaggatcatccctgaccctaacgtgattaagttacgaaaggaggaacttaccttgaataatatacgccagtattatgtgttgtgcgagcaccggaaggataaataccaggccctgtgtaacatctatggctcgatcacaatcggccaggctatcatattctgccagaccaggcgcaacgcgaagtggctcactgtcgagatgattcaggacggccatcaggtgtctctgctgtctggagagttgactgtggagcaaagagcgagtatcattcagaggttccgagacgggaaggaaaaggtcctcatcaccaccaacgtatgcgctagaggtatcgatgtcaagcaagtcacaatagtcgtgaatttcgatcttccggtgaagcagggcgaggagcccgactatgagacatatctccatcgaattggacggacaggtcgttttggaaagaagggtctggccttcaatatgatcgaggttgacgaattgccatccttgatgaaaattcaggatcattttaacagcagcattaaacaactcaatgcagaagacatggacgaaatcgaaaagatagactattag

SEQ ID NO: 27515 - DNA, 1014 bp, synthetic construct
  source 1..1014: mol_type = other DNA; note = Synthetic coding sequence
atggctgatgccgctcctcagttgggcaaacgcaaacgcgaactggatgtcgaagaggctcatgcagcttccacagaagaaaaggaggcgggagtgggtaatgggacctgtgcacccgtgagactgcccttctctggcttccgtcttcagaaggtactgagggagagcgctcgtgataaaatcatatttctgcacggtaaagtcaacgaggcctctggggacggcgacggcgaagatgccgtggtgattctagagaaaactcctttccaggtggagcaagtggcccagttgctgaccggcagtcctgaactgcaactgcagtttagtaacgacatctactctacgtaccacctgttccctcccagacagctgaacgacgtgaaaacaaccgtggtctatcctgctacagagaagcacctgcagaagtatcttagacaggatctgaggttgattcgggaaacgggggacgactacaggaacattaccttgccgcatctggagtctcagtcactatcgatccagtgggtgtacaatatactcgacaaaaaagctgaggctgacaggattgtgtttgaaaaccctgaccctagtgatgggtttgtattgattcctgatctgaagtggaatcaacagcagttggatgatctgtatctgatcgcgatctgtcataggcgcggtattcggtctctgagagatcttacacctgagcatctgccactgttgcgcaacattttacaccagggacaggaggccattttacagcgctaccggatgaagggggatcacctcagagtgtaccttcactacctgccttcctactaccatctgcacgtgcatttcaccgcactgggcttcgaagcgcctggtagcggcgtcgagagggctcatctacttgccgaggttatcgagaacctggaatgcgaccctcgccattaccaacagagaacactcacctttgcactgcgggcagatgatcctctgctgaagttacttcaggaagcacaacagagctag

SEQ ID NO: 27516 - DNA, 1782 bp, synthetic construct
  source 1..1782: mol_type = other DNA; note = Synthetic coding sequence
atgaagctccaagccgtgatggagacactcctgcaacgccaacaaagggcaaggcaggaattagaggctaggcaacagttaccacccgaccctcccgctgcgcctcctggccgagccagggcagcccctgatgaggaccgagagcccgaatccgcacggatgcagagagcacaaatggctgcattggccgctatgcgggcagcggctgctggactcggccatccggctagcccaggaggttccgaggacggccctccgggttctgaagaggaggacgccgcaagagaggggacccctggatcgccagggagggggcgagaagggcctggtgaagaacacttcgaggacatggcgagcgatgaggacatgaaacccaaatgggaagaggaggagatggaagaagacctcggagaggacgaagaagaagaggaggaagactacgaggatgaggaggaggaggaggatgaagagggacttggtccaccaggcccagcctctcttggaaccactgccctatttccaaggaaagcacaaccaccccaagctttccgcggtgacggggtgcctagagtgctgggcggacaggagcggccaggccctggtcccgctcaccccggaggcgcagcgcacgttgcaccccaactacaacccccagatcatggagattggacttatgaagagcagttcaaacaactctatgaactggacggcgaccccaagcgcaaggaattcctcgatgatcttttctctttcatgcagaaacgtggaactcctgttaatcgtatcccaattatggccaagcaggtcctcgatctgttcatgctgtatgtgctcgtgaccgaaaagggtggcttggtagaggttataaataagaagctgtggagggagataaccaagggcttgaacttacccacgagcatcacgagtgcagccttcacactgcgaacacaatacatgaagtatttatacccatatgagtgcgagaagagaggcctgtcgaatcccaatgaattgcaggcagccatcgactctaacagacgagaaggacggagacagagttttggagggtctctattcgcgtactccccagggggtgcacatgggatgttgagctcccctaagctccccgtgtctagcctgggtctggccgcttcaaccaatggatcaagcatcactcccgctcctaagattaagaaagaggaagactcagccattccaatcactgtgcctggcagactgcctgttagtctcgcaggccatcccgttgtcgccgcacaggcagctgcagtgcaagcggctgcagcccaggccgctgtagcggcacaggccgctgctctcgagcagcttagagaaaaattggagtccgctgagcctcccgaaaaaaagatggcactggtcgccgacgagcaacaaagactgatgcagcgcgcactccagcagaacttcctggctatggccgctcagcttcccatgtcgattcgcattaattctcaggcatctgagagtagacaggacagcgcagtgaacctcacaggtaccaacggctccaacagtatctccatgtccgtcgaaattaacggaattatgtatactggagtgctcttcgcccagcctccagcaccaacacctaccagtgcacccaataagggagggggtggcggaggagggagttctagcaatgccggtgggaggggaggtaatacggggactagcgggggacaagcaggtccagctggcctttctaccccatctacctctacctccaataactcattaccttag

SEQ ID NO: 27517 - DNA, 6192 bp, synthetic construct
  source 1..6192: mol_type = other DNA; note = Synthetic coding sequence
atggctgatggcgcaccaagacctcagttgtaccgcagtgtgagcttcaaactgctcgagcgatggagcggaggccctggactgcgcgaagaagatactgatacccccggtttaaggcggcgagcgtcctgccggcctacaactgccgctcggggacagcccagcaggagagtgagtaagttagcatcgggtccactagcagcgcctgctcaacctcggccattgaggagcctcagcccaagcgttagacagttgtccagacggtttgatgctccaaggctggacgacggctctgcgggaaccagggacgggggagttctgcctgcagccgcagaagaggcggctgagggcccagccagaggagcatggccctccgtaaccgagatgcgtaaactgtttgggggacctggttccagaagaccaagcgcagactccgagagccccggtacaccatccccggacggtgctgcctgggagccccctgcccgagaatcccgccagccccctacacctcccccacggacttgttttcctctcgccggactacggtctgcgagacccctgaccggaccagagaccgagggtcgtcttcgcaggccacaacaacaacaagaacgagcacagaggccagctgacgggctgcattcatggcatattttctcccagccgcaagcgggagctcgcgctagctgctcatcatcttcgatcgcagcatcatatcccgtgtcaaggtctcgagcagcttcttcaagcgaagaggaggaggaaggtccccctcagctccctggggcacagagtccagcgtaccacggcggtcactccagcggatccgacgacgaccgagatggcgagggaggccaccggtggggtgggcgaccaggtcttagacctgggtcttctctgcttgaccaggattgccggcctgattccgacggcctgaacctgtccagcatgaactcagccggagtgtccggttcaccggaaccgcctacatccccaagggcaccacgggaagaagggctccgagaatggggctcaggctcgcctccatgcgtccctggccctcaggagggactccggccaatgagcgattcagtcgggggagcctttagagtggccaaagttagcttcccctcataccttgcatcacctgcaggttcacgtggctctagcaggtacagttccactgagactttaaaggatgatgacttgtggtctagccgcggatctggcggatggggcgtctaccgaagccccagcttcggcgcaggtgagggtttgctgagaagccaggcacgcacgagagctaagggaccagggggaacatccagggctctgcgagacggagggttcgagcccgagaagtctcggcagcgcaaaagcttatccaatccggatattgcctcagaaacgttaaccctactcagttttctgcgcagcgacctgagcgagctgcgggtgcgcaaacctggcggaagttctggcgataggggatcgaaccccttagatggccgagattcaccttccgcaggaggacccgtggggcagctcgagcctatcccgattccagcccctgcgagcccaggaaccaggcctacactcaaggatctgactgctaccctacgacgcgctaaaagctttacctgttctgagaaaccaatggccagacgactgcctcgaactagcgcactgaaatcatccagcagcgaactactgctgactggcccaggtgcagaggaagatccactcccgttgatcgtgcaagatcaatacgtgcaggaagctcggcaggtgttcgaaaagatccagagaatgggggcacaacaagacgatggatcagatgcccctccgggatctccagactgggccggagacgtcactcgaggccagcggtcccaggaggaactctccggcccagagtcttctttaacagacgagggcattggtgccgatccggaaccccctgttgctgcattctgtgggctgggcacgaccggtatgtggcgacccttgtcgagctccagtgcccagaccaaccaccatggccctgggacagaagattcactgggaggatgggctttggtctctcctgagacccccccaacgccgggtgccctgaggcggaggcggaaggttccaccttcaggatctgggggatctgaactctccaacggcgaagcaggcgaggcttatcggagcctgtctgatccgattccgcagcgacatagagcagccacttcggaggagcccaccggatttagtgtcgattcaaatctgcttgggtcactgagcccaaagaccggtctcccagccactagcgctatggacgaaggtctcacctcaggccattctgactggtcagttgggagtgaggagtcgaaaggctaccaggaggtgattcaaagtattgtgcagggcccaggaacactcggcagggtggttgatgatagaatcgctgggaaagcccctaagaagaaaagcctgtccgacccgagcagaaggggtgagcttgccggtcccggatttgaggggcctggtggggaacctataagggaagttgagcccatgctccccccttcttcatctgaaccaatcctcgttgaacagagggcagagccggaggagcctggtgctactcgaagtagagcacagagtgagagagctctgcctgaagctctccctcctcctgcgaccgcgcataggaactttcatttggatcctaaattggcggatatactttccccgcgactcatacgtaggggtagcaagaagagacccgctcgctcctcccaccaggagctccgcagagacgagggctcccaggaccagacggggagtctgtccagagccagaccatcctccagacacgtacggcatgcgagcgtgccagctacatttatgcccatcgtggtgccagaacccccaacttcggtcggcccacccgtggccgtcccagaaccaattggtttccccaccagagcccatcctactctgcaggcgccaagcttagaagacgtgaccaagcagtacatgctcaatttgcattctggtgaggtgccagcacctgtcccagtcgatatgccttgcttaccgttggccgctccacccagcgccgaagccaaacctcctgaagccgctcgtcctgcagatgagcccacacccgcttccaaatgctgttctaaaccacaggtcgacatgagaaagcacgtcgcaatgacactcctggacacagaacagtcctatgtggagagtctccggactctgatgcaggggtacatgcagccactcaagcagcccgaaaactcagtgctgtgcgatccgagccttgtcgacgagatctttgaccagatacctgagctgctggagcatcacgagcaatttctggaacaagtccgccattgtatgcaaacttggcatgcacaacagaaggttggagcattacttgttcagtcgttttcaaaggacgtcctcgtgaacatctacagcgcatacatcgacaactttcttaatgccaaggatgccgtccgcgtcgcaaaggaggcccgaccagcattcctgaaattcctggaacaatctatgagagagaataaagagaaacaggcactatctgatttaatgattaagcctgtgcagaggatacccaggtacgaactattggtcaaggatctgctcaaacacacacccgaggatcaccccgatcatccccttcttctggaggcgcagcgtaatataaaacaggttgctgagaggattaataagggcgtacgatcagccgaagaggcagaaaggcatgcccgagtgttgcaggagatcgaggcccatatcgaggggatggaggaccttcaggccccactccgaaggttcttgagacaagagatggtcatcgaagtgaaggctattggcggaaaaaaggacagaagcctgtttctgttcactgatctgattgtgtgcacaacattgaagcgcaagagtggttccctccgcagatccagcatgtccttgtatacagcagccagcgtgatcgacaccgcctcgaaatacaaaatgctgtggaaactgcctctggaggatgcagacattataaagggagcttcccaggcaacaaatagagagaacatccagaaagcaatctcaagattggacgaagacctcaccacattgggacaaatgtctaagctgagtgaatccctgggttttccacatcagtccctggacgatgcgttacgcgatctcagtgccgcaatgcaccgtgacctctctgaaaagcaagcactctgctatgccctctccttcccacccaccaagctggaattgtgcgcgaccagacccgaagggacagattcctacatttttgaatttccccacccagatgcacggttgggtttcgaacaggcttttgatgaggccaagaggaagctggcctcctcgaaatcttgtcttgaccccgagttcttgaaggcaatcccaattatgaaaacacgatccgggatgcagtttagctgcgctgccccaacacttaatagttgccccgagcctagtcctgaagtatgggtttgtaattcagatggctacgtcggccaagtgtgcctcctttccctcagggccgagccagacgtggaggcatgcatagccgtctgctcggcccgaatcctgtgcatcggggctgtgccgggtctccagcccaggtgtcaccgcgagcctccaccatcgctccgatccccaccagaaaccgctcccgaacccgctggccctgaactagacgtggaagcggctgcagatgaagaagccgctacactggcagagcctgggcctcagccctgtttgcacattagcatcgctgggagcggcttggaaatgacgccaggcctgggcgaaggcgatccaaggcccgaacttgtgccttttgactcagatagcgatgacgagtcgtccccctcccctagtggcacccttcaaagtcaggcctcaagatccactatcagtagctcttttggtaatgaagagaccccctcaagcaaagaggccacagcggaaactacctctagtgaagaggaacaggagcccggattcttgcccctgagcggcagcttcggtcctggtgggccatgtggaacttccccaatggacggacgggctcttcggagatcaagccatggcagtttcactcgaggcagcctggaggatctcctcagtgttgaccccgaggcttaccagagtagcgtctggctaggtactgaggacggctgcgtgcatgtctaccaatcatctgactcaattcgggatcgccgaaattccatgaagctgcagcatgcagccagtgtgacgtgtatactttatctcaacaaccaggtcttcgtctccctcgctaatggggagttggtggtataccaacgggaagccggacacttctgggacccccaaaactttaagtccgtgaccctggggacacagggttccccaataacaaagatggtctctgtgggaggcaggctttggtgcggctgccagaatcgggtactcgtgctctcccccgataccctgcagctcgagcatatgttctatgtgggtcaggattcaagtcggtgcgtggcctgtatggtggattcatctcttggggtctgggtcaccctcaaaggaagcgcccacgtctgcctctatcaccccgatacgttcgagcagctcgctgaggtggatgtgaccccccctgttcacaggatgcttgccggatctgacgccattattaggcaacacaaagctgcgtgtctaagaataacagccttgctggtctgcgaggaactcctatgggtcggtactagcgctggtgtcgtattgaccatgcctacctcccccggtacggtctcttgccccagggctcctctctcaccaacagggcttggacagggccacactggtcatgtgcgtttcttagctgccgtgcagctgcctgatggtttcaacctactttgcccaaccccaccccctcctcccgatacgggaccggaaaaacttccgagtctggaacatcgcgactccccctggcatcgaggcccagcaccagctcgtcctaaaatgctcgtgatcagtggtggcgatggttacgaggacttccgcctcagttccggaggtggttcaagctctgaaaccgtgggcagggatgacagtacgaatcatctactgttatggagggtgtag

SEQ ID NO: 27518 - DNA, 2499 bp, synthetic construct
  source 1..2499: mol_type = other DNA; note = Synthetic coding sequence
atgtctgaagcagggggagcagggccaggtggatgtggtgcaggggcaggtgcaggggcagggcctggagctctgccccctcaacctgcagctcttcctccagccccacctcaaggctccccatgtgcagctgcggcaggcggttcgggtgcctgcggccctgcaacagcagtggccgcagcaggtactgccgagggccctggagggggaggcagtgcacggatagccgtgaagaaggcccagttgaggagcgcaccccgtgctaagaagctggagaagctcggtgtgtacagtgcttgtaaggcagaggagtcctgtaagtgcaatggttggaagaatccaaacccatcccctactcccccacgggcagatctgcagcagatcattgtgagcttaactgagtcatgccgctcatgctcccacgccttagccgctcacgtgtctcatctcgagaatgtttctgaggaggaaatgaacagactattggggattgttctggacgtcgagtacctctttacctgtgttcacaaggaggaggatgccgatactaaacaggtgtatttttacctctttaagctgctgaggaaatccattttgcaaaggggaaagcccgtcgtcgaaggtagcctggagaaaaagccaccttttgagaagccctccatcgagcaaggggtgaataacttcgttcagtacaagtttagccacttgccagctaaagaaaggcaaacaatagtcgagctcgctaagatgttcttaaatcgcattaactattggcatctggaagctccttcacaacgcaggctacgaagtccaaatgatgacattagtggatacaaggagaattatactcgctggttgtgctactgcaacgtgccacagttctgtgactccctgcctaggtatgagacaacccaagtgttcggcaggaccttgctcagatccgtgtttacggtaatgcgacggcagctccttgagcaggccaggcaggagaaggataaactgccattagaaaagcggacgcttatccttacacacttccctaagttcctatccatgctggaagaggaggtctactcccagaatagccctatttgggatcaagacttcctgagcgcctcttctagaactagccagctcgggatccagacagtgattaatccaccgccagtagctggcactatctcctacaacagcacgtcttcatctctggagcagcctaacgctggatcatcaagtcctgcttgcaaggcaagctctggtctagaggcaaacccaggcgaaaagcgcaagatgacagactcacacgtgctggaggaggccaagaagcccagagttatgggggacattccgatggagctaataaacgaggttatgtccaccatcacagacccggcagctatgctgggcccagaaaccaatttcctctctgctcatagcgcgcgtgacgaggccgcaagactggaggagagaaggggggtgatagagtttcatgtggtgggcaactcgctcaaccagaagccaaataagaaaatcctgatgtggctcgtcggactgcagaatgtcttttcccatcaactgcctcgcatgcccaaagaatacatcacccggcttgtcttcgaccctaagcataagactctcgcgcttatcaaggatgggagagtgatcgggggaatttgttttcgaatgtttccttcacagggattcacagaaattgtgttctgcgccgtgacttccaacgagcaggtgaagggttatggaacgcacctaatgaaccatctaaaggagtaccatattaagcacgatatcctgaactttcttacatacgccgacgaatacgctataggatactttaaaaaacagggcttcagcaaggaaattaagattcccaagactaagtatgtcgggtatatcaaggactacgagggtgcaactctgatgggctgcgaattgaatccaagaattccttacacggagttctctgtgataatcaagaagcagaaggagatcattaagaaactaatagaacggaagcaggcccagatcaggaaggtgtatccaggactgagctgtttcaaggatggcgttcggcaaatccctatcgagtccatccctggcatcagggaaaccggctggaagccctcaggaaaggagaagagcaaggagcccagggatcccgaccagctctattccacactgaagagcattctgcagcaggtgaaatcccaccaaagtgcatggccattcatggaacctgtgaagcgaaccgaagcccctggatactacgaggttatacgatttccaatggacctgaagaccatgtctgagagactgaaaaacagatactatgtcagcaaaaagcttttcatggctgacttgcagagggtgtttaccaactgtaaggagtataaccctcccgaaagtgaatattacaagtgcgctaatatccttgaaaagttcttcttttcaaaaattaaagaagccggacttattgacaagtag

SEQ ID NO: 27519 - DNA, 4950 bp, synthetic construct
  source 1..4950: mol_type = other DNA; note = Synthetic coding sequence
atggctgggggtaggggcgctcccggaaggggtcgcgacgagcctcccgaaagttatccccagcgccaggatcacgaacttcaagcactggaagctatttatggtgcagactttcaggacttacgcccagatgcgtgtggccctgtgaaagagccgcctgagattaatctggtcctctatcctcagggcctgacgggagaagaggtgtacgtaaaggttgatctgcgggtgaaatgccccccaacttaccccgatgtggttcccgagattgaactgaagaatgccaagggactctcaaacgagagcgtcaacctgctgaagagtcgactggaagaattagctaagaagcattgtggtgaggtgatgatctttgaactggcctatcacgttcaatctttcctctcagaacataacaagccccctccaaagagctttcatgaagaaatgctagagcgcagagcacaggaagagcagcaacgcctgcttgaggcaaagaggaaggaggagcaggaacagcgggaaattctgcacgaaattcagcggaggaaagaagaaatcaaagaagagaagaagcgaaaggagatggcgaaacaagaaagacttgaaattgctagtctgtccaaccaggaccacacaagcaagaaagatcccggaggccaccgaaccgcagcaatcttgcatggcggttcacccgatttcgttgggaacgggaagcatcgcgctaacagctctgggagaagtaggcgcgagcgccagtacagcgtgtgcaacagtgaagacagtcccggatcctgcgagattttatattttaatatgggctctcccgaccagctgatggtgcataagggaaagtgcattggaagtgatgaacagctgggaaaattggtgtataatgctctggagacagcgacagggggattcgttttgctttacgagtgggttctacaatggcagaagaaaatgggacccttcctaactagccaggaaaaagagaaaatcgataaatgcaaaaaacagattcaaggtacagagacagaatttaattccctggtcaagctatcccacccaaacgtcgtgcgctatttggcaatgaatcttaaggagcaggatgattctatagttgtggatatcctcgtggagcacatttctggcgtctcgctggccgcacacctgtcacactccgggcctataccagtgcaccaactgagacggtatactgctcaactgctgagcgggctggattatctccatagcaatagtgttgttcataaggtgctctctgcttctaatgtgctcgtggacgccgaaggtaccgtaaaaattactgactacagcatctccaaaaggcttgccgacatttgcaaggaggacgtttttgaacagacaagggtcaggttttccgacaacgccctcccatataagacgggtaagaagggcgatgtgtggcggttgggcctgcttctgctttcgctgtctcagggacaggagtgcggggagtacccagtgacgattccttccgatctgcccgcagatttccaggacttcttgaaaaagtgtgtgtgcctggacgacaaggagcgatggagtccacagcagctgcttaaacactcttttataaacccccaaccgaaaatgcccttagtcgagcagtctccggaagactccgaggggcaggattatgtggaaactgtgatcccaagcaatcggctgcccagcgctgcttttttcagcgagacacagaggcagtttagccggtattttattgagtttgaggagttgcagctgctgggaaagggcgcttttggagctgtgatcaaagtgcagaataaacttgacggatgctgctatgccgtgaagaggattccaattaatccagccagcagacagttcagaaggatcaagggggaggtgacgcttctgagccgactccatcacgagaatatcgttcgttactacaacgcatggatcgaacgacacgaaaggccagcagggcctggcaccccaccgcctgatagtgggccactggcaaaggatgatcgagctgcgaggggtcagcctgcatccgacaccgacggcctcgattcagttgaggcagccgcaccccctcctattctttcgtcgagtgtcgaatggagcaccagtggcgaaaggtccgcctccgcccgatttcccgcaacagggccagggtcctcagacgatgaagacgacgacgaagacgaacatggtggcgtgttcagccagagctttttgcccgcatccgactcagaatcagatatcatcttcgataacgaggacgagaactcaaagagtcagaatcaggacgaggattgcaacgaaaagaatgggtgccatgaaagtgagcctagtgtgacgacggaggcagtgcactacctgtacatccagatggagtattgcgaaaagtccactctgagggacacaattgaccagggtctgtaccgtgataccgttcgcctgtggcggcttttcagagaaattctggacggtctggcctatatccacgaaaaagggatgatccatcgagatctgaaacccgtgaacatcttcttagactctgacgatcatgttaaaatcggcgacttcgggctggccacagatcacctggccttttccgctgacagcaaacaagatgaccagaccggagacctcataaaatcagatccgtctgggcacctgaccgggatggtgggtaccgcactgtacgtttccccagaagtgcagggatcaaccaaatccgcctataatcaaaaggtggacctgtttagtctcgggattatattcttcgagatgtcttatcacccgatggtgaccgcctcagaaagaatttttgtattgaaccaactgagggaccctactagtccaaaattcccagaggatttcgatgacggggaacatgccaaacagaagtctgtcatcagctggctgctaaatcatgacccagccaagcgacctacagccaccgaacttttgaagtccgagctgctccctcccccacagatggaggagtcagagcttcatgaggtgctgcaccacacattgaccaatgttgacgggaaggcttaccgtacaatgatggctcagattttttctcaaaggataagccctgccatagattatacttacgactctgacatcttaaaaggaaacttctcaatccggaccgccaagatgcagcagcacgtctgcgaaacgatcatccggatttttaagagacacggggctgttcagctttgcactcctctgctgttgcctcgaaaccgccagatctacgagcataacgaggctgccctgttcatggatcacagcggcatgctcgtgatgctccccttcgatctgcgaatcccgttcgccagatatgtggcaagaaacaatatcctgaacctaaaacgctactgtatagagcgtgtgttccgtccaaggaaattagatagatttcacccaaaagagctcctcgaatgcgcgttcgatatcgttacatcgaccacaaacagcttcttaccgacagcagagatcatctacactatctacgaaatcatccaggagtttccagcactgcaggaaaggaattacagtatttacctgaatcacacaatgttgctgaaagccatacttttacattgcggcatcccagaagacaagctgagtcaggtttatataatcctgtacgacgcagtaaccgaaaagctcaccagacgcgaagtggaggcaaaattctgtaatttgtcattaagcagtaattcgctgtgccgcctgtacaaatttatcgagcagaaaggagatcttcaggacttgatgccgacaataaatagcctgataaagcaaaagaccggaatcgcacagctggttaagtacggactgaaggatcttgaagaggtggtcggattactgaagaaactaggaattaagctgcaggtactcatcaacctgggtcttgtgtataaagtccagcaacataacggaattatctttcagtttgtagccttcattaaacggcgacagagggccgtgcccgaaatcttagcagcagggggaagatatgaccttctgatcccacagttccggggtccccaggctcttggccctgtccctacagcaatcggcgtgtctatagccattgataagatctctgccgcagttctcaacatggaggagtccgtgaccattagttcttgtgatcttctggtcgtgagtgttggccagatgtccatgagccgcgctattaatttgacccaaaagctgtggacagccggaattaccgccgagataatgtacgattggtcgcagtcacaggaggaactgcaggagtattgtcgacatcacgagatcacatacgtggctcttgtgtctgataaagagggaagccatgtgaaggtaaagagttttgagaaggagcgacagacggaaaaacgcgtccttgaaactgagttggttgaccacgtgctccaaaaactccggactaaagttacggatgagcggaatggtcgagaggcatcagataacctcgcagtacagaatctaaagggtagctttagtaacgcttctggactgttcgaaatccacggtgcgactgtggtgccaattgtgtctgtgttagctcccgagaaactgagtgccagtacccgcagaagatacgaaacccaggtgcagactaggctccagacttctctagctaacttacaccagaagtcctccgaaattgagatcctggctgttgacttgccaaaggagaccattctgcagttcctctcgcttgagtgggatgctgatgaacaggcattcaataccactgtgaaacagcttctgtcccggttgcctaaacagcgttacctcaagttggtctgtgatgaaatatataatatcaaggtggagaaaaaggtcagtgttttatttctctacagctaccgcgatgattactaccgaatccttttctag

SEQ ID NO: 27520 - DNA, 5652 bp, synthetic construct
  source 1..5652: mol_type = other DNA; note = Synthetic coding sequence
atgcctgtgggccgtattgagtgccctagttcacctagtttccctcgtgacattagtcacgaatgcagggtctgcggtgtaactgaggttggactgtctgcctatgcgaagcacatctccgggcaactccataaggataatgtggacgctcaggaacgggaagatgacggcaagggcgaggaggaggaggaggattattttgacaaggagctgatccaattaatcaagcaacgtaaagaacagagtcgccaggacgaacctagtaatagtaaccaggagataaacagtgacgatcgaagaccgcagtggaggcgggaggaccgcattccttatcaagaccgagagtcttatagtcagccagcctggcatcaccgcggaccaccccagcgcgactggaagtgggaaaaggatggatttaacaacaccaggaaaaattcattcccccacagcctcagaaatggcggaggtccacgtggccgatccggctggcacaagggcgttgcaggtggtagttctacatggtttcacaatcattctaacagtggtgggggatggctgagtaattctggtgccgtggattggaatcataacggcacaggcaggaacagcagctggctttcagagggaacgggaggcttttcttcttggcacatgaataactcaaacggcaattggaaatccagcgtcaggagcactaacaactggaattacagcgggcctggggacaagtttcagcccggtcgaaaccgtaattcgaactgccagatggaggatatgactatgttatggaacaaaaaaagtaataaaagcaataaatactcccacgacagatacaattggcagagacaggaaaatgataagctcggaacggttgctacttaccgcggtccctctgaagggtttacatcagataaatttcccagcgaagggctgctggacttcaacttcgagcagctcgaatcgcaaacgactaagcaggccgatacagccacctcaaaggtgtcaggcaaaaacgggagcgccgctcgcgaaaaacctcgcaggtggacaccttacccctcccagaagacacttgacctgcaatccgggcttaaagacattaccggaaataagagtgagatgattgaaaaacctctgttcgatttctctctaatcacaaccgggatccaagagccccagactgacgagacgcggaactcgccgacgcagaagacccagaaagagatccataccggatctctcaatcataaagcatcttccgacagcgccgcaagttttgaagtcgtccggcagtgtccaactgcggaaaagccagagcaggaacatactccaaataagatgccctctcttaagtctcctctgctaccatgtccggcaacgaagagcctgtcgcaaaagcaagatccgaagaatatttcgaaaaataccaagacaaacttttttagcccaggcgagcactctaacccatctaacaagcctaccgtggaagacaaccatgggccatacatctcaaagctgcgttcttcttgtccacacgtgttgaagggtaacaaaagcacctttgggagccagaaacagtccggagacaacttaaatgacacgcttcgcaaggcgaaagaagtcctgcagtgccatgaaagcctgcagaatcccctgttaagcacatccaagagcacacgaaattacgccaaggcatccaggaacgtggaggaatctgaaaagggtagcctgaaaattgagtttcaggtccacgccctggaggacgagtcagacggcgagacgtcagacactgagaagcacggcaccaaaattggaactttagggtccgccaccacagaactcctgtctggatctactcgaacagccgatgagaaggaagaggacgatcgcatcctgaagactagtcgcgagctaagcacaagcccctgtaatcctattgtgaggcagaaagagagtgagctgcaaatgacaagcgcagccagtccccatcccggactcctactggacttgaagacctcactggaggatgctcaggttgatgacagcattaagtcccatgtgtcttatgagactgagggtttcgagtcggcctcactggacgcggagctgcaaaaaagcgatattagtcagcccagcgggcctctactcccggagttatccaaactgggattcccagcgtcccttcaaagggatcttactcgccacataagtcttaaaagtaaaaccggagttcatctccctgagccaaacttgaactccgcccgaagaatcagaaatatcagtggccatcggaaaagtgagaccgaaaaggagagcggactcaaaccaactctacggcagatactgaacgcatccagacgcaatgttaattgggaacaggttatccagcaagtcacaaagaaaaagcaggagctgggcaaaggactcccacggttcgggatcgagatggtgcctctagtgcagaatgagcaggaggccctcgacctcgacggcgagcctgatctgtctagtttagaagggttccagtgggaaggggtgagtataagtagctcacccggattggccaggaaaagatctctgtcagaaagttcagtcatcatggatcgcgctcccagcgtatactctttcttttccgaagaaggcaccggaaaggagaatgaaccacagcaaatggtgtctccttccaattctctcagggctggacagtcccaaaaggccacgatgcacctaaagcaggaagttacaccgcgagccgcttctctaagaaccggcgaacgggctgagaacgttgcaactcagaggcgccatagtgcccagctcagcagcgatcatattatacctttaatgcacctggctaaggaccttaacagtcaagaacgcagcattccccctagcgagaatcagaatagccaggaatctaatggcgaaggaaactgcctgtccagctccgctagttcggccctggccatcagtagccttgcagacgccgcaaccgacagctcttgtactagcggtgcagagcaaaatgacggacagtccattaggaaaaagcggcgagccaccggagatggaagtagccctgagctgccaagtctggagcgcaagaacaagagaaggaagattaaaggaaaaaaagaaagatctcaggtagaccaactgctgaacataagcttgagagaggaagagctcagtaaatccttacaatgtatggacaataatttgctgcaggctagagccgcattacaaacagcatatgtggaggttcagcggctgttgatgctaaaacagcagatcacgatggaaatgagcgccctaaggactcaccgtatccagatcttgcagggcctccaggagacgtacgagcctagcgaacacccagaccaggttccatgttctctgacacgggagcggaggaatagccgatctcagacaagtatcgatgctgctctactacccactcctttttttccgcttttcctggaacccccttcatcacacgtcagtccttcacccacaggtgctagcctccagatcaccacgagtcctactttccagacccatggctcagtgcctgcccctgatagcagtgtacagatcaagcaggagcctatgtccccggaacaggatgagaacgtcaatgctgtgcctcccagcagcgcctgcaatgtctccaaagagctgctggaggctaatcgggaaatctcggattcttgccctgtttatccggtgattacggctcggttgtccttgcccgaatctacagagtcattccacgagccctcccaagagctaaagttctccgtggagcagcggaatacccgtaaccgtgaaaactcgcctagctctcagagcgccggtttgtcatccatcaacaaggagggggaggaacccactaagggtaattccggcagcgaagcatgtacgagctcttttttaagattgtctttcgccagtgagacacctctggaaaaagagccacactcacccgctgaccaaccggagcagcaggcggagtctacactcactagtgctgaaacacgcggatccaagaagaagaaaaaactcagaaagaagaagagcttgcgggctgcacatgtccctgagaattcggatactgaacaggatgtgctcacagttaaaccggtgcgcaaagttaaagctggaaaactgatcaagggaggaaaggtaactacctctacttgggaagatagccgtaccgggagagaacaggaatcggtgagggacgaaccggactccgattccagcttggaggtgctcgaaatccctaatccgcagcttgaggtggtggctattgactcttccgagagcggagaggagaaaccggacagtcctagcaagaaggatatttggaatagcaccgagcagaaccctctggagaccagcagaagcggctgcgacgaagtgtcgagcacgtcagaaattgggactagatacaaggacgggatacccgtgagcgtcgccgaaacacagacggtgatttcgagcataaaaggatccaaaaacagcagcgagatctcttccgaacctggagacgacgacgaacccaccgagggcagctttgagggtcaccaggccgcagttaacgcgatccagatcttcgggaacttactgtatacttgttctgccgataagacagttcgggtgtacaatcttgtgtcacgaaaatgcattggcgtcttcgagggacatacatcaaaagtaaattgccttctggtgactcagacttccggtaaaaacgccgctctgtacacgggatcttcagatcacacgattaggtgttacaacgtgaaatcgcgggaatgtgtggagcagctgcaattagaggatcgcgtgctttgtctgcattccaggtggcgaattctgtatgcagggttggccaacggcactgtggtaacgtttaacatcaagaacaacaaaagattggagatattcgagtgtcatgggcctcgcgctgtcagctgcctggctaccgcccaggaaggtgctagaaaattactggtggtaggatcttatgactgcaccatcagcgttagggacgcaagaaatggcctgctgttgagaaccttagagggacattcaaagaccattctgtgcatgaaagttgtgaacgatctcgtcttctctggttcctccgaccaatccgtccacgcacacaacatacacaccggagaactggtaaggatctataaaggccacaaccacgcagtgaccgtggttaacattctaggtaaggtgatggtaaccgcatgccttgacaaattcgtccgggtctacgagctgcagtcccacgatagactacaggtctacggtgggcataaagacatgattatgtgcatgactattcacaagtcaatgatatatactgggtgctacgacggaagtatccaagctgtgcggttgaacctgatgcaaaactatcgctgctggtggcacgggtgcagcctgatttttggcgtggtggatcatctcaaacagcacctgttgactgatcacactaaccctaactttcaaaccttgaagtgcagatggaagaactgcgatgcgtttttcaccgcgagaaagggttccaaacaggatgcagcaggccatattgagagacatgccgaagatgacagtaagatcgatagttaa

SEQ ID NO: 27521 - DNA, 588 bp, synthetic construct
  source 1..588: mol_type = other DNA; note = Synthetic coding sequence
atggccgaaccagtgcaggaggagctgtccgtactcgcggcaatattttgccgccctcacgagtgggaagttctgtctcggtccgagacagacggcaccgtatttagaatccatactaaagccgagggattcatggacgttgacatccctctggagttagtgttccacttgcccgtgaactacccctcttgtctccccggtatctctatcaatagcgaacagctcacaagagcccagtgcgtgacggttaaggagaatctgctagaacaggccgaatccctgctctcagaaccaatggttcatgagctagtactctggatacagcagaaccttcgccatatcttgtctcagcctgagaccggaagcggttcagaaaagtgcactttctccaccagtacaaccatggacgacgggctctggatcaccctgctgcatctggaccatatgagggctaagaccaaatacgtgaaaattgttgaaaagtgggcttcagacctccggctcacaggccgactgatgtttatgggcaaaatcatcctgatactgctccagggtgatcgaaacaacctgaaagttccaaaaagttag

SEQ ID NO: 27522 - DNA, 1119 bp, synthetic construct
  source 1..1119: mol_type = other DNA; note = Synthetic coding sequence
atgagccgcaggcggtttgattgtcggagcatctcaggactactcacaacaacccctcagattcctataaagatggagaattttaacaacttctacattctgacctctaaagagctaggacggggaaaatttgccgttgtgcgtcagtgtatcagcaaaagtacaggtcaggagtatgcggcaaagtttctgaaaaagcggaggcgcggacaagactgccgagctgagatcctccacgaaatcgctgtcttggagttggcaaagagttgtccccgtgttattaacctccatgaagtctacgaaaatacctccgaaattattctcatcttggagtatgccgcagggggagagatattctccctatgcctgccggagttggccgagatggtgtcagaaaacgatgtaatccgcctcattaagcagattctggagggtgtgtattatttgcatcagaataacattgtgcacctggacctaaagccacaaaacatcctgctgagctccatttatccactgggtgacatcaagatcgtggacttcggtatgtctcgtaagatcggtcacgcttgcgagctgcgagaaatcatgggcacccctgagtacttggcccctgaaatcttgaattacgatccgatcactactgcaacagatatgtggaatattgggatcatagcatatatgctactcacccacacctcccctttcgttggagaagacaaccaggagacctatctgaatatctcgcaggttaatgtggattactccgaagaaacattctcgtcagtgtcccagctcgcgaccgattttatacagagtctgcttgtgaagaacccggaaaagcgcccaaccgccgaaatctgtctctcccactcatggttgcaacagtgggactttgagaatctgttccaccccgaagagacctcttcttcttcccaaacccaggatcacagcgtgcggtcctcagaggataagactagcaagagcagctgtaacgggacatgtggtgatagagaggacaaagagaacataccagaagattcaagcatggtgagcaaaagattccgctttgatgatagcctgccaaacccccacgaattggtttctgatctactgtgctag

SEQ ID NO: 27523 - DNA, 930 bp, synthetic construct
  source 1..930: mol_type = other DNA; note = Synthetic coding sequence
atggaggccgcacggacagctgtattgagggtcaagcgcaagagaagcgcagagcctgcggaagcccttgttctggcgtgcaagagactgcgttccgatgctgtggagagtgctgcccagaagacatcagaggggctggaacgggctgccgaaaacaacgtattccacctagtagcaacggtgtgctcccaggaagagcccgtccaaccgctcctgcgggaagtgctgcgtcccagccgggactcgcagcagcgtgtccgcaggaacctgcgggcatccgcacgcgaggtgaggcaagaggggcgttacagggtgctgagctctaggcgatcactggggactacaagctccggtcaggagagtgaatacacccctggaaacccggaggccgctgggaacagtggtttccaactgctggacctggtgcacgaagagggagaacctgaggccgcttctgcaggttcctgtaaaactagcgaccctgatgtaatcctctgcaactccgtggagctcatcagagagcgcctgacggtgtcagaggatggccctggcgtgcgcaggcaggaggagcagaagcatgacgactacgtgtatgacatttactacctggagaccgcaactcccggatggattgaaaacatcttatctgtgcaaccatatagccaggaatgggagcttgttaacgacgaccaggaacctgaggacatttatgatgatgaagacgacgaaaactcggagaacaattggaggaatgaatatcccgaggaagagtcatctgatggagacgaagattctcgaggttcggcagactataatagcttatctgaggaagaacgagggtcctctcgacagaggatgtggagcaaatacccgctcgacgttcagaaggagtttggctatgactctcctcacgatttggactcagactag

SEQ ID NO: 27524 - DNA, 1068 bp, synthetic construct
  source 1..1068: mol_type = other DNA; note = Synthetic coding sequence
atggccgacaattccagtgatgagtgcgaggaggagaacaataaagtgctgcgcgagggcatgccccaagccccaggccatagggggaaagacatggaccctgtgcccccagctcccgcaagcttgaaatgccaccagactccgagtcatgtgctggagcgtgtcgggtggtaccgagagagtcagaaacatcgcaaggaaaaaaagaaaacttctcaactaacgcctcagcggggattttccgagaacgaggacgacgatgacgacgatgatgattcctctgagactgactctgatagcgacgatgacgatgaagagcacggagctcccctcgaaggagcttatgacccagccgattacgagcacttgcccgtgagcgccgagattaaagaactgtttcagtacatatcgagatacaccccccagctgatcgacttggaccataaattaaaaccttttattcctgattttattccagcggtgggggatatagacgcttttcttaaagtcccgagacccgacggcaaaccagacaacctgggtctgcttgtcttggatgagccctccaccaagcagtcagatccgacagtcctgtcactgtggctgaccgaaaactcaaaacaacacaatatcacccagcatatgaaagttaaatccttggaggacgcagaaaagaatcctaaagccattgatacctggattgagagtatctcagagctacataggtctaagccaccagcgacagttcattacactagaccaatgccggatatcgatactctaatgcaggaatggagccccgagttcgaagagttacttggcaaggttagcctgccaaccgccgagatcgattgctcgctagccgagtacattgacatgatttgcgccatactggacatccccgtctacaagtcccgaattcagtcattgcatctgctgtttagcctgtactcagaatttaaaaactcccagcactttaaagcactggctgaaggaaagaaagcatttacaccatcaagtaactccaccagtcaggctggagacatggagaccctgaccttctcctag

SEQ ID NO: 27525 - DNA, 915 bp, synthetic construct
  source 1..915: mol_type = other DNA; note = Synthetic coding sequence
atggcggacaatagttcagacgaatgtgaagaggaaaataataaagagaaaaagaagacctctcagctcacacctcagcgcggattctctgaaaacgaagatgacgatgacgatgatgacgacagctccgaaactgacagtgactctgacgacgacgacgaggagcatggagctcctctcgaaggggcttatgatcccgctgactatgagcacctcccagtaagcgcggaaattaaggagctctttcagtacataagccgatacacacctcaactgatcgatctggatcataagttgaagcctttcatcccagacttcatcccagccgtaggggacattgacgccttccttaaggtgccccgaccagatgggaagcccgataacctcgggctgttagttcttgacgaaccaagcacaaagcagagcgatcccaccgtattgtccctgtggctgaccgaaaactccaaacaacacaacataacacagcacatgaaagttaaaagtttggaggacgcagaaaaaaacccgaaggcaatcgacacatggatagaaagtattagtgagctccacaggtctaaacccccagctacagtgcattacacacggcctatgccagacattgatacacttatgcaggaatggtcccccgaattcgaagaattgctcggaaaggtgtcactgcccactgcagagatcgattgctccttggctgagtacattgacatgatctgtgcaatcctggacattccagtctataaatcaagaatacaatctctgcacctgctcttcagcctgtactcagagtttaagaattcacagcatttcaaagccctcgccgaaggaaaaaaggcctttacgcctagttcaaatagtacttcacaggctggtgacatggagaccttgaccttctcatag

SEQ ID NO: 27526 - DNA, 1335 bp, synthetic construct
  source 1..1335: mol_type = other DNA; note = Synthetic coding sequence
atgagggaaatcgtccacctgcaggccggacagtgtgggaaccaaatcggcgctaagttttgggaggtcatcagcgacgaacacggaattgaccccacaggaacttaccatggagatagcgatttacagcttgaacgcataaatgtctactacaatgaagcgaccggcggaaactacgttccacgagccgtcctggtagacctcgaacctggcaccatggatagcgtgcgctctgggccatttggacagatattccgcccagacaactttgtcttcggccagagtggtgcaggcaacaattgggccaagggccactacaccgagggagcagagctcgtcgatgccgtgctggatgtggtacgcaaagaggctgaatcatgtgactgtttgcaggggtttcaacttacacactcactgggcggaggcaccggcagcggcatggggactctcctcatcagtaaaatccgagaggaattcccagacagaattatgaacacattttccgtggtgcccagccctaaggtctccgataccgttgtcgaaccttacaacgccacactctctgtgcaccagctcgttgagaacactgacgaaacatattgtatcgataacgaagcattgtacgatatctgctttcgcactcttaaactgacaaccccgacctatggcgatctcaatcacctggtcagcgccaccatgtccggcgttacaacctgtctgcgctttcccggtcagctgaatgctgacctcagaaaactcgctgtgaatatggtgcctttccctagacttcatttctttatgccaggctttgcacccttgacctcgcggggttcccagcagtaccgagccctgactgtgccggagctgacccaacagatgttcgatgccaagaacatgatggccgcttgtgaccctcgacatggcagatatctgaccgttgcagcagtcttccgcggacgtatgtctatgaaggaagtggacgaacagatgctttccgtgcagtctaagaactcaagttatttcgtagaatggattcccaataatgtgaaaacagccgtctgtgatatccctcccaggggattgaaaatggcagctacattcattggcaactccactgctatacaggagttgttcaagcgtatttctgaacagtttaccgcaatgttccgtcgcaaagcgttcctacactggtacacaggggaaggcatggatgaaatggagtttactgaggcggagtccaatatgaacgacctggtctcagaatatcaacagtaccaggacgcaacggccgaagaaggagaatttgaggaagaagctgaggaggaagtagcctag

SEQ ID NO: 27527 - DNA, 1398 bp, synthetic construct
  source 1..1398: mol_type = other DNA; note = Synthetic coding sequence
atggaaccctcatccctcgagttacctgcagatacggtccagcgcattgcagcagagctcaagtgccaccctacagatgagagggtagccctgcacctggatgaggaagataagctccggcatttccgcgaatgcttctatatacctaaaattcaggacctgcccccagtggacctctcactggtgaataaagacgagaacgccatctacttcctaggcaactcccttggcctgcaaccgaagatggtgaaaacctacctggaagaggaacttgataaatgggccaagatcgccgcatacggtcacgaggttggcaaaagaccttggattaccggcgatgagtcgattgtaggactgatgaaggatatagtcggggcaaatgagaaggagatagcgcttatgaacgctctgactgtcaatctgcacttactgatgctctccttttttaaacccactccgaagcgttataagatcctcctggaagcgaaagccttcccctctgaccactatgccatagagagtcagctgcagctccatggtctgaatattgaagaaagcatgcggatgatcaagcccagggagggagaggagactcttcggattgaggatatccttgaagtcattgaaaaagagggggatagcatagccgtaatactttttagcggtgttcacttctataccggtcagcacttcaatattccagctataacaaaagccggacaagccaaaggatgctatgtggggtttgatcttgcgcacgctgtgggcaatgtcgaactgtacctgcatgattggggtgtcgattttgcctgttggtgtagttataagtatttgaacgccggagccggtggaattgctggggctttcatccatgagaaacatgctcacacgattaagccagccctggttggctggttcggccatgaactgtccacccgttttaaaatggacaataagctccagctaattcccggtgtctgcggctttcgtatttctaatccgcctattttgctggtgtgtagcctgcacgcgagtctagagatctttaagcaggccactatgaaggcgctgaggaagaaaagcgtactgttaaccggctaccttgaatatctgattaaacataattatggcaaggacaaagctgcaactaagaagcccgttgttaatatcataacacctagtcacgtagaagagagaggctgccagctgacaatcactttctcagtgccaaataaggacgttttccaagagctggaaaaacggggtgtggtgtgcgataaacgcaaccccaatggcattcgcgtcgctcccgtccccctgtacaattccttccacgacgtttataaattcaccaatctcttaacttcgattctggactctgcagaaacgaagaactag

SEQ ID NO: 27528 - DNA, 4758 bp, synthetic construct
  source 1..4758: mol_type = other DNA; note = Synthetic coding sequence
atgaattctcagcctcagacaagaagccccttcttccagcggccacaaatccagccccctcgcgcaaccatccccaattcctctccatcaattaggcccggtgcgcaaactccgacggctgtctatcaagccaaccagcacatcatgatggtgaaccatctgccaatgccttaccccgtgccgcaggggccacagtactgtatccctcagtatagacactccggccctccatacgtgggcccaccccagcagtatccggtccagccacctggcccagggcctttctatcccggacccggtccgggtgattttccaaacgcttacgggacacctttttaccccagtcagcccgtgtaccagagcgcccctattatcgtacccactcagcaacagccaccaccggctaagagggagaagaaaactatccgaatcagagatccaaatcagggaggcaaagacatcacagaggagattatgagtggcggaggaagtcgtaaccccaccccacccatcggccgtcctacaagcacacccacccctcctcagcagctcccaagtcaagtgcccgaacatagtccggttgtgtacggcactgtggagtccgcgcatctggctgcatctacccctgttactgctgcaagcgatcagaagcaagaagaaaagccaaaacccgatcctgtgctgaagagccctagtcccgtactgcgtctggtattgagtggggagaagaaggaacaggagggccagacatccgagaccaccgcaattgtttccattgcagagctccccctgccgccttcgccaactaccgtgtctagtgtagcaaggtctaccatagccgcacccacatccagcgcacttagttcgcagccgatcttcacaacagcaattgatgataggtgtgaactgtcatcaccaagagaagacactattccgataccatctctcaccagctgcactgagaccagtgatcctctgcccactaatgaaaacgatgacgatatctgcaaaaagccgtgtagtgtggcaccgaacgacattcccctcgtctcatccaccaacttgatcaatgagatcaatggagtttccgaaaagctttccgcaacagaaagtatcgtggaaattgtgaagcaggaggtgttgcccctgacactagaattggagatcctcgaaaaccctccagaggagatgaaactcgaatgtatccctgcccctatcacccccagcactgtaccctcatttccccctactcccccaacacccccagcctccccccctcacaccccagtgattgtccccgctgccgcaacgaccgtatcatcaccttctgcagcaattacagttcagcgagtgctggaagaagacgaatccatccggacatgcctatccgaagatgcgaaggaaatccagaacaagatcgaggtggaggctgacgggcagaccgaagaaattctggactcccaaaatctgaactcacgtcggtctcccgttcctgcccagatcgccattacggtgcctaagacctggaaaaagcccaaagatcgaacccgaacaacagaagaaatgctggaagccgagctagagctgaaggcagaagaggaactgtccattgacaaagttctggagagtgaacaagacaagatgtcccaagggtttcatccagagcgggacccctcggatctcaagaaggtgaaggcagtggaagagaacggcgaagaggctgagcccgtgaggaatggagccgagtcggtatcagagggagagggcatagacgcaaattcgggttccacagattcctctggtgatggagtgacctttccattcaagcctgaaagctggaaaccaaccgacaccgagggcaaaaaacagtatgatcgggaatttctgctggatttccagtttatgcctgcttgtatacagaagccggaaggcctgccccctatctcggatgtggtcctggacaagataaaccagcccaaacttccaatgcggacgctcgatcctcgaatcctcccaagagggccagacttcactccggctttcgctgatttcggtcgtcagactcccggtggccgaggtgtaccgctgcttaacgtgggcagccgcagatcacagcctggccagagacgcgagcctaggaaaatcattacagtttctgtgaaagaagacgtccaccttaagaaagcggagaacgcctggaaaccatcccagaaacgggacagccaggcagacgacccagaaaacatcaagacccaagagctctttcggaaggtccgctccatcctgaataaactgactccacagatgttcaaccaattaatgaagcaagtctctggactcaccgtggacactgaggaacgcttaaagggcgtaatcgacctggtcttcgagaaagcgatcgacgaaccaagcttcagtgtggcctacgccaatatgtgtcgttgcctcgtcacacttaaggttccaatggccgataagcctggcaatactgtgaatttccgtaagctactgttaaacaggtgtcaaaaggaatttgagaaggacaaggcagatgatgacgttttcgaaaagaaacagaaggagttggaggcggctagcgctccagaggagcggactcggttacatgatgaactggaagaagcaaaggacaaagcccgacgccgaagcataggtaacattaagttcatcggcgaattatttaagttgaaaatgttaacggaagctattatgcatgactgcgtggtgaaactgctgaagaaccacgacgaagagtccttagaatgtctctgtcgattgctaaccaccattgggaaggacctggactttgagaaggccaagcccagaatggaccagtacttcaaccagatggagaagatcgtgaaggagcggaagacttctagcagaatcaggttcatgctgcaggatgtgatagatctgaggctgtgcaattgggtgagtcggagagccgaccaagggcctaagacgatcgagcagatccataaggaagcaaaaattgaagaacaagaggagcagcgaaaggttcagcagttgatgactaaggagaagaggcgccctggcgtacagagggtcgacgagggtggttggaacacagtgcaaggcgctaagaattcccgagtgctggatccatcaaagtttcttaaaatcacgaagcccaccatcgacgaaaagatacagctagtgccgaaagcacaactgggttcttggggcaagggctcatccggcggtgcaaaggcatctgagaccgatgcacttcggtccagtgcctcctccctcaataggttcagcgcgttgcagccaccagccccttccgggagtacccctagtacacctgtagagtttgatagccgccgtactctgacgtccaggggatccatggggagagagaagaatgataagcctcttccttccgcgacggctaggccaaacacgtttatgagaggaggaagcagcaaagaccttttggacaaccagtcccaagaagaacaacgccgtgaaatgttggagaccgtcaaacagcttacaggaggcgtagacgtcgagagaaatagcacagaggctgaaagaaacaaaactagagagtcagctaagccagagattagcgcaatgagcgcgcacgataaggctgccttgtcagaagaggaactggagcgaaaaagcaaaagtattatagacgagtttcttcatattaatgactttaaagaggctatgcagtgtgtggaagagctaaacgcacaggggttgctgcatgtattcgtcagagtgggtgtggagtcaactctggagagaagccagatcacgcgcgaccacatggggcagttactgtatcagctggtgcagtccgaaaagctgagcaagcaggacttcttcaagggattcagcgaaacattagaactggcagatgatatggctatagacattccacacatttggctgtacttggctgagctggtgacccctatgctaaaagagggcggaatatccatgagagagctaaccattgagttcagcaaaccgctcctgcccgtgggccgagcaggcgtgcttctgtcggaaatattgcacctcctttgtaagcagatgagccataagaaagtgggggcactctggagggaagccgatttaagttggaaggacttcctgccagaaggagaagatgtgcataacttccttttggagcagaagctggatttcatcgaatctgattctccatgcagttctgaggccctcagtaagaaggaattgagcgccgaagagctgtataagcgtctcgagaagctgatcattgaggataaagccaacgacgagcagatcttcgattgggtcgaggcgaatctggatgaaattcaaatgtccagtcctaccttcctgagagcgttgatgactgctgtctgcaaggcagcaattattgccgacagctcaaccttcagggtggataccgccgtgatcaagcagcgcgtcccaatattgctgaaatacctggattccgatacagaaaaggagctacaggccttgtatgcactccaggcgagtattgttaagctggatcagccagccaatttactgaggatgtttttcgactgcctatatgatgaagaggtaatctcagaagacgccttttacaagtgggagagctcgaaggacccagccgagcagaatggcaaaggcgttgcactcaagtcagtgacagcctttttcacctggttgagagaagccgaagaagagtcagaggacaattag

SEQ ID NO: 27529 - DNA, 378 bp, synthetic construct
  source 1..378: mol_type = other DNA; note = Synthetic coding sequence
atggcccctgcaaaaaagggaggagagaaaaaaaaaggcagatctgcaatcaatgaggttgtgactagagaatatacaatcaatatccacaagagaattcacggagtcgggttcaagaaacgcgcaccgagagcgttgaaggagatccgtaaatttgctatgaaagagatgggaacccctgacgtgcgaatcgacacacggttgaacaaggcagtgtgggcgaagggtatccggaatgtgccttaccgcattcgtgtacggctgagtaggaaaagaaacgaggatgaagattcaccaaacaagctgtataccctcgtgacctacgttcccgtgaccacattcaaaaatctgcagacggtaaatgtcgacgagaattag

SEQ ID NO: 27530 - DNA, 1590 bp, synthetic construct
  source 1..1590: mol_type = other DNA; note = Synthetic coding sequence
atgctagtgctgttcgagaccagcgttggatacgctatttttaaggtcctaaacgaaaaaaaacttcaggaggtggactccctgtggaaagagtttgagacccccgagaaggccaataaaattgttaaactgaagcattttgaaaaatttcaggacaccgcagaggcgctcgcagcctttacggctcttatggagggcaagatcaataaacagctgaaaaaagtcctcaagaagatcgtgaaagaggcccatgaaccgctggctgtagcggatgctaagctagggggtgtaatcaaagaaaaactgaacttgagctgcattcactccccagttgtcaacgaactaatgcgtgggatccgcagtcaaatggacgggctgatccccggtgtcgaacccagggagatggccgctatgtgcctgggtctcgcacatagcctgtcacgctacagactaaagttttccgcggataaagtggataccatgatcgtccaggctatttcactgctggatgatcttgacaaagagctgaacaactacattatgcgctgccgagagtggtatgggtggcacttcccagagctggggaagataatctcagacaacttaacttattgtaaatgcctgcagaaggttggagatcgcaagaattatgcttccgccaagctctctgaactcctcccagaggaggtcgaagcagaagtaaaagccgcagccgaaatatccatgggcacagaagtgtcagaagaagacatatgcaatatcctccatctgtgtacacaggtgattgaaatttctgaatataggacccagttgtatgaatacctgcagaaccggatgatggcaattgcccctaacgtcaccgtaatggtgggagagttagttggcgcaaggctcattgcccacgcaggctctcttttgaacttggctaaacacgcagcctctactgtgcagatcctaggggctgagaaagccctattcagagcgctgaagtctcgcagagatactcctaagtatggcctgatctaccatgcttctttagtgggacagacttctccaaaacacaagggaaagatttcccgaatgctcgccgctaagacagttttagccatccggtatgacgccttcggcgaggattctagctcagccatgggggttgagaacagagctaagttggaggccaggcttcggaccctggaggacagagggatcaggaagatctcaggcactgggaaggcattggcaaaaaccgagaagtacgagcataaatcagaagtcaagacctatgatccgtctggggactccacacttcctacctgtagtaaaaagaggaaaatcgagcaggtggacaaggaggatgagattacagaaaaaaaagcgaaaaaggccaagatcaaagtaaaagtggaagaggaagaagaagagaaagtagctgaggaagaggagacgtcagtgaagaagaaaaagaaacgcggaaagaagaagcacatcaaggaagaaccgctgagtgaggaggagccttgcacttccaccgcgattgccagtcctgaaaagaagaaaaagaagaaaaagaagcgcgagaacgaagattag

SEQ ID NO: 27531 - DNA, 738 bp, synthetic construct
  source 1..738: mol_type = other DNA; note = Synthetic coding sequence
atgaacgggagagctgattttcgcgagccaaatgctgaagtcccaagacccatcccccatattggtcccgactacatccccaccgaagaggaaaggagggtttttgcggaatgcaacgacgagtcattctggttcaggagtgttcctctggccgcaacatcgatgctcattacccagggcttaatatccaagggcatacttagttctcacccaaagtatggaagcatacctaagttgattctggcatgtatcatggggtactttgcaggaaagctttcatacgtcaaaacctgccaagaaaagtttaaaaagctggagaatagtcccctgggtgaagccctcagaagcggccaagcaagaaggtcttcccccccaggtcattactaccagaaatcaaagtatgacagctctgtctccggacaatctagcttcgtcacatctccagctgccgacaatatcgagatgctaccacactatgagcctattcccttttctagttccatgaatgaatctgcccctaccggcataacagatcatatcgtgcagggcccagacccgaatttggaggaaagcccgaaaaggaagaatataacttacgaagaactgaggaataagaatcgggagagttatgaagtgtcactgactcagaagactgatccaagcgtgcgccctatgcacgagagggtacctaagaaggaagtgaaggtcaacaagtacggcgacacttgggacgaatag

SEQ ID NO: 27532 - DNA, 1746 bp, synthetic construct
  source 1..1746: mol_type = other DNA; note = Synthetic coding sequence
atggaggatgtcaattcaaatgtgaatgcagatcaagaggtccgaaagctccaggaattagtgaaaaagctggagaagcagaatgagcagctccggtcccgaagcggtgccgttcagggagctgggagcctgggcccaggttcacccgtgcgcgctggggctagcataccgagctctggtgcggcttcaccgcgtgggtttcccctaggcttgtctgctaaatctggcggaggccctgggtctggaccaaggcgaacttcctctgaggagttgcgagacgcaaccagtctcctggctgccggagaggggggactgctggacgaagtggaaccgttgaggccagatgaactcgaacggctgtcaggttgggaggaggaggaggagtcctggctgtattccagtcccaagaaaaagctcactcccatgcagaagtcagtctccccactcgtgtggtgcaggcaggtactcgactaccctagtcccgatgttgagtgcgccaaaaagtctttgattcacaagctggatcagacgatgagcgctttaaaacgccagaacctctacaacaaccccttcaactctatgtcctatactagcccctactcaccaaacgcatcttccccctacagcagcgggttcaactccccctctagcaccccagtaagacccccaatagtgaagcagcttatcctgcctggcaactccggaaatctcaaatcctccgataggaaccccccactcagtcctcaaagctcgatagactccgagttgagcgccagtgagttagatgaagatagcatcgggtcaaactataagcttaatgatgttacggacgtgcagattctggcacgcatgcaagaggagagtctacgtcaagaatatgccgctaccacttccagacgcagcagtgggtcaagttgcaactccaccagacggggtacattctctgaccaagagctggacgcccagagcctcgatgacgaggacgataatatgcatcatgccgtctacccagctgttaaccgcttttctccatctccaagaaactctcccaggccgagtccaaagcaatcaccccgaaactcgcccagaagtcggagtcctgcacgtgggattgaatactcccgggtgtcacctcagcccatgatctctcggctgcagcagccgagactctccctgcagggacaccccaccgacctgcagacgagtaatgtgaaaaacgaggagaagctgagaaggagcctgcctaacttatcgcggacatcgaacacgcaggtcgactcagttaagtcctcacgctccgatagtaatttccaggtccctaacggcggtatacctagaatgcagccacaagcatctgcaatcccttctcccggtaaatttcggagcccggctgctccctcgccactggcgttgcgccagcccgtgaaagccttttctaaccacggcagtggttcccccggtagtcaggagattactcagttaacccagactacaagctctcctggtccccctatggtgcagtctacagtgtcagcgaatcctccctccaacatcaattctgctacgctgactagacctgctggtaccaccgccatgagatccggcttgccaagacccagcgccccttcggcagggggtatacccgtgcctcgctcaaaacttgcccaacccgtgcgcaggtccctgccagcaccgaagacctacggttcaatgaaagatgatagctggaaggacgggtgctactag

SEQ ID NO: 27533 - DNA, 3153 bp, synthetic construct
  source 1..3153: mol_type = other DNA; note = Synthetic coding sequence
atgctttgctggggctattggtcactgggacaaccaggtatctccaccaaccttcaggggatcgtcgctgaacctcaggtgtgcggctttatctccgaccggtccgtcaaggaggtggcgtgcgggggaaaccactctgtatttctgctggaggacggcgaggtgtatacctgtggacttaatactaagggacagctgggacacgaacgcgagggaaacaagccagaacagattggtgccctggccgatcagcatataatacacgtcgcttgcggcgagagccattcactggctctttctgacagaggccagctcttcagctggggagcaggatcagacggacagctgggtctgatgacaacggaagattcagtggctgtgcctcggttaatccagaagcttaaccagcagacgattcttcaggtatcttgtgggaattggcactgcttagccctggccgctgatggccagttttttacctggggaaaaaattcccatggtcagctaggactgggaaaggaatttcccagtcaggcttcaccccagcgcgttagatccctggagggaattcccctggcacaggtggctgcgggtggcgcacattcgttcgctctctcacttagtggagcggtcttcgggtggggcatgaataatgccggtcaactcggcttaagtgacgaaaaggatcgcgagagcccttgccacgttaaactgcttagaactcagaaagttgtttacattagctgtggtgaggagcatacagcggtgctcaccaagtcaggcggtgttttcacgttcggagcaggaagttgcggccagctcggtcatgattctatgaacgatgaggtcaatcctcggagagtattggagctaatgggcagtgaagtcacccagatcgcctgtggcagacagcataccctggctttcgtgccctccagcggtcttatatacgccttcggttgtggcgcaagggggcagcttggcaccggccatacatgcaacgtgaagtgccctagtcccgtcaagggttactgggccgcacactctggacagctgagcgccagagcagaccggtttaagtaccatatagtgaagcagatattctctggcggtgatcagacctttgtgctgtgcagtaagtatgagaactattctcctgcagtcgactttcggaccatgaatcaggcccattacacatccctcataaatgatgaaacaatcgccgtttggaggcagaagctaagtgagcacaacaacgccaacacgatcaatggagtggttcaaattctgtctagcgcggcttgttggaacggaagttttctggagaagaagatcgacgaacattttaagacaagtcccaagattccagggattgacctgaattcgactcgggtcctctttgaaaagctgatgaattcacagcactctatgatcctggagcaaatcctgaactcatttgagagctgtctgattccacaattgagctccagtcctccagatgtggaagcaatgcgaatctatctgatcctcccagaatttccactgctgcaggattccaagtattacatcacactgacaatccctttagcaatggctatcctgagactggacaccaatccttccaaggtgctcgacaactggtggtcacaggtttgtccaaagtactttatgaaactggtgaacctgtataagggcgctgtgctttatctactcagaggccgtaagacatttcttattcctgtcctcttcaataattatatcactgcagccctgaagttgctcgagaaactatacaaggtcaacctgaaagttaagcatgtggaatacgacactttttatatacctgagatctccaacctcgtggatattcaggaagattacctgatgtggttcctacatcaagctgggatgaaagccaggccaagtataatccaggataccgtgaccctgtgcagttatcctttcatatttgacgcacaggctaaaactaagatgctgcagacagatgctgagttacagatgcaggtggctgtcaatggagcgaacctccagaatgtgtttatgcttctaaccctggagccactgctcgctagaagcccctttcttgttctgcacgtgcgcaggaataacttagtgggggatgccctgagagagctgtccattcactccgatattgatctgaaaaagccgcttaaagtgatcttcgatggggaggaagccgtggacgccggaggcgtgacaaaggagtttttcttgctactgctgaaggaactgttaaatcctatatacggaatgtttacttactatcaggattccaatttactctggttctccgatacatgctttgtggagcataactggtttcatctgattgggattacctgcggcctggctatctacaactccacagtcgtcgacctccatttcccactcgctctttacaagaaacttctgaatgtgaagccagggctggaagatttgaaagagctctcacctactgaggggagatccctgcaggaactgcttgactacccgggagaggacgtggaggagaccttctgcctgaacttcacaatctgtcgggagtcttacggtgttatagaacagaagaagctaatccccggtggagacaatgtgactgtgtgtaaggataacagacaagaattcgtggacgcctatgtaaattacgtattccagatatctgtgcatgaatggtatacagcttttagcagtgggtttctgaaggtgtgcggcggaaaggtcctggaactgttccagccctcggagctgagagctatgatggttggaaatagtaactataactgggaagaactggaagagacggcgatctacaaaggagattatagtgccacccacccgaccgtcaagttgttttgggaaacttttcacgaattcccattggaaaagaagaaaaagttcctactgttcctgaccggctctgaccggattcctatttatggtatggcctctttgcagatcgtcattcaatctaccgcctctggtgaagagtatctgccagttgctcacacctgctataacttgcttgacttgcctaagtactcatccaaagaaattctgtccgctcggttaacgcaggccctcgacaactatgaaggttttagtctggcttag

SEQ ID NO: 27534 - DNA, 3069 bp, synthetic construct
  source 1..3069: mol_type = other DNA; note = Synthetic coding sequence
atgtacttctgttggggcgctgatagcagggagttgcagcgcagacggacagctggatcaccgggagctgagctgctccaggccgcttcaggagaaaggcacagcttgctgctattgaccaatcaccgtgttctttcatgtggtgacaacagtcgcggtcagctcggacggaggggcgctcaacgcggagagctacctgagcccatccaggccctggaaaccctgatcgtagacttagtgtcatgcggcaaggaacattctttggcggtgtgtcacaaagggcgagtttttgcctggggggcagggagcgaagggcagcttggcattggtgagttcaaggaaattagctttactcccaagaagatcatgaccctgaatgatatcaagatcattcaggtgtcctgtggccattaccattcgctcgccttaagcaaggattctcaggtcttctcttgggggaagaattcgcacggacagctgggtttgggcaaggaatttccctcccaagcgagcccacagcgggtacggtcactggaggggatccccctggcccaggtggctgctggaggcgctcattcctttgccctgagcctgtgtggaacatccttcggatggggctcaaattcggcaggtcaactggctctgagcgggagaaacgtacctgtacagtccaacaagccactttccgttggtgcactaaaaaatttaggcgtcgtctacatcagttgtggcgacgctcatacagctgtcttgacacaggacgggaaagtgtttacattcggggataatcgctccgggcagttggggtacagccctaccccagaaaaacgcggtcctcaactcgtggaacggatcgatggactggtgtcacagatcgactgtggtagttatcatacactggcctacgtgcataccaccggccaggtggtctctttcggacatggtccctctgacacatccaagcctacgcaccccgaagctcttactgaaaactttgatatatcctgtctgatcagcgctgaggacttcgtggacgtgcaggtcaagcatattttcgccggaacatacgcgaattttgtcacgactcaccaagatacctccagcactcgtgccccaggtaagaccctgccagaaatttcgagaataagccagtcaatggcagaaaaatggattgctgtgaagcggaggtcaaccgagcatgagatggccaagagcgagatccggatgatcttttcttcccctgcttgtctgactgctagcttcctaaagaaaaggggtacaggcgaaaccacatctatcgatgtggacctggaaatggcacgcgacacttttaagaaacttaccaagaaggaatggatttcctcaatgatcactacatgtctggaggatgacctgttgcgggcactcccatgtcattctccacatcaggaggccctcagcgtgtttctcttactgccagaatgtccagtgatgcacgatagtaaaaactggaagaacctggtcgtccctttcgcaaaggccgtgtgtgagatgtcaaagcagagcctgcaagtgctcaaaaagtgctgggctttcctgcaggagtcctctttgaaccccttaatccaaatgctgaaggcagccatcattagtcagttgctccaccagaccaaaacagaacaggatcactgcaacgttaaggcgctgttgggcatgatgaaagagttgcataaggtgaataaagcaaattgcaggctgccggaaaacacgtttaacatcaatgagctcagcaacctgctgaacttttatattgacagagggaggcagctgttccgcgacaatcatctgatccctgctgagacgcctagccctgtgattttcagtgactttcccttcatcttcaactcactgtctaaaatcaaactcctccaggccgactctcatattaaaatgcaaatgtccgagaagaaagcctacatgcttatgcatgaaaccatcctgcagaaaaaggacgagttcccccctagccccagatttatcctgcgcgtacgtcgctcacgcctggtaaaggatgccctgagacagctgagccaggcagaggctaccgacttctgcaaggtcctcgttgtggaatttattaatgaaatttgcccggagtccggaggcgtgagctccgaattcttccattgcatgtttgaggagatgactaaaccagagtatggaatgtttatgtatcctgaaatggggtcatgtatgtggttcccagcaaagccaaaaccagaaaagaagcgttatttcctgtttggaatgctgtgtggcctgagcctgtttaacctcaatgtcgctaatttgccattccctctggccctgtacaaaaaacttctcgatcagaagcccagcctggaagatctcaaggagctatctcctagactcgggaaatctctccaggaggttctggatgatgcagctgacgacatcggcgatgcactttgcatcaggttctcaatccactgggatcagaacgacgttgacctaatccccaacggaatctctatcccagtagatcagaccaacaagcgggactatgtatcgaagtatatcgattacattttcaacgtttccgtgaaggccgtatatgaggaatttcagcggggattctatagagtgtgcgagaaggagattctgcgacatttctatccagaggaacttatgactgccattatcggcaacaccgactacgattggaagcagtttgagcagaatagcaagtacgagcaaggttaccagaagagtcaccctaccattcaactgttctggaaagctttccataagttgaccctggacgaaaaaaagaaattcttattcttcttgacaggaagagatagactgcatgccaggggcatccaaaaaatggagatagtgtttcggtgtcctgaaacatttagtgagcgtgaccaccccacatctatcacatgccacaacattctcagcctcccaaagtattctaccatggaacgaatggaagaagccctgcaggtggcaatcaacaacaacaggggctttgtgtctccgatgttgacacaatcatag

SEQ ID NO: 27535 - DNA, 1221 bp, synthetic construct
  source 1..1221: mol_type = other DNA; note = Synthetic coding sequence
atggcggcagctgttcggcaggatctggcacaactgatgaactcatcagggagccataaggatctggcgggtaagtaccggcagatacttgaaaaagccatccagcttagcggagcagaacagctggaggctctgaaggcgttcgtcgaggcgatggtgaacgagaatgtctcccttgtgatctcacggcagctgctgaccgacttttgcacccacttacccaacctgcccgattcgacagccaaggaaatttaccattttacgctcgagaagatccagccgcgagtcatcagcttcgaggagcaggtggcttccatccgccagcatttggcttccatctatgagaaggaggaggactggagaaatgctgcacaagtactcgtcggcatccccttagagacagggcaaaagcaatacaatgttgactacaagctggagacatacctcaagatagcacggctctatctcgaggatgacgatccggtccaggccgaagcttacattaaccgcgctagtttactgcagaacgaatctacaaatgagcagttgcagattcattacaaagtgtgctatgcccgagtactagactatcgacgaaagttcatcgaagccgctcagagatacaatgagctgagctacaaaacaattgtgcacgagagtgaaagactggaggccttaaagcacgcactgcactgtacaatcctcgccagtgcaggacagcagaggtcccggatgctggccacccttttcaaggatgagaggtgccagcaactcgccgcttacgggattctggagaagatgtatctcgaccgaatcatacgtggcaatcaactgcaggagttcgcagctatgctgatgccacaccagaaggctacaactgccgacggctcctccatactggaccgggctgtaattgaacataacctgctcagcgccagcaaactttacaacaacatcacgtttgaggagttgggcgcactgctagaaatcccggcagcaaaggctgagaagatagctagccagatgataacagagggcagaatgaatggctttatagaccagatcgacggaattgtgcattttgaaaccagggaggccttacctacgtgggataaacagatccaatctttatgcttccaggtgaacaatttattggaaaagattagccagactgcgcctgaatggacagctcaggccatggaagctcagatggcccagtag

SEQ ID NO: 27536 - DNA, 1578 bp, synthetic construct
  source 1..1578: mol_type = other DNA; note = Synthetic coding sequence
atggcagccggactgctaggctccgaagatcctccgtggtcctggaatctgacctgtagggccctccgaacgtgccaagtgagaaacatacgagtcttacagttgctactgaaaccatggtgcatctcaagggccgtgtaccagatgaccgaaggaaggagatgtcaggtacatctcttggatgatcgaaagttagaacttcttgtgcagccaaagctcctggctaaagagctgcttgacctcgtggcctctcattttaatcttaaagagaaagagtattttgggatcgcctttaccgatgagaccgggcacctgaactggctgcaattggatcggagagtcctcgaacacgattttcccaagaaaagcgggccagtggttctctatttttgcgtgcggttctacattgaaagtatctcatatttgaaagacaacgccacgattgagctgttttttctgaacgccaagtcctgcatctataaggaactcatcgatgtggactccgaagtggtgttcgagctggcgagctacattttgcaggaagctaaaggggatttttccagtaatgaagtagtccgaagcgatctcaaaaaacttcctgccttgcctactcaagcgctgaaggaacatccatccctcgcatactgcgaagacagagttatcgaacattacaaaaagctgaacggacagactcgaggacaggcaatagtgaactacatgtctattgtggagagcctccctacatatggtgtacactattatgctgtaaaggataaacagggaatcccgtggtggctagggctcagctataagggcatcttccagtacgattaccacgataaagtgaaacctcgaaaaatatttcagtggcgccagctcgaaaacctgtactttcgagaaaaaaaattcagcgtcgaagtccacgacccaagacgcgctagcgtcacccggagaacattcggccactccggcattgcagtgcatacttggtatgcctgcccagctctcataaaatccatttgggcgatggccatcagccaacatcagttttatcttgatcggaaacaatctaagagcaagatccatgccgcacgatccctgagcgagatcgctattgatctgacagagactggcacactgaaaacatcaaagctggctaatatgggctccaaaggaaagatcatttccggcagctctgggtctctgttaagttcaggatcacaagagtccgatagcagtcagtcggccaaaaaagatatgctcgccgctctaaagtctagacaagaggccctcgaagagacgttacgccaacggttggaagagttgaagaaactctgtctccgcgaagccgaactaacaggcaaactccccgtggaataccccctggaccctggagaggaacccccaatagtgcgtcgcaggatcggtactgcgttcaagctggacgaacaaaagatactgcccaagggcgaggaagccgaactcgaaagactggagcgggagttcgcaatacagtcccagataactgaggccgctaggcgcttggcctcagacccgaacgtctctaagaagctgtag

SEQ ID NO: 27537 - DNA, 1605 bp, synthetic construct
  source 1..1605: mol_type = other DNA; note = Synthetic coding sequence
atgaagcaggaaggatccgctcgcagaagaggggctgacaaagccaagccacccccaggcggaggtgaacaggagccaccaccccctcccgctccccaggacgtcgaaatgaaggaggaggccgctaccggcggagggagcacaggcgaggccgatggaaaaacagctgcagccgctgccgagcattctcagagagagctcgatactgtcacactggaggatatcaaggaacatgtcaagcagctggaaaaggccgtgagcgggaaagagcctagatttgttctccgggcattgagaatgctgccctcaacttcacgacggctgaaccactatgtgctgtataaagccgtgcagggattcttcacctctaacaatgctacgcgcgatttcctgttacctttcttagaggagcctatggacactgaagccgacctgcagtttcgaccacgaacaggtaaagcagcatcaacacccctactgcccgaagtggaggcatacctgcagctcctggttgtgatttttatgatgaatagcaaaagatataaagaggcacagaagatttctgatgatctgatgcaaaaaataagcacccagaatcggcgagcgttagatctggtggcagctaagtgttactattaccatgccagggtctatgagttcctcgataagttagacgtcgtgaggtccttcctgcatgcccgtctgagaacggcgaccctccggcatgacgctgacggccaagccaccctcctgaatttgttattgaggaactaccttcattattccctatatgaccaagcagagaaactggtgtcaaaatcagttttcccagagcaagccaacaacaacgagtgggccaggtacttgtattacaccggtcggattaaagccattcagctggagtactccgaggctaggagaaccatgacgaacgcgctacgcaaggcaccacagcacaccgcagtcgggttcaaacagaccgtccacaaactgttgatcgttgtggagctactgctcggggagattcctgaccgcttgcagttccggcaacctagtctaaagaggtcactcatgccttacttcctgcttacgcaggccgtgagaacaggtaacttggcaaaatttaaccaggtgttggatcagttcggtgagaaatttcaggccgacggcacctatacgcttattatacgactcaggcataacgtgatcaagaccggggtgcggatgatctcccttagctactcccgcatcagcctggcggacattgcgcagaagcttcagttggattcaccagaggacgcagagtttatcgtggcaaaggcaatccgcgatggcgtcatagaggcttcgattaaccatgaaaagggctatgttcagtcaaaagagatgatcgacatttattcaacccgagaaccacagctggcatttcaccaaagaatcagcttttgcctggacatacacaacatgtcggtgaaagctatgcgcttccccccaaagagctataacaaggacctcgagagtgcagaggagcgcagagagagagagcagcaagacttggagtttgctaaggagatggctgaagatgacgacgactcatttccatag

SEQ ID NO: 27538 - DNA, 1311 bp, synthetic construct
  source 1..1311: mol_type = other DNA; note = Synthetic coding sequence
atgagaagagatgtgaatggagtgactaagagccgttttgagatgttcagtaactcagacgaggcggtgatcaacaagaagcttccgaaagagcttctgctgagaatcttctcttttctcgacgtggtcacgctgtgtcggtgtgctcaggtctcccgcgcatggaatgtcttggctctggacggaagtaactggcagagaatcgacttgtttgacttccaaagagacatagaaggacgagtggttgagaatataagcaagaggtgtggaggatttcttcgcaagctgtcacttcgcggatgtctgggggtgggggacaatgcactcagaactttcgcacaaaattgtaggaatatcgaggtattgaacctcaatggctgcactaaaacgaccgacgccacatgtacgtctctgtccaagttttgctctaagttgcggcacttggacctggcaagctgtacctcaatcactaacatgagcctgaaagccttatccgagggctgcccccttttagaacagctgaatatttcttggtgcgaccaggtgaccaaggacggcatccaggccttagtgaggggctgcgggggactcaaagccttatttctgaaaggctgcactcaactggaggacgaggctttaaagtatatcggtgcacactgccccgagctcgtaactctcaatttgcagacctgccttcaaatcaccgacgaggggttgataaccatctgcagagggtgtcacaagcttcagagcctctgtgccagcggctgttccaatataacagatgccatcctgaacgctctggggcagaattgccccaggctccgtatcctggaagttgcccgatgctcccagctgaccgatgtagggtttacaacgctggcccgaaattgccatgagttggagaagatggacctggaggagtgcgtccaaatcactgacagcacattgatccaactcagtatccactgcccacgactccaggtgctgagtctgtcccattgtgaactgatcacggacgacggcatccggcacctgggcaacggtgcttgtgcccacgatcagctggaggtgatcgaattggacaactgtccactgataaccgacgcgtccctggagcatctgaagagctgccatagccttgaaaggatcgaactgtacgattgccaacaaatcacaagggccggtattaagcggcttaggacccatctaccgaatatcaaagttcacgcatacttcgctcccgtgacacctccgccaagcgtcgggggatctcgccaacggttttgccgctgttgcatcattctttag

SEQ ID NO: 27539 - DNA, 1167 bp, synthetic construct
  source 1..1167: mol_type = other DNA; note = Synthetic coding sequence
atgcgatgtctgtacggcagagtcgggggtgccagaagaaaaatggctgccagtgctgctgctgccgaattacaggccagcgggggacccaggcatcctgtttgcctccttgtcctggggatggctggctcgggcaaaacaacattcgtgcagagactgacaggccacctgcatgcccagggcaccccaccctatgtgatcaatctggatcctgccgtgcacgaagtgccattccccgcaaatatcgacattagggacaccgtgaaatataaggaggtgatgaagcagtacggactgggccctaacgggggaatcgtaacatccctgaacctcttcgccactagatttgatcaagtgatgaaattcattgaaaaggcgcagaatatgtcaaaatatgtgctgatcgatacccctggccaaatagaggtgtttacatggtcagcaagtgggaccattatcacagaggccctcgctagttccttcccaacggttgtgatctacgtgatggatacaagtaggagcacaaacccagttacatttatgtccaacatgctgtatgcttgttctatcctgtataagaccaagctcccctttatcgtcgtgatgaacaagacggacattattgatcacagctttgccgttgagtggatgcaggatttcgaggccttccaagatgccctgaaccaggaaaccacatatgtttctaaccttacccgaagcatgtcccttgtattagacgagttctacagcagcctgagagtggtgggggtttccgctgtgttgggaaccggtttggacgaactctttgtccaggtgaccagtgctgctgaagagtatgagagggaatataggcctgaatatgaacgccttaagaaatccctcgccaatgccgaatcccagcagcaaagggaacagctggagcgcctccgcaaagatatgggatctgtggcactcgatgccggaactgccaaggattcactttcccctgtcctacacccttcagacctgatcctgacgcgagggactctagatgaggaagacgaagaggcagactcagatactgatgacatcgaccatcgcgtaacagaggaatcacacgaggaacccgcattccagaatttcatgcaggaaagcatggctcaatactggaaaagaaacaataagtag

SEQ ID NO: 27540 - DNA, 1668 bp, synthetic construct
  source 1..1668: mol_type = other DNA; note = Synthetic coding sequence
atgcggctgatcggaatgccgaaagagaagtatgatccgccagaccccagacgaatttatactatcatgagcgcggaagaagtggcaaacgggaaaaagagtcactgggcggaactggaaatcagtggaagagtccggtccctctccacctcgctctggtcactgactcatctgactgcactacacctgaacgataattacctgtctcggattccccctgacattgcgaagttacacaaccttgtctaccttgacctgtcttccaataaattgcgcagcctccccgctgaactcggtaatatggtgagtctgagggaactcttactgaacaataacctgttgcgcgtgttaccctacgagcttggaagactgttccagctgcagacactgggccttaagggaaatccgctgtcacaggacatactaaatctgtatcaggatccggacgggacacgcaagctcctgaattttatgctggataacctggccgtgcaccccgagcagctgccaccacgaccttggattaccttgaaggagcgtgaccagatccttccatctgccagttttaccgtgatgtgttataacgtgttgtgcgataagtacgctacacgacagctgtatggctactgcccttcctgggctctgaattgggaatatcgcaagaagggaattatggaggagatcgttaattgtgatgccgatattattagcctgcaagaagtcgaaacagagcagtacttcacccttttcctccccgcactgaaagagaggggctacgatggcttcttctccccaaagtctagagccaaaatcatgtctgagcaagagaggaagcacgtggacggctgtgcaatttttttcaaaaccgaaaaatttaccctggtccagaagcataccgtggagttcaaccaggtagctatggccaattctgacggttcagaagctatgcttaacagagtgatgaccaaagacaacatcggagtcgccgttgtcttagaggtccacaaagaactgttcggtgccggtatgaagccaatccatgctgcagacaagcagctcttgatagttgcgaacgcacacatgcactgggaccctgaatactcggatgtaaagctgatccagactatgatgttcgtgagtgaggtgaagaatatacttgaaaaagcctctagtagacccggaagccccaccgcggatccaaatagtatcccccttgtgctgtgtgccgacctcaatagcttacccgattccggcgtggtggaatatctcagcaatggcggagtcgccgacaaccacaaggactttaaagaactcaggtataacgaatgtctcatgaatttttcatgcaacggaaagaacggaagctccgaggggagaatcacccacggttttcagctgaagtccgcttacgagaataacctgatgccgtataccaattacaccttcgactttaagggagtgatcgactatatcttctactctaagacccacatgaatgtcctgggagtgttgggcccactggatcctcagtggctggtggaaaataatatcaccgggtgtccccacccacacatcccatcggatcacttcagcctcctgacccagttagagctgcacccccctctgctgcctcttgtgaatggagttcatctgccgaatagacgctag

SEQ ID NO: 27541 - DNA, 2673 bp, synthetic construct
  source 1..2673: mol_type = other DNA; note = Synthetic coding sequence
tctagtgacagcgagattataggctatgctctcgatacgttgtacaatataatttcaaacgaggaggaggaagaggtcgaggagaattccacccggcagtccgaggacttaggtagccagttcacagagattttcattaaacaacaggaaaacgtgacattgctcctgtccctgttggaggaatttgacttccatgttcggtggcctggcgtcaagctcctgacatctttactcaaacaactaggcccacaagtgcaacaaatcattttggtaagcccaatgggcgtatctcgtctgatggacctcctggcagattccagggaagttattaggaatgatggggttcttctactccaagcactcacaagatcgaatggtgccatacagaagatcgtggcatttgagaacgcgttcgaacgccttctggatattattagcgaagaggggaattcggatggaggaattgtggttgaagactgtctcatcttgttgcagaacctcttgaaaaataacaacagcaatcagaacttcttcaaagaggggtcatatatccagagaatgaagccctggtttgaagtgggggacgagaattcgggttggtctgctcagaaggttacaaacttgcacctaatgctccagctggttagggtgctggtgagcccaactaacccacctggagccacttcgtcctgtcagaaagccatgttccagtgcggactgctccagcagctctgtacaatcctgatggctacgggtgtgccggcagacattttgaccgaaactattaacacagttagtgaagtcatccgagggtgccaagtgaaccaggactactttgcctcggttaatgcaccttccaacccccctcgacctgcgatcgtggtactgcttatgtctatggtcaacgagcggcagcccttcgtgctgaggtgtgccgtcctgtattgctttcaatgttttctgtataaaaaccagaagggacagggggagatagtcagcaccctgctgccgagcacgattgacgcgacgggcaactccgtttcagccggacagcttttgtgcggcggattattttcaacagactcgctctccaattggtgtgcggctgtcgccctggcacatgccctgcaagaaaatgctacccagaaagaacagcttctacgggtccagctagccactagtatcgggaaccctcccgtctctctcctccagcagtgtaccaatatactgagccagggcagcaagatccaaaccagagtcggtctgttgatgctactgtgtacctggctatccaactgccccattgcagtcacccactttctccacaactctgcaaacgtaccttttctcaccggccaaattgcggagaacttgggcgaggaggaacaactcgttcagggcctgtgcgccctacttctgggaatctccatttactttaacgataatagcctggagagttatatgaaagaaaaattgaagcagctgattgagaagcgaatagggaaggaaaatttcatcgaaaagcttggcttcatttccaagcacgaactgtactcaagggcatctcagaagccgcaaccaaattttccaagccccgaatacatgattttcgatcacgagttcacaaaactggtgaaagagcttgaaggcgtgataaccaaggctatctacaagagcagcgaggaggataagaaggaggaagaagtgaagaagaccttggagcagcatgacaatatagtgactcactataagaatatgattcgtgagcaggatttacagctggaagaattaagacagcaggtaagtactctgaagtgtcaaaacgagcagctgcaaactgccgtgacacagcaggtgtcccagattcagcagcataaagatcaatataacctcctaaaaatccagctgggcaaagacaaccagcaccaggggtcgtattcagaaggcgctcagatgaatggcattcaaccggaggaaattgggaggcttagggaggagatcgaagaactgaaacgaaatcaggagttgctccagagtcagctcacagaaaaggactctatgattgagaatatgaagtcctcccagacgagcggcactaacgagcagagctctgccatagtgtcggccagggatagtgagcaggtcgcagagctgaagcaggagctggccactctgaaatcccaattgaacagccagagcgtcgagatcacaaagctccagacagagaaacaggagctgctgcagaagactgaagcatttgctaaatcggtcgaggttcagggagagactgagaccatcatagctaccaagactactgatgtggaagggagactaagcgctttgctgcaggagactaaagagttgaaaaatgaaatcaaggccctctccgaagagaggacagccattaaagagcaactggattcctcaaactccaccatcgcaatactacaaactgaaaaggataagcttgaactggaaatcacggattctaagaaggagcaggatgatctgctggtgctgctcgccgatcaggatcagaagatcctttctctcaagaacaagttgaaagatcttggccatccagtagaggaagaagatgagctagagagtggggatcaagaggacgaggacgacgagtccgaggaccctggcaaggacctggaccacatctag

SEQ ID NO: 27542 - DNA, 1944 bp, synthetic construct
  source 1..1944: mol_type = other DNA; note = Synthetic coding sequence
atggccagggccggacccaggctcgtgctctccgaggaagcagtcagggccaagagtggcctgggaccccatcgggatctggctgaactgcagagcctgtccatccccggaacctatcaggaaaagattacacatctggggcacagcctcatgagcctaacgggactcaaaagcctggatttatctcggaactctctggtctccctggagggaatccagtatcttactgcgctggagagtttgaacctttactacaactgcatttcctcactggcggaagtctttagactccacgctctgactgagctcgtggatgtagacttcagacttaacccggtggtgaaagtggagccagactaccggttatttgtcgtgcacttgctgcccaagctgcagcagctcgatgaccgacctgtgagggcctctgaacggaaggcatctagactacacttcgccagcgaggattcactcgacagcaaagagtctgtccccgctagcttaaaagaaggacgaccccaccatcccagggccaagtgtactgaagcattggcaaagcagtccttggtgatggatgctgacgatgaagccgtgctaaatctgatagcggaatgtgaatgggacctcggtcggccacccggttctacttccttcagtcagaagggacgggaggctgactccagaggtagccaagaatcacgacaccttctgagtccccagttagtgcagtatcaatgtggagacagcgggaagcaagggagggagacccggagatcgtcctgccgaggatgctgcttagaaaagatgccgtggtcccaactctgcggagagcttccaccactatatggagcagagcccgaggcttcacgagctcctcgaccacatacttattttacgccccacccagatagtatggatacagaggattcagcctctagtcagaaattggatctgtcaggcgaaatggtccccggtcccctgcccgctccagggaagtgccgcaagcgacggatgcctgtcgggaggttccagacattctcagatcaggagggcttgggctgccctgaacggacacacggtagctccgttcccaaggaatccctcagtagacaagattcgagtgaatcacggaatgggaggactctgtctcagccggaagcatctgagaccgaagaacagcggtcccgaggggtgaccgacacccgcgagccgagtcctggatcccatagcgccctgcccggaaagaagaccgcgctgcaggctgcactcctcgagaccctactcgacctggtggatcgctcatggggtggatgtcgttctctgcatagtaacgaagctttccttgcacaagccaggcacatcctctctagcgttgaggagtttacagccgcacaggactcatccgcaatggtcggggaggatgtgggctcactagctctggagtccaagagcctccagtctcgcctggctgagcaacagcagcagcacgcaagggagatgtcagaggttacagctgagcttcaccatactcacaaagagctcgacgaccttaggcagcacctggacaagtcgctagaggaaaacagtcggctaaaaagtctgcttttgagtatgaaaaaggaagtgaagtctgcagacaccgctgccacgctgaacttacagatagcaggcttgcaaaccagtgtgaagagactgtgtggagagatcgtggagcttaagcagcacctggaacactatgacaagatccaggagctaacgcagatgctccaggagtctcattcatcccttgtttcaaccaacgaacacttactgcaagagctcagccaggtgagggctcagcatagggcagaggtggagcagatgcattggagttatcaggaattgaagaagaccatggctctttttccacattccagcgccagccacggcggatgccaggcatgttag

SEQ ID NO: 27543 - DNA, 777 bp, synthetic construct
  source 1..777: mol_type = other DNA; note = Synthetic coding sequence
atggctgagacagaggagcggtctctggacaatttctttgctaagagagataagaagaagaagaaggagcgctcaaatcgggctgccagtgcggctggcgcagcaggatccgccggaggtagttccggcgcagccggtgccgcaggtggcggagcaggcgctggcacccgtcctggagatggaggaacggctagtgctggcgcagccggacccggagccgctaccaaagctgtgactaaagatgaagacgagtggaaggaactggaacagaaggaagtcgattacagcgggttaagagtgcaagctatgcagatatctagcgagaaggaggaagatgacaacgagaaacgccaggatcccggtgacaattgggaggagggcggtgggggtgggggaggcatggaaaagagtagtggcccttggaacaagactgcccctgttcaagcccctcctgcgcctgtgatcgtgactgagacacctgaaccagccatgacaagcggtgtgtatcggcctcccggtgctaggctcacgacaacaaggaaaacaccacaggggccacctgagatttattccgatacacagttcccatcccttcagagtacggctaagcacgtggagtcccggaaagacaaagagatggaaaagtccttcgaagtcgtgaggcacaagaatcgcggacgagatgaggtctctaaaaaccaggccctcaaattgcagctcgacaatcagtacgccgtgctggagaatcagaaaagttcacactcccaatacaactag

SEQ ID NO: 27544 - DNA, 1077 bp, synthetic construct
  source 1..1077: mol_type = other DNA; note = Synthetic coding sequence
atggcccctcagaacttgtctacgttctgtttgctgctactttacttaatcggcgctgtgattgccggaagggatttttacaaaattctgggtgtgccaagaagtgcaagtatcaaagatatcaaaaaggcttataggaagcttgctctgcaattgcaccctgacagaaatccagatgatcctcaagcccaggagaaattccaggatctcggcgcagcctacgaagtgctttctgacagcgaaaagagaaagcagtacgacacctacggcgaagagggtctgaaggatggccaccagtcatctcacggggatatcttcagccacttttttggcgattttgggtttatgttcggcggaacaccccgtcagcaggatagaaatatacccagagggtcggacatcatagtcgaccttgaagtgaccttagaggaggtatacgcaggcaattttgtcgaggtcgtcaggaataaaccagtggcccgtcaggctcctgggaagaggaaatgtaactgtaggcaagagatgcgcaccacccagttaggacccggaaggttccagatgacccaggaggtagtatgtgatgagtgtcccaacgtgaagctggttaacgaagagaggacactggaggtggagatagagcccggagtgcgagacgggatggaatacccattcatcggcgaaggagaaccacatgtggacggcgagcccggtgacctgaggttccggatcaaagtcgtcaagcacccaatttttgagagaaggggcgatgacctttacacaaacgtgaccattagcctggtggagagccttgtcggattcgaaatggatataacccacttagacggtcataaggttcatatcagcagagacaagattactcgccctggagctaagttatggaagaaaggtgagggcctgcccaacttcgacaacaataatattaagggcagtctgatcataacgttcgacgtagattttcctaaagaacagctgaccgaagaagccagggaggggattaagcagcttcttaaacaggggtccgtgcagaaagtttataacggactacaaggttactag

SEQ ID NO: 27545 - DNA, 624 bp, synthetic construct
  source 1..624: mol_type = other DNA; note = Synthetic coding sequence
atgacttcccgcaagaaggtccttctgaaggtgattatcttgggagatagcggtgtgggtaagacctcccttatgaaccaatatgtcaacaaaaagttttcgaaccaatataaagcaaccataggggcagactttctgaccaaggaagtcatggtggacgacagattagtcaccatgcagatttgggacactgccggacaggaacgtttccagtctctcggcgttgccttttatagaggagctgactgttgcgtgttggtttttgacgtgacagcgcctaacactttcaagaccctcgattcttggagagatgagtttttgatccaggcctcccccagggaccctgagaatttccccttcgtagttttgggtaataagatcgatctagaaaaccgtcaggttgccacaaaacgagcccaagcctggtgttacagcaaaaataacattccttattttgaaacgtcagcaaaagaagctattaatgtggagcaggcctttcagaccatagctcgaaatgccctcaaacaggagacagaggtggaactttacaacgaatttcctgaacccatcaaactcgacaagaacgaccgggcaaaggcctctgctgaatcttgttcttgctag

SEQ ID NO: 27546 - DNA, 3225 bp, synthetic construct
  source 1..3225: mol_type = other DNA; note = Synthetic coding sequence
atgattccgatctgcccagtcgtgagtttcacttacgtcccgtctaggcttggcgaagacgctaaaatggctacaggcaactacttcggttttacacattccggagccgctgcagccgctgctgcagcacagtactcacagcagcccgcttccggtgtggcctacagccaccccacaactgtagcatcttataccgtccatcaggctcccgtggccgcacacaccgtgacagccgcatacgctcccgctgccgctactgtcgcagtcgcccgaccagccccagtggcagtcgccgcagcagctacagccgctgcatacggtggttacccaactgcacacaccgctacagactacgggtacactcaaagacaacaggaagcgcctcccccacctcctccagcgacgacccaaaattatcaggactcttactcatatgtccgaagcacggcccctgctgtggcatatgactccaagcagtactaccagcagccaaccgccacagccgctgccgtcgctgcagctgctcagccacagccctcagtcgcggagacgtactatcagaccgcacctaaggccggatacagccaaggcgctacccagtatacccaagctcaacagacacgccaggtgactgccatcaaacccgcaacccccagccctgcaacaactacattttccatctaccctgtgtcgagcacagtgcagccagtcgccgctgctgccaccgtcgtaccgagctacacccagagtgctacctacagcacaaccgccgtcacgtattcagggacaagctattcaggatatgaggccgcagtgtacagcgcagcttcatcctattatcagcagcagcagcaacaacagaagcaggctgctgccgcagctgccgctgctgctgctactgctgcctggacgggcacgacgtttactaaaaaagctccttttcaaaataagcagttaaagcctaagcaaccacccaagcctccccagatccattactgtgatgtttgtaaaatttcctgcgcaggaccccagacgtataaagaacacctagaaggacagaaacacaagaagaaggaggctgcacttaaggcgtctcagaatacgtctagctctaattcctccacacggggtactcagaatcagctgcggtgcgaattgtgtgacgttagctgcaccggagctgacgcctatgccgctcatatcagaggggctaagcaccagaaagttgttaagcttcataccaagctggggaagcccattccttccactgaaccgaacgttgtctcacaggcaacatcgtcgaccgctgtgagcgcgtctaagccaacagcatccccatctagtattgccgctaataactgtacagtgaatactagtagcgtggctacttcctcaatgaagggcctgacaaccacaggcaactctagcctaaatagcacgtctaacaccaaggtgtctgctgtccccacgaacatggccgcaaaaaagacaagcacccccaaaattaacttcgtgggcggaaataagttgcagtcaactggaaataaggccgaagatattaagggcacagagtgtgtcaaatccacccccgtcactagtgccgtgcagatccctgaggtgaagcaggacaccgttagcgaacctgtgacgccagccagcttggctgctctccaaagcgatgtgcagccagtgggccacgactacgtcgaggaagtacgaaatgatgaaggcaaggtcatacgctttcactgcaagctatgcgagtgcagcttcaatgacccaaacgccaaagaaatgcatttgaaagggaggaggcacaggttgcagtacaagaaaaaagtcaaccctgacctgcaggtggaagtcaagcccagcatcagggccaggaagatccaagaggaaaagatgcgaaaacagatgcagaaggaggagtactggcgacgcagggaggaagaggagcgttggagaatggaaatgaggagatacgaggaggatatgtattggcggcgaatggaagaggaacaacaccattgggacgacaggcggagaatgcctgacggcggatatcctcacggaccccctgggcctcttgggctgctgggtgttcggccaggaatgcctccacagccccagggacctgcccctctgaggcgccctgatagctctgatgatagatacgttatgaccaagcatgccactatttacccaactgaagaggagttgcaggccgtgcagaagatcgtgagtatcaccgaacgtgctttaaagctggtgtccgactctctcagcgagcatgaaaagaataagaacaaggagggcgatgacaagaaggaggggggaaaagatcgggctctaaagggagtgctgcgggtcggcgtccttgcaaaagggctgttgctgagaggcgacaggaacgtcaatttagttttattatgcagcgagaagccttcaaagactctattgtctagaatagccgaaaatctccccaaacaattggcagtcatcagcccggaaaagtatgatattaaatgcgccgtgagtgaggcagctatcatcctgaacagttgcgtcgagcccaagatgcaggtgaccattaccctgacatcccctatcattagggaggaaaacatgcgggaaggtgatgttacgagcggcatggtcaaagaccctcctgacgtgctggacaggcaaaagtgtctggatgcactggccgctttgcgacacgccaaatggttccaggctcgcgctaatggactccagagctgcgtgatcattatcagaattctccgcgatttatgccagcgcgtgccgacttggtccgacttcccaagctgggccatggagttgctggtagaaaaggccatttcaagcgcatcctcaccccagagccctggcgatgcccttcgccgagtcttcgagtgcatctcttcaggcataattctcaaaggcagccctggcctgttggacccttgtgaaaaagatcctttcgatactctcgcaacaatgactgaccagcagagagaagacataaccagtagcgctcagttcgccctgcgattgctggcctttaggcaaatccacaaagtgctggggatggatcccctccctcagatgtctcaaagatttaacatccataacaaccgtaagagacggcgagacagtgatggtgttgacggttttgaggcggaaggcaaaaaagataaaaaagactatgacaatttttag

SEQ ID NO: 27547 - DNA, 438 bp, synthetic construct
  source 1..438: mol_type = other DNA; note = Synthetic coding sequence
atgaagtttaatccttttgtgacctcagatcgcagcaaaaaccgaaagcgccacttcaatgcccctagccatgtgagacgtaagataatgtcaagccccctttccaaggagttgcgccagaaatacaatgtgcgatccatgccgatcagaaaagatgatgaagtccaggtggtaagaggccactacaagggacagcagatcgggaaagtcgtccaagtctacagaaagaaatatgtcatctatatcgagagggtccaaagggaaaaggccaatggcacaactgtccacgtaggaatacacccttcgaaggtggtgattacccgactgaaactggacaaagatagaaaaaagatcttggaacggaaagccaaaagtagacaggtgggcaaggagaaaggaaagtacaaggaagagctcattgagaagatgcaggagtag

SEQ ID NO: 27548 - DNA, 3177 bp, synthetic construct
  source 1..3177: mol_type = other DNA; note = Synthetic coding sequence
atggaggacgggacacccaagcacatcattcagatgactggtttcaagatggaggaaaaagaggctcttgtaaagctcctcctgaagctggattgtaccttcatcaagagcgagaagtacaagaactgcactcacctgattgcagagcggttgtgcaagagcgagaagttcttagccgcttgtgcagccggaaaatggattttgactaaagactacatcattcattctgcaaagtcaggcagatggctggatgagaccacgtatgagtggggatacaagatagaaaaagactcgcgatatagtcctcagatgcagtctgcgcctaagaggtggcgggaggagctgaagcgcactggtgcccctggcgctttccacaggtggaaagttgtgcttctcgttagaaccgacaaacggtctgacagcctgatccgagttttagaggcaggcaaagctaacgtgattctgccaaaatcaagtccgagtggcattacccacgtgatcgcatcgaacgcgcgaatcaaggcggagaaagaaaaggataatttcaaggcacccttttatcctatccaatacctgggggacttcctgctggagaaggagatccagaacgatgaggattcccaaaccaattcagtctggactgaacactcaaacgaggaaacaaataaagacttccgaaaggatgccggttttctggagatgaaaggtgctctcagagaaacaatgtaccggacacagaaggagatgcaaaaccacgaagatgtgaacgtcggaagtattctcatacagcaccataaaaaggaaaagttctcaggcagcagcaaggatttaaagttcgtcaaaatgcgaaacacatttggctctcatacttatgagaaccagaaggagatcaaaaaaaaagacgaggatatccagcggagctataccctgcgacgtaaacggaagaagggcaaggagagtaattgtaaaaagggagtggaacacgagaaaatcaagtcaaccttgaggcggcacatttataaccgcgaccagaaagaaatgaaaaacagtatttttgctgagtacgccaaagagtccaaagccatggccatcaagaccgacgtggacgtcgtcgagattaaaaacacactgagaaaacacatctatagggctcaggccgttcgatataactgcatcagaattgataaacagcccgtgtacaacgtcgaggttaagaacgctgaattccctcgtggggtcttgaatttgatcgaaagcctgattgaaggccacttttttaaagaggcaatcgaggagctgtccaccctgcaggcccattatatacccccagtctgtgtgcttcatgccttgcttgagaacgtgttacaggataatatcgataccttttccggacgctactttcatattctatccgccctcctccaccttcaccccccatggaaatctcctgccatgtcgagatattatctcgaacttttccagtgtccaacatgtatgaagggcgcttggagtctggtagaggtgttgatccggagctgtttgtttaatgaatccttctgccaccaaatcagtgagaacatcggcagtaaagtgttgcacctgacactgctaaagttcttctttaacttgatagagtccgaggtccagcatctttcccagaagctgtacgattggtcagactcccagaatcttaagattaccggcaaggcaatgctcttggaaatcttctggtccgggagtgaaacgagcgggctgctcacgaagccagttaacatgctactggagtggaccatatacagccacaaggagaaatttaaatcaaatgatgtcttcaaacacgaacttgcttacctgctggctgggatcctgggcgctgccattgactactggatcttccttggcctaaagatgggcagaaatgtgatgcgccatatgtcagatgacctgggctcctatgtctccttgtcttgcgacgatttcagtagtcaggagctggagatttttatctgctccttctccagttcatggttgcagatgttcgtggcagaagccgtgttcaaaaagttatgcctccagagcagtggatctgtgagctccgagcctctgtcattgcagaagatggtttacagctacctgcccgctctcgggaaaactggcgtgttgggttccggcaaaatacaggtgtccaagaagattggtcaacgaccctgtttcgacagccagcgtactctgctaatgcttaacgggaccaaacaaaaacaggtcgagggccttcccgaattgcttgaccttaacctcgccaaatgctcctcctccctgaagaaactgaaaaaaaagtcggaaggggagctcagctgttctaaggaaaattgtcctagcgtggtgaagaagatgaactttcataaaaccaatcttaagggggaaactgctttacaccgcgcatgtattaataatcaggtggagaagcttatcctccttctgtcgttgcccggaatagacattaacgtcaaggacaatgccggttggacccccctccacgaagcctgtaactacggcaacaccgtgtgtgtgcaggagatacttcagcgctgccctgaagtagacctactgactcaggtcgacggcgttacgccgctccacgacgccttgtccaacgggcacgtggaaatcggtaagttgctattacagcacggaggccctgttcttcttcagcagagaaatgcaaaaggggagctgccactggactatgtagtctcgccccagattaaagaggaacttttcgcaatcaccaagatcgaagatactgtggaaaattttcatgcccaggccgagaagcattttcactaccagcagctggaatttgggtcattccttttgagtcggatgctgctgaacttctgctccattttcgaccttagcagcgagttcattctggcctctaaaggtctgacccatctcaatgaattgctgatggcttgcaaatcacacaaagagaccacttcagttcacaccgattggctgttggacctttatgcgggtaatatcaaaacacttcagaaattaccacacatactcaaggaactgccggaaaacctcaaggtgtgtccaggcgtccataccgaggcactcatgatcacactagaaatgatgtgcaggtctgtcatggagttttcctag

SEQ ID NO: 27549 - DNA, 660 bp, synthetic construct
  source 1..660: mol_type = other DNA; note = Synthetic coding sequence
atggaacctaaggaagcaacaggcaaagagaatatggtgactaagaagaagaacctagccttcctgcgttcacgactgtatatgcttgaaaggcgcaaaaccgataccgtcgtagaatcatcagtctccggcgatcattccggcaccttgagaaggagtcagagtgatcgcacagagtataatcagaaactacaggaaaaaatgactccacagggagaatgcagtgtggcggagactttaactccggaggaggagcatcacatgaaacgcatgatggccaaacgcgaaaaaataattaaagaactgattcagaccgagaaagactatcttaacgatctggagctctgcgtaagggaggtggtgcaaccactgaggaacaaaaaaactgatcgtcttgacgttgattcattattcagtaatatcgagtcagtgcaccaaatctcagcaaagctgctgtcactgctggaagaagccactacagatgtggagcccgctatgcaggtgatcggtgaggtgttcctgcaaatcaagggtccgcttgaggatatttacaaaatctactgttatcatcacgatgaagctcattcaatccttgagtcttacgagaaagaagaggaactaaaagaacatctatcccactgtatccagagcttgaaatag

SEQ ID NO: 27550 - DNA, 3183 bp, synthetic construct
  source 1..3183: mol_type = other DNA; note = Synthetic coding sequence
atgctcatagaggatgtcgacgcactgaagtcttggcttgccaaactgctagagcccatttgcgatgccgatccgagcgcactggccaactacgttgtcgcgctggtgaagaaagataaaccagagaaggagctcaaagctttctgcgcagaccagctggatgtttttctgcagaaggagacatctgggtttgtcgacaagctttttgagagcttgtacaccaagaattatcttcctctgctggaacccgtcaagcccgagcctaaacccttagtccaggagaaagaggaaattaaggaggaagtcttccaggagccagccgaagaggagcgggacggccgaaagaaaaaatatccatctccccagaagacaagatcagagagtagcgaaagacgcacgcgtgagaagaaacgagaggatggcaagtggcgggattacgaccggtattacgaaaggaacgagctatacagggagaagtacgattggcggagaggaagatcgaaatcccgctcgaaatccaggggattgagtagaagcaggtcccgtagtcgtggcagaagcaaggaccgggacccaaatcgtaatgtggagcaccgggagcggagcaaattcaaaagcgagcgcaatgacttagagtcgtcctatgttcccgtatccgctccacctcctaacagtagtgagcaatattcaagcggagcccaatccattccatccacagtaactgtcatcgcacctgctcaccattcggagaacactacagagagctggagcaattactataataatcattcctcgtcgaatagcttcggccgaaatctgcctccaaagcgccgatgcagagattacgatgaacggggtttttgtgttcttggagatctgtgccagtttgaccacgggaacgatcccctggtcgttgatgaagtggcccttccatctatgattccatttcctcccccaccacctgggcttcccccacctccccctccaggaatgttgatgcctcccatgcccggaccaggacccggaccgggtcccggacccggacccggtccagggccaggccctggccctggtcactccatgcgcctccccgtccctcagggccatggtcaaccacctccctcagtggtgctgccgattccgaggccccctatcactcagtcctccctgatcaacagccgtgatcagcctggaaccagcgccgtgccaaacttggccagcgttggaacccgcctgcctccacctttgccgcagaaccttctttatacagtgagtgaaagacagccaatgtatagcagagaacatggggcagccgctagcgaacgtttgcagttgggtacaccacccccactactggccgctagattggtcccccctagaaaccttatgggaagctccatcggataccacaccagcgtgtctagcccaaccccactggtccctgatacatacgagcccgatgggtacaatcccgaagctccgtctattacttcgtcaggccgaagccagtaccgccagttttttagtcggacccagacccaaaggcctaaccttatcggccttactagcggtgatatggatgtcaatccacgggctgcaaatatcgtcattcaaacggaaccccctgtgcctgtatccatcaactcaaacataacccgcgtggtcctagagcctgactctagaaagcgagcaatgagtggcttagaagggcctttaaccaagaaaccttggctcggcaagcagggaaacaacaaccagaacaaacctggttttttacgcaagaatcagtacactaacaccaaactggaagtgaagaagattccccaggagctcaacaatatcacaaaacttaatgagcacttctccaagtttggtaccattgtaaatatccaggtggcctttaagggggaccctgaggctgcgcttatccaatatctcaccaacgaagaggcgaggaaagcaatctcatcaaccgaggccgtgctgaataaccgcttcatcagggtcctgtggcaccgcgagaataatgaacagcctacactccaatcgtccgcccagttactgctgcagcagcagcagacacttagccatctgagccagcagcatcatcatcttccccagcatctccaccagcaacaggtcctggtggctcagagcgctcccagcacagtccacggtggcatccagaagatgatgtccaaaccacagacttccggggcttatgtccttaacaaggtcccagtgaagcaccgtctgggtcacgctggtggcaatcagagcgacgccagccatttacttaatcagtccggaggagcaggggaggactgccagatcttcagcacgcctggccatcccaagatgatttattcaagctcaaacctgaagacacccagcaagctctgctctgggtctaaatcacacgatgtgcaagaagtgctcaagaagaagcaagaagcgatgaagctccagcaggacatgaggaagaagcgccaggaggtgctcgagaaacagatcgaatgccagaaaatgctgattagcaagcttgagaaaaacaaaaacatgaaacctgaggagcgtgctaatattatgaaaactttgaaggagctgggggaaaagatctcacagctgaaagatgagctcaaaaccagttccgccgtgtcaaccccatcaaaggttaagacaaagaccgaagcccagaaggaactgctggacaccgaactcgacttgcataagcggctctcctctggggaggatacgacggaattgagaaaaaagctcagccaactgcaagtcgaggccgctcggctcggcattctgcctgtgggccgtggcaagaccatgtcttcccaagggagaggcaggggccgtggccgaggaggacgaggcagaggctctctgaaccacatggttgtcgaccaccgtcccaaagctctcactgttggcggttttattgaagaagagaaggaagacctcctgcagcactttagcactgctaatcagggccctaagttcaaggacagacggctccagatctcttggcacaagcccaaggtcccaagtatctccacggaaactgaagaggaggaggtgaaagaagaggaaactgaaacatccgatcttttccttcccgacgacgatgatgaagatgaggacgagtatgagtcccgctcgtggcggagatag

SEQ ID NO: 27551 - DNA, 1818 bp, synthetic construct
  source 1..1818: mol_type = other DNA; note = Synthetic coding sequence
atggaggcagatatcatcacaaaccttcgctgcagactcaaagaggccgaagaggaacggctcaaagccgctcagtacgggcttcagctggtcgagtctcaaaatgagctgcagaaccagctggacaaatgtcgcaacgagatgatgaccatgacagagtcctatgagcaggagaaatacacccttcaacgggaggttgagctaaaatcaagaatgctggagagccttagttgtgagtgtgaggctattaagcagcaacaaaaaatgcacctggagaagttggaggagcaactctctagatcacacgggcaggaggtgaatgaactgaaaacaaagattgaaaaattgaaggtggaactggatgaagccagattatccgagaagcagttaaaacaccaagtggatcatcaaaaagaattgctaagttgtaaatccgaagagttgcgagttatgagcgaacgggtccaggagtcaatgagctctgagatgttggcgcttcagatcgagcttacagagatggagtctatgaagactactctgaaggaggaggttaatgagctccagtatcgtcaggagcagctggaactcctaatcacaaaccttatgcgccaggtcgacagactcaaggaggagaaggaagagagggaaaaggaagccgtgagttactacaacgcgttggaaaaggccagagtggctaatcaggatctccaggtgcagctggaccaggccctgcagcaagccctagacccgaacagcaagggcaactctctctttgccgaggtggaggacaggagagcagcgatggagcgacagctgatttctatgaaggtgaaatatcagtccctgaagaagcagaacgtcttcaacagagaacagatgcagcgcatgaaattgcagatcgcgactctgctgcagatgaaaggatctcaaaccgagtttgagcaacaagagaggcttctggcaatgctcgaacaaaagaatggggagatcaaacacctgctcggcgaaatacggaatctcgaaaagtttaagaatctgtacgatagtatggagtctaagcccagtgtcgacagtgggaccttagaggacaacacatactacactgatctcctacaaatgaaattggacaatttaaacaaggaaatcgaaagtaccaaaggagaattgagtatccagcggatgaaggctttattcgaaagccaacgcgctctcgacatcgagaggaaactctttgcgaacgaacgatgcttgcaactcagcgagagcgagaatatgaagctgcgggcaaagcttgacgaactaaaacttaagtatgagcctgaggagaccgtggaagtgcctgtgttgaaaaagagaagggaggtgcttcccgttgatattaccaccgcgaaagacgcctgtgtgaacaattctgccctcgggggtgaagtgtataggcttcctccccagaaggaagaaacacagtcgtgtcccaatagtctcgaagataataatctgcagctggagaaatctgtctcaatttacacccccgtagtgagtttatccccacacaagaatttaccagtggatatgcaactgaagaaagaaaagaagtgtgtgaaattaataggagttcccgctgatgccgaggccctgtctgaaagaagtggtaacactcccaactctccaagactcgcagccgagtcaaagctgcaaacagaagttaaagagggcaaagaaaccagctcaaagctagaaaaagagacgtgtaagaagcttcatcccattctgtatgtgagttctaagagcacacccgaaacgcagtgccctcagcaatag

SEQ ID NO: 27552 - DNA, 888 bp, synthetic construct
  source 1..888: mol_type = other DNA; note = Synthetic coding sequence
atgatggcaaagaagccccctaagcctgcaccacgccgaatcttccaggagcggctcaaaattactgccttacccctctattttgaggggtttcttctgatcaaacgctctggatacagagaatatgagcattactggactgagctccgcggaactacacttttcttctacaccgacaagaagagtatcatttacgtggacaagcttgacattgtggacctcacttgccttaccgagcagaacagcaccgagaagaactgtgccaagttcacactcgtgcttccgaaggaagaggtccaactgaaaactgaaaacacagagagtggtgaagagtggaggggctttattctcacagtgaccgagctctctgtgccccagaatgtctccctcttacctggacaggtgattaagctccatgaggtgctcgagagagagaagaaacgcaggatcgagacggaacagagcacatccgtagagaaagaaaaagaacctaccgaggactacgtagacgtgctgaatccaatgcccgcttgcttctacaccgtgtcccggaaagaagcaactgaaatgctccagaaaaacccaagcttgggcaacatgatcctgaggccgggtagtgactctcggaattactcaatcaccattaggcaggagatcgacataccacggattaaacattacaaggtaatgtccgttggtcaaaactacaccatagagctggagaagcccgtgacactcccgaatctgttctctgtgatcgactacttcgtgaaggaaaccagaggcaatcttcggccattcatctgtagcaccgacgaaaacaccggccaggaaccgtccatggagggacggtctgagaaactgaaaaagaatccacacatcgcctag

SEQ ID NO: 27553 - DNA, 4821 bp, synthetic construct
  source 1..4821: mol_type = other DNA; note = Synthetic coding sequence
atgttccacatctgcccagccgaaaacctgtatcaaaatagatttctcgggcttgccgcaatggcctccccttcacgaaactcccagagcagacgccgttgtaaagagcctctgcgctactcttacaatccagatcagtttcataatatggatcttcggggagggcctcacgacggcgtcacaattcctcgcagcacctcagacacagacctcgtcacatccgactcacgatctaccctcatggtgtccagctcttactacagcatcggccatagtcaggacctggttattcattgggacatcaaagaagaggtggatgccggtgattggatcggtatgtacctcattgacgaggtgctgtccgagaatttcctcgactataagaataggggcgttaacggctctcataggggccaaattatttggaagatcgacgcatcttcttatttcgtggagcccgaaacaaaaatttgttttaaatattaccatggggttagcggggctttgagggccacaactcctagtgtgacggttaaaaactccgcggcaccaattttcaagtccatcggcgcagacgagaccgtgcagggtcaaggctcacgcagactgatcagcttcagtcttagcgattttcaagctatgggtcttaaaaaggggatgttttttaaccctgatccttaccttaagatcagcatccagccagggaaacactccatcttccccgcactgcctcaccacggtcaggagaggcgaagcaaaataatcggtaatactgtgaaccccatatggcaggcagaacagttttcgtttgttagtctgcctaccgatgtcttggagatcgaggtgaaggataagtttgctaagagcaggcccattattaaacgctttttgggaaaactgtccatgcccgtccagcgactgctggaaaggcacgcgatcggggatcgggtcgtttcttacacactcgggagacgcctgcctacagatcacgtgtccggccagttacaattcaggtttgaaattacatcatctatccatccggcagacgatgaagagatttccctgagtacagagcccgagagcgcccagattcaggactcccctatgaataacctgatggaaagcggatctggagagccgaggagcgaggccccagagagttcggaatcgtggaagcctgagcagctgggcgagggtagcgtgccagacgggcctgggaatcagtctatagaactgtctagacccgctgaggaagcggcagtcattacagaggctggagaccagggtatggtgtctgtggggcctgaaggggctggagagctgttagcccaggtacagaaggacatacaacccgctcccagcgccgaggagctggcagaacaactagacttgggcgaggaggcttcggctctgttgttagaggacggagaggctccagcttctacaaaggaagaaccactggaagaagaggcgactacgcagagccgggctggccgagaggaggaggagaaagagcaggaagaagaaggagacgtttctacactggagcagggcgagggtaggctgcagctcagagcctccgtcaagaggaagtctcgcccatgcagcctgccagtaagtgagctggaaacagttatcgctagcgcatgcggggaccctgaaaccccccgaacccattacatacggattcacaccttgctgcactcaatgccctccgctcagggcggatccgccgctgaagaagaagatggcgctgaagaggagtcgacactgaaggactccagcgaaaaggatggactttccgaggtcgataccgtagctgctgacccatccgccttggaagaggatcgcgaagagcccgaaggcgctacccctggcacggctcacccgggtcactcaggaggacattttccaagtcttgccaatggagccgctcaagatggagacacccacccctccactggttctgaatcagacagctccccccgacaagggggagaccattcctgtgaggggtgcgatgcatcatgttgctcgcctagttgctattcttcctcctgttacagtacttcatgctactcgtcctcatgctacagcgccagctgctacagcccgtcctgttacaacggcaatagatttgctagccacactcgctttagtagcgtcgatagtgcaaagatcagtgagtccactgttttttctagccaagacgatgaggaggaggaaaatagtgccttcgaatctgtcccagacagcatgcaatcacccgagctcgacccagagtcaactaacggagccggtccttggcaagatgaactggccgctccttccggtcatgttgagagaagccctgaagggctggagagtcctgtagctgggccaagcaacaggagagagggagaatgcccaatcttgcataatagtcagcccgtgtcacagctccccagcctacgacctgagcatcaccactatcctacgattgacgagcccttaccgcctaattgggaggcgaggattgactcacacggaagggtattttacgtggatcacgtcaatagaacgacgacatggcaacggcctacagctgccgcaacaccagacggaatgaggcggtcgggatccatacaacagatggagcagcttaatagacggtatcagaatatccagcggaccatcgcaactgaaagaagcgaggaggacagcgggtctcagtcgtgtgagcaagcacccgctggaggaggcggagggggaggctctgattcagaagccgagagttcccaatcaagtctggacctcaggagagagggaagcctctctccagtcaatagccagaaaattaccctgctgctgcagtcacctgccgtaaaattcatcacgaatccagaatttttcacggtcctgcatgctaactacagtgcatatagggtgttcacctcttctacctgtctaaagcacatgattctgaaagtgcggagggacgctcgcaacttcgaacgatatcagcacaatagggaccttgttaacttcataaatatgtttgcggatacgaggctcgagttgccacgcggatgggaaattaaaacagaccagcaaggcaaaagtttttttgtggaccacaactccagagcaaccacattcattgaccccagaatccccctacagaacggtcgtctgcccaaccacctgacccacagacagcacctccagcgcctacgcagctactcagccggagaggcgtcagaggtgagccggaacaggggcgcaagtctgctggcacgccctggacacagcctcgtggcagcaattaggtcacaacaccagcacgagtctctccccctagcttataatgacaagatcgtggcttttctgagacagccgaacatctttgagatgcttcaggaacggcagccatcactggcgagaaaccacacgctccgagagaaaatacactatatcagaacggagggcaaccatggccttgagaaattatcatgtgatgccgatctggtgatcctgctatcgttgtttgaggaagaaatcatgagctatgtccccctgcaagccgcattccatcccggttactcgttcagtccacggtgcagcccatgctctagtccacaaaacagtcctggattacaacgggcaagcgcgagagccccatcgccgtatcgccgagacttcgaggccaaactgagaaacttctacagaaaactggaggcaaagggatttgggcaggggccagggaagatcaagctgataattagacgggaccacctgctcgaggggacttttaatcaggtgatggcttacagccgtaaggagctgcagcgtaataaactctatgttacgtttgtgggagaggagggcctggactatagcggcccttctagggaattcttcttcctgctgtcccaggaactgtttaacccttactacggcctgttcgaatacagcgcgaacgacacttatacggtccagatttcgcctatgtcagcctttgtggagaaccaccttgagtggtttcggttctccggcagaatcctggggctcgccctcattcatcagtacttacttgatgccttttttacgcgacccttctacaaggccctgctgagacttccctgtgacctgtccgatttggagtatttagatgaagaatttcatcagtctctgcagtggatgaaggacaataacattacagacattctcgatctgaccttcacggtcaacgaggaggttttcggacaagtgacagaaagggagttgaaaagcgggggtgccaacacacaggtcactgagaagaataaaaaggagtatatcgagagaatggtgaaatggagagtcgagcggggtgtggtccagcagactgaggcccttgttcggggattctatgaagtggtagactccaggctggtatctgtgttcgacgcacgggagctggaacttgtgatcgccggaacagctgaaatcgaccttaatgactggcgaaataacacagagtacagaggtgggtaccatgacggacatctcgtaatccgttggttctgggcagcggtcgagagatttaacaatgaacagcgtttgagattgctgcagtttgtgactggtacttctagcgtcccttatgagggcttcgccgctctgcgtgggtcaaatggcctcaggagattctgtatcgaaaaatggggcaagataacctcactgcctagagcacatacttgcttcaacaggttagatctgccaccttatcctagttatagcatgttgtatgaaaaactgctcaccgccgtcgaggaaacgtccacattcgggctcgagtag

SEQ ID NO: 27554 - DNA, 2373 bp, synthetic construct
  source 1..2373: mol_type = other DNA; note = Synthetic coding sequence
atggggactcggaaaaaagtgcacgccttcgttagggtcaaaccaacagacgactttgcacacgagatgatccgttacggggatgacaaaagatcaatcgatattcatctcaaaaaggatattcgtcggggtgtcgtgaataatcaacagacagattggtcttttaagctggacggcgtgctgcacgacgccagtcaggacctagtctatgagacagtggcaaaggatgtggtgtctcaagctctggacgggtacaatggcactatcatgtgttatggccaaactggagccggaaaaacctataccatgatgggagcgacagagaactataaacaccggggaatcttaccgagggccttgcagcaggtgtttcggatgattgaagaacgcccaacacatgcaattacagtcagagtttcatacctggagatctacaatgaatcgctttttgaccttctctccacgctgccttatgtgggaccatctgttaccccaatgacaatagtcgaaaatcctcagggagtgtttattaaggggctctcagttcatttaacaagtcaggaagaggatgcatttagtctcctgtttgaaggcgaaaccaaccggatcatcgccagtcataccatgaacaaaaacagcagtcgtagccattgtatctttacaatctacctcgaggcgcattctaggacccttagcgaagaaaagtacattacgtccaagatcaaccttgtggatttggctggatcggagcgtctgggcaaatccggaagtgaagggcaggtgcttaaggaggctacgtacatcaataagagcttgtctttcctggaacaggccatcatcgcactgggagaccaaaaacgcgatcacatcccctttcgacagtgcaaactgacccatgcactcaaagactccctgggtgggaattgcaacatggtgttggtgacaaacatctacggtgaggcagctcagctggaggagacgctatcaagcctccgcttcgccagccgtatgaaattggtgacaaccgaacctgccataaatgaaaagtacgatgccgagaggatggtcaagaacctggagaaagagttggccctgctgaagcaagagctggctatccatgattcactcaccaatcggactttcgtcacgtatgatcctatggacgagattcagatcgcagaaatcaactctcaggtcagacgctatctcgaaggtactctggacgagatcgacatcatctcattgagacagataaaagaggtcttcaaccagtttagagtagttctgagccagcaggaacaggaggtcgaatccactctaagaaggaaatacacactgattgaccgcaacgactttgccgctatatcggctatacagaaggcgggtctggtggatgtcgatggccacctggtaggagagcctgaggggcagaattttgggctgggggtggctccatttagcactaaacctggcaagaaggccaaatcaaagaagaccttcaaagagcccctgagctcccttgccaggaaggagggagccagcagtcctgttaatggcaaggacctggactacgtctctacatctaaaacgcagttggtgccttcgagcaaggacggcgatgtgaaagacatgctgagccgcgatagagagacgagtagcattgagccccttccatcggacagtcccaaggaagaattacgacccatacggcctgatactcctcctagcaagcctgttgcctttgaggaattcaagaatgagcagggctcggagattaaccgtatatttaaggaaaataagtcgatcctgaacgaaaggcgtaagcgtgcttccgagaccactcagcacatcaacgccattaagcgtgaaattgatgtgaccaaggaggctctgaacttccagaagtctttacgggagaaacaaggaaaatatgagaataagggtttgatgattatagatgaagaggaatttctcttgatcctgaagctaaaagacctcaaaaaacagtataggtctgagtaccaggacctacgagacctaagggccgagatccagtactgtcagcacctcgttgaccagtgcagacatagactgctgatggagtttgacatctggtacaacgagagcttcgtaattcctgaagatatgcaaatggctctgaagcctggtggtagtattaggcctgggatggtaccagttaacagaatcgtgtctttgggcgaggatgatcaagacaaattcagtcagctgcagcagcgtgtcttacccgaaggacctgattctatatcgttctataacgcaaaggtgaaaatcgagcaaaagcataattacctaaaaacaatgatgggtctccaacaggctcataggaagtag

SEQ ID NO: 27555 - DNA, 876 bp, synthetic construct
  source 1..876: mol_type = other DNA; note = Synthetic coding sequence
atggcatcagtcactctttcagaagcggagaaagtatacattgttcacggcgtccaggaagacctccgtgtcgatgggagaggctgtgaagactaccgctgtgtggaggtggagaccgatgtggtgtctaacacatctggatccgctagggtgaagcttgggcacactgacattttagttggagtgaaggcagagatggggacaccaaagttagagaaacccaacgagggttacctagagttcttcgtggattgttcagcctcagccacccccgaatttgagggacggggaggggatgatctcggcaccgagattgcaaacacactgtaccggatcttcaataacaagagctcagtcgatctgaagaccctgtgtatctcccctcgcgagcactgttgggtcctgtacgtggatgtgctcttgctcgagtgcggcggtaacctcttcgatgctatttccattgcagtgaaagcagccctgtttaacactcgaattccgagggttcgagtgctcgaagacgaagagggatcgaaagacatcgagttgagcgacgatccctacgattgcattcgactttccgtcgagaatgtgccctgcattgtcactctttgtaagataggttaccgacacgtggtggatgcaactctgcaagaggaagcatgcagtctggcctcgttgctggtctccgtgactagcaagggcgtggtgacatgtatgaggaaagtagggaaaggcagccttgaccctgagagcattttcgaaatgatggagacagggaagcgcgtcggaaaagtgctgcatgcaagcctgcaatccgttgtacacaaagaagaaagcctgggcccaaagagacagaaggtgggttttctgggatag

SEQ ID NO: 27556 - DNA, 2382 bp, synthetic construct
  source 1..2382: mol_type = other DNA; note = Synthetic coding sequence
atgttctggaagtttgacctgcactctagctcgcatatcgacactctcctcgaacgcgaggatgttacccttaaggaactcatggatgaggaggacgtactgcaggaatgtaaagcacaaaatcgcaagctcattgagtttctgttgaaggctgaatgcctagaggatttagtcagctttattatcgaggaacccccacaagatatggatgagaagatcaggtacaagtatcctaatattagctgtgagttgctgacgtcagacgtcagccaaatgaacgaccgcctgggggaggatgagtctctcctgatgaagctctatagcttcctgctgaacgattcacccttgaatccgcttctggccagttttttttccaaggttctctcgatcctaatctccaggaagcccgagcagattgtcgatttcctgaagaagaaacacgactttgtcgatctcataataaaacatattggcacgtccgcaattatggaccttttactgcgattgcttacatgtatcgagccaccacagccccgacaggacgtgctgaactggctcaatgaggagaaaatcatccagcgtctggtggagattgtccatccgtctcaggaggaagaccgccattcaaatgcttcgcagagtctttgtgagatcgttcgactcagtagagatcagatgttacagattcaaaactctactgagcccgatcccctgctcgcaaccctggagaagcaggaaatcattgagcaactactttcaaacatctttcacaaggagaagaatgaaagcgccatcgtgtctgctatccagattcttttgacgctcctggagactaggcgaccaacatttgaaggtcacattgaaatatgcccgccaggcatgagccactccgcctgctctgtgaacaagtcagtgcttgaagccatccgagggaggctgggcagtttccatgaactccttctggaacccccaaagaatatgttctttaaatacacatggaataatttcctccacacccaggtcgagatttgcattgcattgatactggcgagcccattcgagaacactgagaatgccacaatcactgaccaggattctacaggcgacaatttactgttaaagcatctgtttcagaaatgccagctgatcgagcggatactagaagcgtgggagatgaatgaaaagaaacaagccgaaggaggcaggagacatggctacatgggccacctcacacgaattgcaaactgcattgtccactcaacggacaagggcccaaattccgctctcgtacagcagttgattaaggacctgcctgacgaggttcgtgagaggtgggagacattctgcaccagcagtctgggggagaccaataagaggaatacagtcgatctggccttttccgattaccagatgcagcagatgacctcaaactttatcgatcaatttggatttaatgacgagaaatttgctgatcaggatgacatcggtaatgtctcattcgacagagtgtccgatatcaatttcacactcaataccaacgaatcggggaacatagctctgttcgaagcctgttgcaaagaacgaatacagcagttcgatgatggtggcagcgatgaggaggatatctgggaggaaaagcacatagcttttacacctgagagtcaaaggagatctagcagcggatctacagacagtgaggaatcgaccgattcggaggaagaagacggcgcaaagcaggacctctttgagccctccagcgctaataccgaagacaaaatggaggtggacctcagcgagccaccgaactggagtgctaactttgatgtgcccatggaaaccacgcacggagcaccactagactctgttggaagcgatgtgtggtccacagaggaacccatgcccactaaagaaactgggtgggcatcattttctgagtttaccagctctctgtcaaccaaagactccctgcgttctaatagcccagtcgaaatggagacttccactgagcctatggacccactgactccgtcagctgctgccctggccgttcagccagaggccgcaggcagcgtcgctatggaggcctcctccgacggcgaagaggatgccgaaagtactgacaaggtcaccgaaaccgtgatgaacggaggtatgaaggagacacttagtctgacggtcgatgctaaaacagaaactgctgtctttaaatcagaggagggcaaactcagcacttcgcaggatgctgcttgcaaggatgcagaggaatgcccggaaacggccgaggccaaatgtgccgctccacgcccaccctctagcagccccgaacagagaacagggcagcctagcgctccgggtgacacttctgtcaatggacccgtgtag

SEQ ID NO: 27557 - DNA, 3375 bp, synthetic construct
  source 1..3375: mol_type = other DNA; note = Synthetic coding sequence
atggaccctttcacagaaaaacttctggagagaacccgtgcacgaagggaaaatctgcaaaggaaaatggccgagcggcctactgctgctccgcgaagcatgactcacgccaaaagggccagacaacctttaagcgaagcctccaatcaacagccactgagcggcggagaagaaaaaagctgtacaaaaccctccccctctaaaaaaagatgctctgacaacacagaagttgaggtttctaatctggagaataaacagccagtggaatccacttctgccaaatcgtgttcccccagccccgtgtctcctcaggttcaaccccaggccgcagatactatctctgatagtgtagcggtgccggctagcctccttgggatgcgcagaggattgaattctaggttggaagccaccgcagcaagctccgtcaagacacggatgcagaagctggctgaacaacgacgtcgctgggacaatgatgatatgaccgacgacattcctgaatccagcttattttcccctatgccatccgaagagaaggctgctagcccacctcggccactgctttccaatgcctccgctaccccagtgggacgtcgcggtaggctggccaatctggctgctaccatctgcagttgggaggacgacgtgaatcatagttttgctaagcaaaactccgtccaggagcagcctggaactgcatgcttgtcaaagtttagctcagcttcaggtgcgagcgccaggataaattctagctctgtgaagcaggaagctaccttctgcagtcagcgcgacggagacgcatcacttaataaagcactatcttcatccgccgatgacgcttcactggtgaacgccagcatcagcagttcagtgaaagctacatctccggttaaatcaaccacctccatcacagatgcgaaaagttgcgagggacagaatccagagcttctgcctaagacccccatttctcctcttaaaaccggagtgagcaaacccatcgttaaatcaaccctcagccagacggtaccctccaaaggcgagcttagcagggagatttgtcttcaatcacagagtaaagacaaatcaacgacacccggaggtactggaattaagcccttcctggagcgattcggcgaaagatgtcaggaacacagcaaagaaagcccagcacggagtacccctcatcgaacacctataattaccccaaacacaaaggccatccaggagcgcctctttaagcaagatacttcttcctcaaccactcacctggcacagcaacttaaacaagagcggcagaaagagctggcttgtctaagggggagatttgataaaggcaatatctggtccgccgagaaagggggaaacagcaaaagcaaacagctggagacgaaacaggagacccattgtcagagtacccctctaaagaaacatcagggagtctcgaaaactcagtcgctgcccgtgacagaaaaagttacagaaaaccagattcccgcaaagaatagcagcacagaacctaaaggcttcactgaatgcgaaatgactaagagctcccctctgaaaatcactctgtttcttgaagaagataaaagcctcaaagtcacttccgaccctaaggttgaacagaagatagaagtgatacgggaaatagaaatgagtgtcgatgacgacgatatcaactcaagcaaggtgattaacgacctatttagcgatgtgctcgaggaaggcgaactagatatggagaagtcacaggaggaaatggatcaggcactggctgagtcctcagaggaacaggaggatgcactgaacatctccagtatgtcgctgctagcacccttggcccagacagtcggagtcgtgtcccctgagtctctggtgtcaaccccccgattggagctgaaggacaccagcaggtcagatgagtctcccaaacctgggaaattccagcgcaccagggttccccgtgccgagagcggggactcactcggaagcgaggaccgtgacttgctatattccatcgatgcatacaggtcccagcggttcaaagagacagaacgcccaagcatcaaacaggttatcgtacgcaaggaagacgtgacgtctaagcttgacgagaaaaataatgcctttccctgccaggtcaatattaagcagaagatgcaagagctgaacaacgaaattaatatgcaacaaactgtcatctatcaggcctcccaagcattgaactgttgcgttgatgaagaacatggaaagggttcgctggaggaggcagaggcagaaaggttactgctgatagccactggaaagagaacactcttaatcgatgaactgaataagctcaaaaatgaaggccctcagaggaagaacaaagcctctccccagagcgagtttatgcctagcaaaggttccgtgacactgtcagagatcagactgccacttaaggctgatttcgtgtgctctacagtgcagaaaccagatgcagccaactactattatcttatcattttaaaggccggagccgagaacatggtagccacacctttggcaagcacaagcaattccctcaacggggatgccttgacattcaccacaacatttacccttcaggatgtttccaatgactttgaaatcaatatcgaagtatactcgctcgtgcagaaaaaggacccatccggccttgataaaaagaagaagacatctaaatctaaagccatcactcccaagcgtcttctgacatccataaccactaaatctaacattcactccagtgtgatggcaagtccaggtggtctttcagccgtgaggacatccaatttcgcactcgttggttcttataccctgtcactctcaagtgtaggcaatacgaagtttgtcttggataaggtgccttttttaagctctttggagggccatatttacctgaagatcaaatgccaggtcaactcatctgtggaggaaaggggcttcctgactatctttgaagatgtcagcggcttcggagcctggcataggaggtggtgtgtcctttccggcaactgtatttcttattggacatatcctgatgacgagaaaaggaagaatcccatcggtagaattaacctcgccaattgtacaagccggcagatcgagcccgcaaatcgcgaattctgtgcaaggaggaacacatttgagttgattacagtccgaccgcagagggaggacgaccgcgaaactctggtctcccagtgtagagatactctatgtgtgacaaaaaactggctgagtgccgacaccaaagaggagagggacctgtggatgcagaaactcaatcaggtcctcgtggatatccggctctggcaaccagacgcctgctacaaacccattgggaaaccctag

SEQ ID NO: 27558 - DNA, 1365 bp, synthetic construct
  source 1..1365: mol_type = other DNA; note = Synthetic coding sequence
atgctgaaacaaatcctgagcgaaatgtacatcgatcctgatttactggcagagctgagtgaagaacaaaagcagattctcttcttcaaaatgcgagaggagcagatccggagatggaaggagcgcgaagcagcaatggagcgtaaggaaagtctccccgtgaaacctaggcctaagaaagaaaatggcaagtcggtgcattggaaactgggagcagacaaagaagtgtgggtgtgggtcatgggggaacatcatctcgacaagccatatgacgtattatgtaatgaaattatcgctgaaagggcacggctcaaagcagagcaggaagcagaggagcccaggaagacccatagtgaagagtttaccaattctttaaagacaaaatcccagtaccacgatctccaggctcctgacaaccaacaaacaaaggatatctggaaaaaagtcgccgaaaaagaggagttggagcaggggagccgtcctgctcctaccttagaagaagaaaagatcagatccctgtcctccagctctcgcaatattcaacagatgctggccgactctatcaaccggatgaaagcttatgcattccaccagaaaaaagaatccatgaaaaaaaaacaggacgaggaaataaaccagatagaggaagaacggacaaaacagatttgcaagtcctggaaggaggatagtgaatggcaggcaagcctgagaaaatccaaggctgccgatgagaagcgacgcagtctagccaagcaagcccgtgaagactataagcgactgtctctgggagcccaaaaaggtaggggaggtgaaagacttcagagcccacttcgggtccctcaaaagcctgagcgtcctcccctgccccctaagccccagttccttaactcaggcgcttacccacagaagcctctgcgaaaccagggggtcgtgagaaccctttcatcgagtgcccaggaggacatcatccgttggttcaaggaggaacagttgcctctgagggcgggataccagaagacgtctgataccatagctccttggtttcatggtattctcaccctaaagaaggccaatgaattgttgctgagcacgggaatgccgggatcttttttaatccgagtcagcgaacgcataaagggttacgcgctgagttacctgtctgaggacggatgtaaacacttcctcatagatgcctccgcagatgcctactcttttcttggcgtagaccagctgcagcacgcaaccctggctgacttagtggaataccataaagaagagccaatcacttcactggggaaggagcttttactatacccatgtggacaacaggaccagttaccagactatctggaactgtttgaatag

SEQ ID NO: 27559 - DNA, 1497 bp, synthetic construct
  source 1..1497: mol_type = other DNA; note = Synthetic coding sequence
atggacgagacagagtggattcataggcatcccaaggcagaggacttgagagtcggattaattagttgggccggtacctatctgacgttcgaggcctgtaagaatactgtgacggccacggcgaaaagtctggggagacgccagacttgggagattttagtgagtaacgaacacgagacccaggctgtcgtccgcctcaagtccgtgcagggtttgtacttgctgtgtgagtgcgatggaacagtgtgctatgggaggcccagaacctcccatcatgggtgcttcctcctcagattccacagaaatagtaagtggactctgcaatgcctgatcagcgggagatatctcgagtcgaatggcaaagacgttttctgcacgtctcatgtactgtctgcttaccacatgtggacacccaggcccgcactgcatgtacatgtcatcctttactctcctattcaccgctgctacgcgagggcggatcctacaatgggcaggatctgggtcgatgctgcagtgccttgtctggaagaatgcggcttcctgcttcatttccgcgacggctgctatcatcttgaaacatccacccaccacttcctaagccatgtggataggctattctcacagccttcgtcccagaccgcattccacatgcaagtgcgtcctggcggattggtggccctgtgcgatggcgaaggaggtatgttgtaccctcagggtacccatctgttacttgggatgggctgtaatcccatgagaggagaggagtggttcatcctgcagcattgccctacctgggtgagtctgcgctccaagacaggcagatttatttcagttatctacgatggcgaagtccgagccgcttccgagcgattaaacagaatgtctttattccagtttgaatgtgacagtgaaagtccaactgtacagcttcgctctgcaaacggctactatctgtcgcaaaggcgtcatagggctgtgatggctgacggtcatccactggagtctgacacattttttagaatgcactggaattgcggcagaatcatcctgcagtcttgtcggggaaggtttctgggaatcgccccaaactccctcttgatggcaaacgtaatcctgcctggtcccaacgaagagtttggcattctcttcgccaatagaagcttcctggttctgagagggaggtacggttacgttggttcaagttctggccacgacttgattcaatgtaatcaggaccagcctgaccgcatccatctgctgccgtgtcggccaggaatataccacttccaagctcagggaggatccttttggtctatcacttcatttggcactttcagaccatggggcaagttcgctctgaatttttgtattgagctccagggatccaatctgctgaccgtgttagccccaaacggcttctacatgcgcgcagaccagtctggaacactcctagccgacagcgaagacataaccagagagtgtatctgggaattctag

SEQ ID NO: 27560 - DNA, 1377 bp, synthetic construct
  source 1..1377: mol_type = other DNA; note = Synthetic coding sequence
atggagcgtgagccatcggcctctgaggcagccccagccgctgcagcgctcttcgcatggggggcaaactcttatggtcaattgggacttggtcacaaagaggatgtgttattaccacagcaactgaacgatttttgtaagcccagatctgtgagaagaatcaccggaggaggaggtcactctgctgtcgtgacagatggaggtgatttgttcgtgtgcggtcttaacaaggatggacagctggggctggggcacacggaggacatcccctattttacgccgtgtaaaagcctgttcggctgtcccattcagcaggtagcttgtgggtgggatttcaccattatgctgacggaaaatggtcaggtcctgtcctgtggctccaactccttcggacagttaggcgtgcctcacgggccacgaaggtgtgtggtcccccaagccattgagctgcataaggaaaaggtcgtatgcattgcagctggactgcggcacgctgttgcagcaactgctagtggaatcgtgtttcagtggggcaccggcctggcttcctgtggcaggaggctgtgcccaggccagaccctgcctcttttcttcactgcgaaggagccctcaagagttactggattggagaactctaaagccatgtgcgttctggccggatctgaccacagcgcttctctcacagacgctggagaggtatacgtttggggaagcaacaaacacggtcaacttgccaacgaagccgcttttttgccagtgccacagaaaattgaggctcattgctttcagaacgagaaggtaaccgctatttggtccggatggactcatctggtggcccagacagaaacaggaaaaatgttcacttggggccgtgccgattacggtcagctgggcaggaagctcgagacatatgagggatggaaacttgaaaaacaggactcttttttaccatgtagccggcctccaaacagtatgccctcctctcctcactgcttaacgggagccacggaggtcagctgcgggtctgaacataatctggctattattggaggcgtctgctactcctgggggtggaatgaacacgggatgtgtggagacggaactgaagctaatgtttgggccccaaagcctgtgcaggctttactaagcagtagtggcctgctagtgggatgcggcgctggtcacagcctggctctctgtcagctgccggctcatcctgccctggtgcaggacccaaaggtcacatacctcagtcccgacgccatcgaggatactgagtcccagaaggccatggacaaggagcgcaactggaaggaacgccaaagtgaaacgagcacccagtcccagagtgactggtcccggaatggtggactgtag

SEQ ID NO: 27561 - DNA, 2961 bp, synthetic construct
  source 1..2961: mol_type = other DNA; note = Synthetic coding sequence
atggagcgcatgaattggctgagtcggctggcctcaagggggccaggtcacaggataccccaaggcgcaaatctgcagacgcctgtcatggccgacccagaaacctgtctcatggtgtttaagaaccattggtctcaggtggttcgtatcctggagaggcaaggtcccagagcagcccctggcggtgctgacgatctctcagcggttcgtaatcacacatatcagatgttgactctgctggccgaggatagagccgtgccgtcagctccaacagggcctggacctttgttagagttcgcgttgcatgaggaccttctcactcgcgtactgacatggcaactgcagtgggacgagctgggggatggtgtcgaagaaaggcgcgctgaacagctgaaactgttcgaaatgctggtgtccgaagcaaggcagccactcctgagacacgggccagtaagggaagcgctcctcacgctgttggacgcgtgtggcagacccgtgcccagtagtcccgctctggacgaaggtctggtcctgctgctgtcacagttgtgtgtgtgtgtagctcaggagccatccctgctggaattctttctgcagcctcccccagaacccggagctgccccaaggctccttctgttctcaagactggtgccattcgtgcaccgcgagggtaccctcgggcagcaagcccgtgatgctctcctcctgttgatggccctgtccgcaggaagcccaacagtggggcgttatatcgccgatcatagctatttctgcccagtgttagccactggattgtccgccctgtacagcagcctgcctcggaagatcgaggtgcccggtgatgactggcattgtctgcgcagagaagactggctgggggtgccggcactcgctctgtttatgtcaagcctggagttttgcaacgctgtgattcaggttgcgcatccgctggttcagaaacagctggtggattacattcataacggcttcctggtgccggtgatgggaccagcattgcacaagacatccgtcgaggagatgatcgcttctaccgcatacttggaactttttctcaggtctattagcgagcccgcattattacgcacgttcctccggttcttgctgctgcaccgccatgacacacacacaattttggatacactggtggcacgcattgggtccaacagtaggctgtgcatggtttctctgtctttgttccgaacgctgctgaacttatcatgcgaagatgtattgctgcagctagtcctgcggtacctggttccgtgtaatcacgtgatgctgtctcagaagcccgctgtgagggacgtagatctgtacggccgagcagccgataaattcctgtctttaatcccccgatgttgtagacatcatgcgccaagtccccctaggcccgaacacgcgagctgggcacggggtggtccctctagagagacaggaagacgagaggacattactggcccaggctccccttcagttgacagttcttcagtgactacggtccccaggccttcgaccccctctcggctggcccttttcctccgacagcagagcttaggcggaagcgaatcccccggtcccgctccttgctccccgggacttagcgcaagccccgcttccagcccgggacggaggcccaccccagccgaagaacccggtgaactggaggataattacctggagtacctgcgagaggcaaggaggggcgttgacagatgcgtccgcgcatgccggacctggagcgcaccatacgatggggagagaccaagccccgagcccagccccttcggatctcgaaccaaaaagaggtcgctgctgccggaagaggacaggaataatgttggcgaaggagaagaggaggaattggggaggcgtggtcgcgctggcggagccggtgagggacccggtcacttgccaccaccccagctgaatggggtacctggcagttggcctgagggcgcaaagaaggtacggctggtaccgaaggagggagctggggaactgttagaagggatttcagaggggatggcgggattagagggtttcgggcaggagctccgcgaactcgaggttgctctgagcaatggcggaactggctcggaatctcccctggagcctccactcccattagaggaggaagaagcatacgagtccttcacgtgccctccagagccaccaggacccttccttagttctcccttgcgtacactgaaccagctgccatcccagccctttactggcccttttatggccgtgctcttcgcaaaactcgaaaatatgttgcagaattctgtgtacgtcaattttcttctaaccggcctggtggctcaattggcttgccacccccagcccctgcttcgatctttcctgttgaacacaaatatggtgttccagcccagcgtgaagtctctcttgcaagtcttaggaagcgttaaaaacaaaattgaaaactttgcagcctcacaagaagatttccccgctcttctatcgaaagccaaaaagtatctcatcgcacgaggtaaattggactgggctgagggccctgctgctggtcccgctcccaggcgcagtgacccactggtgaaaagcaggcggccaagcttaggcgagctcttgttgaggcacgctcactcgccaactagggcaagacaggctgctcagctggtgctacagcctggaagggacggagccggactcggacttagcgggggaagcccaggcgcttccacgcctgttctgctgacccgcggtggcgcacctgaacggcaaggtgaggcgctgagagtcaaaaacgctgtgtattgcgctgtgatattccccgaatttctgaaggagttggctgcgatatcccaagcccacgccgtgacatctccctttctcctcgaaacctctgaagaggggagtggtccacttatctcaggctgtggacctcttaacccatag

SEQ ID NO: 27562 - DNA, 6723 bp, synthetic construct
  source 1..6723: mol_type = other DNA; note = Synthetic coding sequence
atggatgataagggcgatccgagcaatgaagaagcaccaaaggcgatcaagcctacttccaaggagttcaggaagacatggggcttccggagaacaactatagctaagagggagggagccggagacgccgaggcagaccccctcgagcctccccctcctcagcagcagctgggcctgtccctgcgcaggtccgggagacagcccaagaggactgagagagtggaacagttcctgactattgccagacgcagggggaggcgctccatgcccgtcagcctggaagattctggtgaacccacctcgtgtcctgccacagatgcagagacagcatccgagggtagcgtcgaatctgcatctgaaacgaggagtggacctcagtctgcatctaccgcagtaaaagagaggcccgcttcctccgagaaggtgaagggcggagatgaccacgacgacacttccgattcggacagtgatggcctgacactcaaggagttacagaacaggctacgtagaaaaagagaacaggagcccactgaacgccctctaaaagggatccagtcccggctccgcaagaaacgccgagaggagggccctgcagaaactgtgggtagcgaggcaagcgatacagtcgagggggtgcttccaagtaagcaggagcctgaaaacgaccaaggtgtggtgagtcaggcaggtaaagatgatagagagagcaaacttgaagggaaggctgcacaggatattaaggatgaagaacccggtgacctgggaagaccaaagccggagtgcgaaggatatgatcctaacgccctgtactgcatctgccgccagcctcacaataaccgttttatgatatgttgcgaccggtgcgaagaatggttccatggggattgcgtaggcatcagcgaagccagagggcgtctcctcgagcgtaatggtgaggattatatctgtccaaattgcaccatccttcaggtgcaagacgaaactcactccgagacagccgaccagcaggaggctaagtggcggcctggtgatgctgacgggactgactgtacctccataggaacgattgaacagaaatcgtcggaagatcaaggaatcaaaggccgaatagagaaggcagctaatccatccggcaagaagaaacttaaaatctttcagcccgtgattgaagcgcctggtgccagtaaatgcatcggtccaggctgctgtcacgttgctcagccagactccgtgtattgttccaacgactgcattttgaagcacgccgctgccacgatgaagttcctctctagtggcaaggagcagaaaccaaaaccaaaagaaaaaatgaaaatgaaacccgaaaagccctccctgcccaaatgtggcgctcaagctggtatcaagatctcttcagtgcataaacgccctgcgccagaaaagaaggaaactaccgtcaaaaaagccgtcgttgtgcccgcaaggagcgaggctctgggaaaggaggctgcctgtgagtctagcacgccatcatgggcatctgaccataattataacgccgttaaaccagagaaaaccgcggcaccaagtccatctctcctgtacaaaagtacaaaagaagaccggaggtccgaggagaaggccgctgcgatggccgcttccaaaaagaccgcaccacctgggtcagccgttggcaagcagccggcaccacggaacctagtgccaaaaaagtcctcatttgctaacgtcgcagctgctacccccgctatcaaaaaacctccttctggctttaagggcacaatacccaagaggccatggctgtctgccaccccatcctctggagcctctgccgctaggcaggccggaccagcgcctgcagcggctaccgctgcttccaaaaagtttcccggtagcgccgcactggttggggcagtgaggaagccggttgttccttccgtacccatggcaagccccgctcctggtcgcctgggtgccatgtccgcggcaccgagccaacccaactcgcagataaggcagaacatccggagaagtctgaaggagatcctctggaaaagagtcaacgactcagatgacttaatcatgaccgaaaacgaggtagggaagatcgctctgcatatcgaaaaggagatgtttaacttatttcaggtgacagataataggtataaaagcaagtacagaagcatcatgtttaacttgaaggatccaaagaatcagggcctgtttcatagggtactgcgagaggagatctccctcgccaaactggtaaggctcaagccagaggagctggtaagcaaagagctgagcacgtggaaggagagacctgctcgctccgtgatggagagccgcactaaactacacaacgaaagcaaaaaaaccgccccacggcaggaggccattccggacctggaggattcacccccagtttctgattctgaagagcagcaggaatccgcgagagctgtgcccgaaaaatccacggcacctctgctagacgtgttcagttcaatgctcaaggatacaacgagtcagcatcgcgcacatcttttcgatctcaactgcaagatctgtaccgggcaggtgccgtcagctgaagatgaacccgcacccaagaaacaaaaactgtccgcatctgtcaaaaaggaagacttgaagagtaagcacgattcgtccgctcctgaccccgctcctgattctgccgatgaggtgatgcccgaagcggtgccagaagtagcctccgaacctggcctggagtctgcctcacatccaaacgtcgacagaacgtactttccgggaccaccaggcgatggtcatccggagccatccccgctggaagatctgtctccctgtcctgcgagctgcggatccggggtggtcacaaccgtaactgtgtccgggcgtgatccgaggaccgcccctagctcatcctgcacagccgttgctagcgccgcaagccgccctgactccacccacatggtcgaagctcgccaggacgtgccaaaacctgttctgacgtcggtaatggtgccaaagtcaattttggcaaagccgagcagttcccctgacccgcgttatctctctgtccctccatcccccaatatctcaacatctgagagcagatctcctcctgagggcgacaccactcttttcctgtctagactgtctacgatctggaaagggtttataaacatgcagtccgtcgcgaagttcgtgactaaggcttaccccgtttccggctgttttgactacctttccgaggacctcccagatacaatccacattggcggtaggattgctccaaaaacggtgtgggactatgttggaaagctgaagagctcagtgtcaaaggaactctgcttgatccggtttcacccagctacagaagaggaggaggtggcctacatctccctttattcctacttctccagcagaggacgttttggagttgtcgcaaataataatagacacgtgaaagacctctatctgatccccttgagcgcacaagaccccgtgccttcaaaactcttgccttttgaggggccagggctggaaagtcctcgacccaacatcatcctgggtttggtaatttgtcagaaaattaaacggcctgcgaacagcggcgagttggacaagatggatgagaagaggacgcgcctgcagccggaggaggccgacgttcctgcctaccccaaggtcgctaccgtgccacagtcagagaagaagccttccaaatatccgctatgctctgcggatgctgccgtgtctacaacacccccaggtagccccccacctccaccacctttgccagagccccctgtgctcaaagttctgagcagcctcaagcctgctgccccatcacccgctacggcggctacaactgcagcagctgcctcaaccgccgcttcatccacagcgtcaagcgccagtaaaaccgcctctcctctggagcacatcctccaaacactgtttggcaagaaaaagagttttgatccaagtgctcgcgaaccccctggcagcacagccggactccctcaggagcctaaaaccacagccgaggacggggtgcctgcaccacctctattggacccaatcgtgcagcagttcgggcaattcagcaaagacaaagctctggaagaggaagaggatgaccgaccttatgatccggaggaagagtatgacccagagagagcatttgacacacagctggtagagcggggaaggagacacgaggttgagcgcgcacccgaagccgcagccgcagagcgagaggaggtggcgtacgacccggaggatgagactattctggaggaagctaaagtgaccgtagacgacctgcccaatcggatgtgtgctgatgtgagacgaaacagcgtagagcgaccagcagaaccagtggccggtgcagctacacctagtctggtcgagcagcagaagatgctcgaggaactcaataagcagatagaggagcagaagcgtcagctggaagagcaggaggaagctctgagacaacaaagggcggctgtgggtgtctcgatggctcatttcagcgtgagcgatgccctgatgtcacccccaccaaagtcttcactgccaaaggcagagctctttcagcaggagcagcagagtgctgataagccagcatccctcccgccagcttcacaagccagcaaccacagagatcctagacaggcaaggcggctggctaccgagacaggtgaaggggaaggtgagcctcttagccggttgtccgccagaggcgcacagggcgcactgcccgagcgagacgcatccagaggcggactggttggccaagctccaatgcccgtccctgaagaaaaagaaccagcaagctccccgtgggcctctggcgagaagccaccagcaggaagcgagcaggacgggtggaaggccgaaccaggagaaggaacaaggcctgcaactgtgggcgattcctccgcccgacccgctcgacgggtactattgcccacacctccttgtggagcactccagcccggatttcccttacagcatgacggtgaaagggaccccttcacatgtcccggttttgccagtcaggacaaggcccttgggagtgcacagtatgaagacccgaggaacctgcattcagccggtagatcgagctcgcctgccggagagaccgagggggatcgagagcctcaggccaggcctggagaagggactgccccactgccaccccctggccaaaaagtagggggttcccagccgcctttccagggccagagggaacctggaccccatgccctaggaatgagtgggctgcacggccctaacttcccaggccctcggggacctgctccgccatttcccgaagaaaatattgcctccaatgatggtccccgtggtcctccaccagcgagattcggggctcagaaaggcccaatcccaagtctgttcagcggccagcatggaccaccaccctatggtgatagcagagggccaagcccttcctatctaggcggacctaggggggtggctccgtctcaatttgaagagagaaaagaccctcacggagaaaagagggaatttcaggatgctccctacaatgaagtgacaggggcacctgctcagttcgaaggaacagaacaagcccctttcctagggagccggggtggagctccttttcagttcggaggacaaagacgtccactgctcagccagttaaagggccctcgtggaggcccaccaccctcccagtttgggggacagaggggaccccctcctgggcactttgtaggacccaggggaccacatcccagccagttcgagactgctcgtggacctcacccaaaccagtttgagggacccagaggccaggcccctaatttcatgcccggaccacgaggaattcaacctcagcagttcgaggaccaaagagtacacagtccccctaggttcacgaaccaacgggctcctgctcccctccagttcggaggcctgaggggaagtgcaccgttctctgaaaaaaatgagcagacaccctcccggttccatttccagggacaggccccacaagtcatgaaacccggaccacgccctctcttggaactgccgtcccacccaccccagcaccgcaaagaccggtgggaagaggccggtccaccatcagctctctcttcatcggctccaggccaggggccagaggcagacggccagtgggccagcgccgattttcgagagggaaagggccatgaatatcgaaatcagactttcgaaggtcgtcagcgcgaacggtttgatgtggggcctaaggagaagcccttggaggaaccggatgcccagggcagagcctcagaagaccgaaggagagagcgcgaaaggggacgaaattggtccagagaaagagactgggatcgcccacgtgagtgggatcgccaccgagataaagactcatcccgagactgggatcgtaaccgcgaacgcagcgcgaatcgcgatagagagagggaagcagaccggggtaaagagtgggacagatctagggaacgttctcgaaaccgggaacgagaacgtgatagaaggcgcgaccgagaccgaagccgctccagagagagggatcgcgacaaggcaagggatcgagagagaggaagagataggaaggacaggtccaaatcaaaagaaagcgctagagatccaaagcctgaggctagcagggcctctgacgcaggtacggctagccaggcctac

SEQ ID NO: 27563 - DNA, 1635 bp, synthetic construct
  source 1..1635: mol_type = other DNA; note = Synthetic coding sequence
atggatgacaaaggtgaccccagcaacgaggaggcgccaaaagccatcaagcctaccagcaaggagttcagaaaaacctgggggtttagacggacaacaatcgcaaaaagagaaggcgctggtgacgccgaagccgatcctctcgagccccctcctccccagcaacaattgggtttaagccttcggagaagcggcagacaaccgaagagaacggaaagagtagagcagtttctaacaatagcccgaagacgcggacggagaagcatgcctgtatccttggaggacagtggggaacctacaagctgtccagccaccgacgcagaaacagccagtgagggatcagttgaatccgcctcggagacacgttccggtccacagtccgcgtccacggcagtgaaagaacggcctgcctcctccgaaaaggtcaagggcggagacgaccacgacgacacatcggattcagacagtgatggccttactttaaaggagttgcagaaccgactcaggaggaaaagagaacaggagcccactgagagacctctgaaaggcattcagtctaggctaaggaagaaaagaagggaagagggtcctgcggaaaccgtgggctcggaggcttctgacaccgtggaaggcgttctgccctccaagcaagaacctgagaacgatcagggagtggttagtcaggctggaaaggatgacagagaaagcaaacttgaggggaaagctgcgcaggatatcaaggatgaagaaccgggagacctggggaggcctaagccagaatgtgaggggtatgaccctaatgccttatactgcatttgccggcagccacacaacaatcggttcatgatttgttgcgatcgctgtgaggagtggtttcatggtgattgcgtcggcatcagtgaagcgaggggcaggttgctggaacggaacggcgaggattacatctgtccaaactgtaccatactgcaagtgcaggatgagacacacagcgagaccgccgaccaacaggaggccaaatggagaccaggcgacgcagacggcaccgattgcacttcgatcgggactatcgagcaaaagtcttcagaagaccaggggatcaagggccgaatagaaaaggccgcaaatccctccggcaaaaagaagctgaaaatatttcagcctgtgattgaggctcctggagcatccaaatgtattggcccaggctgctgtcacgtggcccaacctgactccgtatactgcagtaatgactgcatcttgaagcatgccgctgctaccatgaaattcctctcctccggtaaagagcagaagcccaagcctaaggaaaagatgaagatgaaaccagagaagcctagcctgccaaaatgtggagctcaagcagggatcaagatttcatcagtccataagaggccagcgcctgagaagaaagagacaacagtaaagaaagcggtggtagtgccagctcgaagcgaggcactaggcaaggaagccgcatgcgagagttctaccccctcttgggcctctgaccataactataatgctgtcaagcctgagaaaacagcagccccttcaccaagcctgttgtacaaatgttcaggtaaatattcttactccttgcatccttctctgatagcctag

SEQ ID NO: 27564 - DNA, 1164 bp, synthetic construct
  source 1..1164: mol_type = other DNA; note = Synthetic coding sequence
atggagaggccgccacctagagcagctggaagggaccccagtgctctgagagccgaggccccttggcttcgcgcagaaggacccggacctagagcagcacctgtaactgtacccaccccgcctcagggatcttcagtcgggggaggatttgccggactggaattcgcacgtccccaggagtccgagccccgagctagcgacctcggagctcctcgcacctggacaggagccgctgctgggcctcgcactccatctgcgcacatcccagtccccgctcaacgggctacacccggtaaagctcgtctcgacgaagtgatggccgctgctgcactgacgtcacttagcacaagtccccttctgttgggtgccccagtcgctgcgttcagtcccgagcccggacttgaaccatggaaagaagcgttagtgagacctcctggaagttattctagttcttcaaactcgggggattggggctgggacttagcctccgatcaaagctcgccaagcaccccttcgccgccactgccaccggaagccgctcatttcctgtttggtgagccaacgctgcgcaagcgtaaatccccggcacaagtaatgttccagtgtctgtggaagtcctgtggaaaagttctgtccactgcatccgccatgcagcgccatataaggctcgtgcatctgggcaggcaagctgagcccgaacaatccgatggcgaggaggacttctattacaccgaattagatgtcggcgtagatacccttacagacggcctgtcatctctgactccagtttcccctaccgcatcgatgccccctgcttttccaaggctcgagttaccggagctgctcgagccccctgcattaccatcacccctgagacctcctgccccacccctgccacccccaccggtgctgagtacggtggcaaacccccagagttgtcacagcgacagggtttaccaaggctgtcttaccccggcacgcctggaaccccagccaacagaagtgggggcatgcccacctgcgttgagctcccgaattggcgttacccttcggaagccacgcggagatgccaagaagtgtcgtaaagtgtacggcatggagagacgggacctctggtgcactgcatgccgatggaagaaagcctgccagaggtttctcgattag

SEQ ID NO: 27565 - DNA, 414 bp, synthetic construct
  source 1..414: mol_type = other DNA; note = Synthetic coding sequence
atgctcagattctgcgccggtttgtctgacttcgccccagtcgccgtccggtctctgcaagacctggcaagaattgctatcaggggcaccattaagaaaataattcatcaggagaccgtctcaaaaaacggcaatggattgaaaaacactccaaggtttaagcggaggcgtgtgagaaggagacgcatggaaaccatagtgtttctggataaggaagtgttcgccagtcggatcagtaatccgtccgatgacaattcttgcgaggatctcgaagaggagcgccgagaggaagaggagaagacccctcctgagaccaagcccgaccctccagtcaacttcctgcggcagaaggtactctccctgccacttccagatcccctgaagtattacttactttactaccgagagaagtag

SEQ ID NO: 27566 - DNA, 2505 bp, synthetic construct
  source 1..2505: mol_type = other DNA; note = Synthetic coding sequence
atgaggctcctcgacggcaagcagacaagccgctacagtgagaacgcatgtgagaagaagatctttagcatctacggtcactaccctgtagtccgagccgcactccggaggaaggggtgggtggagaagaaatttcacttcctccctaaagtgatacccgatgtagaagacgaaggcgcaagagttaacgatgatacctgcgcgaaggttaaggagaaccaggagatggcactcgagaaaaccgacaatatacacgacgtgatgtctcgtcttgtaaagaatgagatgccctatctgttgtggactattaaacgggatatcattgattatcacagtctgacatatgatcaaatgttaaaccattacgccaagactgccagtttcacaactaaaataggtctctgcgtcaatatgaggagcctgccctggtacgtgccggctaatccggattcatttttcccaaggtgctactccctttgtacagagagcgaacagcaggagttcctggaggattttcggagaacgatggccagttcaatactgaagtgggtggtgagccatcaatcctgttccagatcatcccggtctaaaccgagggatcagcgagaggaggccggttcaagcgacctctcatccagacaggacgccgaaaacgccgaagcaaagcttcgcggactccctggccagcttgttgatatcgcatgtaaggtttgccaagcttacctgggtcagctggagcacgaggacatagacacatccgccgacgctgttgaagaccttaccgaggcggagtgggaagatctcacccagcaatactacagcctggtccaagttcccctcggaagctcaatcgtgctgtgtatctttaaaatccagaaggttatgatgtctttcgaaccaccaacagcacgtgataggcagtgtcaggccctcttaaaccgcatcacttcagtgaatccccagacagacattgatgggctacggaacatttggatcatcaaacctgccgctaagtctcgaggcaggggtgagtccccagacatagtgtgcatggatagagtggaagaaattctcgaattagcggcagctgatcaccccctcagtagggacaacaagtgggtggtgcagaagtatatagagacacccttgctgatctgcgatacgaagttcgatatccgccagtggttcctggtgacggattggaatccattgaccatctggttctataaggagtcatatctgaggttctccacccagcgcttctctctcgacaagctggactccgcaatccacctgtgtaacaacgcagtccagaaatatctgaagaacgacgttgggaggtcgccactattgcccgctcataatatgtggacctccacaaggttccaggagtatctgcagaggcaggggcgtggggcagtgtggggctccgttatctacccgtcaatgaaaaaggcaattgctcacgcaatgaaagtcgcccaagatcatgtggaacctagaaagaacagcttcgagctgtacggtgcggactttgttctgggtcgcgacttcagaccttggctgattgagatcaacagctcccccacaatgcatccttctacacccgtcactgctcagctgtgtgctcaagtccaggaggatacaatcaaagtggcagtagaccggtcgtgtgacataggaaatttcgagttgttgtggaggcaacctgtcgtcgagccacctccctttagtggttctgatctctgtgtggcaggagtttcggtgcggcgtgcacggagacaagtgctgccggtatgcaacctcaaggcttccgcttcccttctggatgctcagcctcttaaagcccgaggccctagcgcaatgcctgacccagcacagggtccacccagcccagcgctgcagcgagatctgggcctaaaagaggaaaaggggctgcctctggctctactggccccacttcgaggcgctgccgagagtgggggagccgctcaaccaactaggactaaagcagcagggaaagtagagttgcctgcatgtccttgtagacatgtagattcccaggctccaaatactggcgtcccagtcgctcaaccagctaaaagctgggatcccaatcaactaaatgcccaccccctggagcccgtcctacggggtctgaagacggctgaaggcgctcttcgccctcctccaggcggaaaaggagagggtaccgtgtgttccaggcttccccaccacgggcaccacgtggccgcatgtcagactacgggcaccacctgggacggagggccaggggtctgcttcctcagacagctcctggcatccgagctgcctatggggccaggcctgcccagagaccctcgtgcacccccttgccttgtgtgtagaggacttctgcctcccgcaggaccgtgcaaaaggtgccggtccttttgtgcagcagtgctgcagggtgcctcttttgtgcgtctgggcggacggtcttgctcaccacgcacaccatag

SEQ ID NO: 27567 - DNA, 759 bp, synthetic construct
  source 1..759: mol_type = other DNA; note = Synthetic coding sequence
atgtgttcaacatcaggctgcgacctggaggagattcctctcgacgatgatgatttaaacacaatcgagttcaaaatcttagcctattatacacggcaccatgtattcaaatcaactccagccttgtttagccctaagctcctgagaactcggtcattgtctcagaggggccttggcaactgtagtgccaacgagtcgtggactgaagttagctggccgtgtcgcaactcgcagtcttccgaaaaggccataaatttagggaaaaaaaaatcatcttggaaggcattctttggagtggtcgaaaaggaagactctcagtctacccccgcaaaagtcagtgcgcagggccagagaactctggagtaccaggatagccactcacagcagtggagtcggtgtctgagtaatgtcgaacaatgtctcgaacatgaggccgtggaccctaaggttatctcaatcgctaatcgggtcgctgagattgtctatagctggcctccgccacaggcaacccaggccggaggcttcaagtctaaggaaattttcgtgaccgagggcctgagctttcagttacaggggcacgtcccagtggctagcagctccaagaaagacgaagaggaacagattcttgcaaagatcgtggaactccttaaatacagtggcgatcagttggagagaaaggatacagcgtttatcccgattccactcgtggatacatctatacagggatttccacaggacggcctcatggcctgcatttag

SEQ ID NO: 27568 - DNA, 261 bp, synthetic construct
  source 1..261: mol_type = other DNA; note = Synthetic coding sequence
atgagtctaccacttaacccgaagcccttcttaaatgggctcaccggcaaaccggtgatggtgaagctcaaatggggtatggaatataaaggctatctggttagcgtcgacgggtacatgaacatgcaactggcaaacaccgaggagtacattgacggcgctttaagcggtcacctgggggaggtgctcattagatgtaataacgtgctgtacatcagaggggtggaggaagaagaggaagacggggagatgagggagtag

SEQ ID NO: 27569 - DNA, 1281 bp, synthetic construct
  source 1..1281: mol_type = other DNA; note = Synthetic coding sequence
atggcctccgggcattccttgctgctcgagaacgcccaacaagtggttctcgtgtgcgcacgcggagagcgtttcctcgctagggatgctttaagaagtttggccgtgcttgaaggagccagtctcgtcgtgggtaaagatggtttcattaaggcaatagggccagcagatgtgatccagcgacagttctctggcgagacatttgaggaaatcattgattgtagtggaaaatgcatcctcccagggctggtggatgcccacacccaccccgtgtgggcaggtgaaagggtccacgaattcgccatgaagctggcgggagccacgtatatggagattcaccaggctgggggaggcatccatttcactgtggagcgcaccaggcaggcgactgaggaagagctcttcagaagcctgcagcagcgcctccagtgtatgatgagggctggcaccaccttagttgagtgcaagtctgggtacgggttggatctggaaacggagcttaaaatgcttagagtcatcgaacgcgctagaagagagctggacattggaatttccgctacatactgtggcgcacactccgtcccaaagggtaaaacagcaaccgaggccgcagatgatatcatcaacaaccacctgccgaagctcaaggaactggggcgaaatggtgagatacacgtagataacatcgatgtcttttgtgagaagggcgtatttgacctggatagcacccggcgtatactgcagcggggtaaagatataggcctgcagatcaactttcacggagatgagctccatcctatgaaggcggctgagctgggtgctgagctgggggctcaggctatctcacacctggaggaggtttctgatgagggtatcgttgccatggcgaccgccagatgttctgccattctgctcccgacgacagcctacatgctgaggctgaaacagccaagagccagaaaaatgcttgacgaaggagtaattgttgcccttggctctgatttcaaccctaacgcctattgcttttctatgccgatggttatgcacttagcatgtgtcaatatgaggatgtccatgccagaggcattagcagcagccaccataaatgcagcctacgcacttggcaaatctcatacccacgggagtcttgaagtaggcaagcagggtgacctaatcattataaacagctcccggtgggaacacctcatctatcagttcggtggccaccacgagctgattgaatatgtgatcgccaaagggaagctgatttataaaacgtag

SEQ ID NO: 27570 - DNA, 1263 bp, synthetic construct
  source 1..1263: mol_type = other DNA; note = Synthetic coding sequence
atgttctcacccggtcaagaagaacactgtgccccaaataaagaaccggtgaaatatggagaactggttgttctaggctacaacggtgcccttcctaacggcgaccgagggcgtcgcaagtccagatttgccctctataagagacctaaggctaacggagtgaagccgagcactgtgcacgtcatctccacgccccaagcttcaaaagccatatcgtgtaagggtcaacattccatttcatatactctgagcaggaaccagaccgttgtggtcgagtatacacatgataaagatactgacatgtttcaagttgggaggtctaccgagagtcctatcgattttgtggtgaccgacaccattagtgggagccagaatacagacgaagcccagatcacccaaagtacgatcagtaggttcgcttgccggatcgtgtgcgaccggaatgagccctatacagccagaatttttgcagccggatttgactctagcaagaatattttcctgggcgaaaaggctgccaagtggaagaacccagacgggcacatggacggactgactacaaatggtgtgctggtcatgcacccgcgaggaggtttcaccgaggagtctcagcccggtgtttggcgggagatctccgtgtgtggtgacgtgtacacactgagagagactcgctccgctcagcagcggggaaagctggtggagtctgagaccaacgtcctacaggatggcagtttgattgatctgtgcggggcaaccctgttgtggagaactgcagacgggttgtttcataccccgactcagaaacatattgaggccttacggcaggagatcaacgcagctaggccacagtgcccggttggcttaaatacactcgccttccctagtattaaccggaaagaggtggtggaggagaagcagccatgggcatacctttcttgtggccatgttcacggctaccacaattgggggcaccgcagtgataccgaagctaatgagcgagagtgtcccatgtgccgaacagtgggcccatacgtgcctctatggctggggtgtgaggccggattttatgtggatgcagggccaccgacccatgcctttacaccttgtggtcatgtgtgtagtgaaaaaagtgccaagtattggtctcaaataccccttccgcacggcacccatgcttttcacgcagcgtgcccattttgtgcaacccaactggtgggcgagcagaattgtatcaagctgatttttcagggcccaattgactag

SEQ ID NO: 27571 - DNA, 1056 bp, synthetic construct
  source 1..1056: mol_type = other DNA; note = Synthetic coding sequence
atgatcgtccagagagtggtgctgaattcgcgccctgggaaaaacggaaacccagtggccgagaacttccgcatggaggaagtgtacctccccgacaatattaatgagggtcaggtgcaagtccggacactttatttaagtgtcgacccatatatgagatgtaggatgaatgaagatacaggtaccgactatatcaccccttggcagctgtctcaggtagtggacggcggaggtatcggcatcatagaggagagtaaacacaccaacttaacaaaaggagattttgttacctccttctactggccctggcagacaaaagtaattctggacggcaactcgctcgagaaagttgaccctcagcttgtcgacggacacttgagttactttttgggggctattggcatgcccggactgactagccttattggcatccaggaaaaggggcacattacggccggatctaataagacaatggtggtttctggagccgctggcgcttgtggttcggtggcaggccagatcggacattttctgggctgtagtagagtagtgggcatatgtggcacgcacgaaaagtgcattctactgacctccgagctcggcttcgacgccgctatcaattacaagaaggacaatgtggctgagcagctgcgggagtcttgcccggctggagtggacgtgtacttcgacaacgtggggggtaacattagtgacacggtgatttcacaaatgaacgagaattctcacataatcctgtgcggccagatatcccagtacaataaagatgtcccctatcccccaccactgagtccagcaattgaggcaatccagaaggagaggaacattacacgcgaacgctttttagtgctcaattacaaggacaaatttgaaccagggatccttcagttgagccagtggttcaaggaggggaagttgaagattaaggagaccgtgataaatggcctcgagaacatgggtgcagcctttcagtcaatgatgaccggcggaaatatcggaaagcagattgtgtgcatatctgaggaaatcagcctgtag

SEQ ID NO: 27572 - DNA, 2172 bp, synthetic construct
  source 1..2172: mol_type = other DNA; note = Synthetic coding sequence
atggccgaggaagaagagactgccgcactgacagagaaggtgatcagaactcagcgagtctttatcaatttgcttgacagctatagttcaggcaatatcggcaagttcctgtcaaattgtgttgttggggctagcctggaggaaattaccgaggaggaagaggaagaagatgagaacaaaagcgcaatgcttgaggctagtagcactaaagtgaaagagggaacatttcaaatcgtggggaccctctctaaaccggacagtcccagacccgattttgccgtcgaaacatattccgcaatctctagggaggacttgctcatgaggctgttagagtgcgatgtgatcatttacaatataaccgaaagtagtcaacaaatggaggaggccatttgggcagtttccgctctatcggaagaggtgagccattttgagaaacggaagctgttcatcctgctcagtacagtgatgacctgggcccgatccaaggctcttgatcctgaggactctgaggtcccctttaccgaggaggattacaggcggaggaaaagccatcccaactttctggatcatataaatgccgagaaaatggtactgaaatttggtaaaaaggctcgcaagtttgctgcctatgtggtagccgctgggttgcagtatggtgccgaggggggaatgttacacactttcttcaagatggcatggctgggcgagattccggctctgcctgtgtttggtgatggcaccaatgttatccctacgatccacgtgctggatctcgctggggtaatccagaacgttattgatcacgtgccaaagcctcactatttggtggcagtcgacgaatccgtacacaccctggaggatatcgtcaagtgtatctccaagaacaccgggccaggtaagatccagaaaatcccacgagagaatgcttacctgacgaaggacctaacccaagactgcctggatcacttgcttgtgaatctgagaatggaagcactgtttgtgaaggaaaactttaacattaggtgggcggcacagactggttttgtagagaatattaatacaatcctgaaggaatataagcaaagtcgcggtttgatgcctattaaaatctgcatcctgggacctcccgcagtcggcaagagcagtatcgccaaggaactggcaaactactacaagttacaccatattcaactgaaggatgtgattagcgaggccattgccaagctggaggccatcgttgcgcctaacgatgtcggagagggggaggaagaagtggaagaagaggaggaagaagaaaatgtggaagatgcccaggagttgctggatgggattaaagaaagcatggagcaaaacgccggacagcttgacgaccagtatatcatcagattcatgaaagagaagctgaagtccatgccttgtcgcaatcaggggtacatattggatggattcccaaagacatatgatcaggcgaaggacctctttaatcaggaagatgaggaagaggaggacgacgtgcgcggtcggatgtttcccttcgataaattgatcatcccagaatttgtgtgcgcacttgatgcatctgatgagttcctcaaagaacgggttataaacctgcccgagtctatcgttgctggcactcattacagtcaagaccggttcctcagggctctgtcaaattacagagatattaacatcgacgatgagacggtgtttaactactttgacgagctggaaattcaccccatccatatcgacgtgggaaaactggaggatgcgcaaaaccggctggccatcaaacagttgattaaagaaatcggcgagccaaggaattatggactcacagatgaggagaaagcagaggaggaaagaaaggccgctgaggagcgactggcacgggaggctgccgaagaggcagagagagaacatcaggaggccgtcgagatggcggaaaaaattgcacggtgggaggaatggaacaagcgcttggaagaggtcaagagagaggagcgcgaattactcgaagctcagagtattccgcttcggaactatcttatgacatacgtcatgccaaccctaattcaaggactgaacgaatgttgtaatgtgcgccctgaagaccccgttgacttcttagcagagtaccttttcaagaacaaccccgaagcgcagtag

SEQ ID NO: 27573 - DNA, 1245 bp, synthetic construct
  source 1..1245: mol_type = other DNA; note = Synthetic coding sequence
atgcagaccttccttaagggcaagcgcgtaggctattggctcagcgagaaaaagatcaagaagttgaattttcaggcattcgcagaactgtgtagaaagcggggaatggaggtagtccagctgaacctgtcccggcctatcgaggagcaaggcccacttgatgtaattattcataagctgaccgatgtcattctggaggcggaccagaatgacagccaatcccttgagctggtccaccgattccaggaatatatagacgcccacccagaaaccatcgttttggaccctctgccggctattcgtacactgttagatagatcaaaatcttatgaactgatcagaaagattgaggcgtatatggaggacgatcgcatatgtagtcctccgttcatggagctcaccagtctctgtggcgacgacacgatgaggctcctggaaaagaatggcctgacatttccctttatctgtaagactcgggtggcccacggcacaaatagccacgagatggcaatcgtatttaatcaggaaggcctgaatgccattcagcctccatgcgtagttcaaaacttcataaatcataatgccgttttatataaggtcttcgtcgtgggagaaagctatactgtcgtccaacggccttccctaaaaaacttttcagcaggaacatctgatcgtgaaagcattttctttaacagccacaacgtgtcaaagcctgagagctcttccgtgctgactgaactggataagatcgagggcgtgtttgaaaggccttccgacgaggtgatacgagaactgtcccgcgctctacggcaagctctgggggtgagcttgtttggcattgatattattataaacaatcagacaggacagcatgccgtgattgatattaacgccttcccgggatatgaaggggtaagtgagttcttcacagacctgctcaatcacatcgcaaccgttctgcaaggccagagtacagctatggcggctaccggtgatgtagctctgctgagacactccaaacttctggcagaaccagctggcggattggtgggcgagcgcacctgctctgcttcaccaggttgctgcggatccatgatgggtcaggacgccccatggaaggccgaagccgatgccggagggaccgccaagctgcctcaccagaggctcggctgtaacgccggagtgtctccatccttccaacagcattgtgtcgcatccttggctactaaggctagttcacagtag

SEQ ID NO: 27574 - DNA, 600 bp, synthetic construct
  source 1..600: mol_type = other DNA; note = Synthetic coding sequence
atgcgctttagattctgtggcgacctggactgtcctgattgggtgctggccgagattagtactcttgccaaaatgtcatccgtcaaactgaggctcctgtgtagtcaggtgctaaaggagttactaggtcaggggatcgattatgaaaagattctgaagctgactgccgatgccaaattcgaatccggagatgttaaggcaaccgtggccgtgctgtcattcattttatcatctgctgcaaagcactccgtagatggggaatccctgtcatcagagctgcagcagcttggactgcccaaggaacacgcggcatcactctgtcggtgctatgaggagaagcaatctccactgcagaaacaccttcgagtctgcagtctcagaatgaatagactcgctggcgtcgggtggcgggtggactacaccttgtcctcgtcgttgctccaatcggtggaggagccgatggtccacctgcggctggaagtggcagcagcacctggaactcccgcacagccggtggcaatgagtctgagcgctgataagtttcaggtattgctggcagagctgaagcaggcgcaaacgctaatgtcctcactgggatag

SEQ ID NO: 27575 - DNA, 1224 bp, synthetic construct
  source 1..1224: mol_type = other DNA; note = Synthetic coding sequence
atgtcgcaccggaagttttctgccccaaggcatggccatctggggtttttgccgcacaagagatcgcacagacatcggggtaaggtcaagacctggccgagagacgatcctagtcagcccgtgcacctgacagcattcttggggtacaaagcaggcatgacccacactctgagagaggtgcacagaccaggattaaagatcagcaagagagaagaggtcgaagcagttacaatcgtggaaaccccaccactcgtcgtggtgggagttgtggggtacgtggccacaccacgagggctgcgtagctttaagaccatcttcgcggaacacctctctgacgaatgcaggcggcgattctataaagattggcacaagagcaagaaaaaggcatttactaaagcgtgcaagcgctggcgcgatacagacgggaagaagcagcttcagaaagactttgccgctatgaagaaatactgtaaagtaatccgcgtgatcgtgcacacacagatgaagctgctgccatttagacaaaagaaggcccacataatggagattcaattaaatggcggtaccgttgctgaaaaggtcgcctgggctcaagcaagattggagaaacaggttccggtgcattctgtgttcagccaatctgaggtgatagatgtaattgcagtcaccaaggggcgaggagtgaaaggcgtgacttctcgatggcacactaagaagctgccgaggaagacccacaaaggcctgagaaaggtggcctgtatcggggcttggcaccctgcacgggtagggtgttctatagcgagggccggtcagaagggttatcaccaccgaaccgagctgaacaaaaagattttcaggataggccgtggcccacatatggaggatggaaagcttgtgaagaataacgcgagcaccagctacgatgtcacagccaaaagcattacgccgcttggcggatttccgcactacggggaagtgaataatgattttgtgatgctcaagggctgtatcgccggaacaaaaaagcgggtgattaccctgagaaagtcattgctcgtgcatcatagtagacaggctgtggagaatatcgagttgaaattcattgacactactagcaagttcggacacggtagattccaaacagcgcaggaaaaacgcgctttcatgggacctcaaaagaagcacctggagaaggagactcctgaaacatctggggatctgtag

SEQ ID NO: 27576 - DNA, 7322 bp, synthetic construct
  source 1..7322: mol_type = other DNA; note = Synthetic coding sequence
atgagttcctccggctatcccccaaatcagggagcctttagcactgagcaaagtcgatatccgccacatagtgtgcagtatactttcccgaacaccaggcaccaacaagaatttgccgtgccagattaccgcagttcccacctcgaagtcagtcaggcctcccagctgctccagcagcagcagcagcagcaactgagacggaggcccagtttgctttcggagtttcacccagggagcgaccgcccacaggaaaggcgcacctcttacgaaccttttcacccaggtccctctcccgtggaccatgactcactggagagcaaacgaccaagattagagcaggtgtccgattcacactttcagcgtgtctcagccgctgtgcttccacttgtacaccccttgcccgaggggctgcgcgcatccgctgatgctaagaaagaccccgcattcggaggaaagcacgaagcccctagcagtcctatttctgggcagccctgtggcgacgatcaaaatgccagcccttccaagctttcaaaggaggagctcattcaatcgatggacagggtcgatcgagagatcgccaaggtcgagcagcagatactaaaactgaagaaaaagcagcagcagctggaagaggaagccgctaagccaccagaacctgagaagccagtgtccccccctccggtggaacagaagcataggtcaatcgtgcagattatatacgacgagaatcgaaagaaggctgaagaagcccataagatctttgaaggcctgggcccaaaagtggaactcccactttacaaccagcctagtgatacgaaagtttatcacgagaatattaagaccaatcaggtgatgaggaagaagctcattctcttttttaagcgccgtaaccatgcacgaaagcagcgcgagcagaagatctgtcaacgctacgaccaactgatggaagcatgggagaagaaagtcgataggattgaaaacaacccgagaagaaaggctaaggagtccaagacccgagagtattacgagaagcagtttcctgaaatccgcaagcagagggaacagcaggaacgcttccagcgtgtgggacagcgaggggctggcctaagcgctacaatagcacgcagtgagcacgaaattagcgaaataattgatgggctgagcgagcaggagaataatgagaagcagatgcgccagctcagcgtcatcccccctatgatgtttgatgctgaacagaggcgcgttaagtttatcaatatgaacggcctcatggaagatcctatgaaggtgtataaggaccggcagttcatgaacgtctggacagaccacgagaaggagatctttaaggataagttcatacagcatcctaagaacttcggcttgatcgcctcctacctggagcggaagagcgtgcccgattgcgtgttatactactatctgaccaaaaagaacgaaaactacaaggccctggtccggcgaaattacggcaagcggaggggtcggaaccaacagattgcacgcccttcccaagaagagaaggtggaagagaaggaggaggataaggccgagaagaccgaaaaaaaagaggaggaaaagaaggacgaggaggaaaaagacgagaaggaggattcgaaggagaacaccaaggaaaaggacaagatcgatgggacagctgaagagacggaggagagagaacaggccacaccaagagggaggaagactgcaaactctcaggggagaaggaaggggcgaatcacacggtcaatgacaaacgaagcagctgcggcaagcgccgcagcagcggcagccacagaggagccaccccctcctctcccaccacctcctgagccaattagcacggaacctgtggagaccagccggtggacagaagaggagatggaagtggcgaagaagggccttgttgagcacggacggaactgggccgctatagccaagatggtgggaacaaaaagcgaagctcaatgtaaaaacttttattttaattacaagcgcagacataatttagacaatctcttgcagcagcacaaacagaaaacctctagaaagccacgcgaagagagggacgtttcccaatgtgaaagcgttgcgtcaacggtgtccgctcaggaagacgaagacattgaagcctctaatgaagaggaaaatcctgaggatagcgaggtagaggctgtgaaaccttccgaagattcgcctgaaaacgcaacctcacgtggaaatactgagcctgccgttgaactggagcctactacggagacagcaccttctactagtcccagcctggctgtaccctccaccaagccggctgaggatgaatccgttgaaacacaggtcaatgactcgattagtgctgagacagctgaacaaatggatgtcgatcaacaggagcacagcgcggaagagggcagtgtgtgcgacccaccccctgccacgaaggcagactccgttgatgttgaggtgcgcgttccagagaatcacgcctctaaggtcgaaggggacaacaccaaggagagggacttggacagagcttctgagaaagtggagccgagagacgaggacttagtcgtggctcagcaaatcaatgcgcagcgtccagaaccacagtccgataacgacagttcagcaacgtgctccgcagatgaagacgtggacggagagccagagcgccagcgcatgtttcctatggactcaaagccaagtctgctgaatcccacagggtcaattctggtgagctccccgctcaagcctaatcctctagatttgccacagctgcagcacagagctgccgtcattccaccgatggttagttgcaccccatgcaacatccccattggaacaccagtaagcgggtacgctctgtatcagagacatatcaaagcaatgcacgagagcgcacttctggaagaacagcgccaacggcaggagcagatcgatctcgaatgtcgcagtagcacgagcccctgcgggactagcaaatctcccaaccgggagtgggaggtgctgcaaccagccccacaccaggtaattaccaatcttcccgaaggcgtgcgactaccaactacgcgccctacccggcctccaccccctctgattcccagcagcaagacgactgttgccagtgaaaaaccctctttcatcatgggaggctctataagccagggaactcccggaacatatcttactagccataaccaggcctcatacacacaggagacaccaaagccctctgtaggatccatctctcttggcctacctcgccagcaagagagtgctaagtctgcaacgctgccctatatcaagcaggaagagttctcaccacggagtcagaacagtcaacccgagggtctcctcgtgagggcgcagcatgagggtgtggttcgaggcacagctggtgcaattcaggagggatctattactcggggaacgcctacttctaaaataagtgtcgagagcatcccgagtctcagaggaagcatcacccagggaactccagctttacctcagacggggatacctacggaagctctagtaaagggatctatcagccgcatgcccatcgaagactcctccccagagaagggaagggaggaggccgcttcaaaggggcacgttatttacgagggtaagtcaggccatatcttgagttacgataatatcaaaaacgcccgagaagggacccggtcgcccaggaccgcccacgaaatttctctgaagcgaagctacgagagcgtcgagggcaacatcaaacaagggatgtcgatgcgcgaatcacccgtctcggcgccactggaaggtctgatctgcagagccctgcctcgcggttccccacactccgacctgaaggagcggaccgtgctctccggatctatcatgcaaggtactccacgtgccactactgagagcttcgaggacggactgaaataccccaaacagataaaaagggagtccccccctataagagcctttgaaggagcgatcactaaaggcaaaccttacgacggtattaccaccataaaggagatggggaggagcatccacgaaatccctcggcaggatattctgacgcaagagtcccggaagacccccgaggtagtccagagcacgagaccaattattgaaggcagtatcagccagggaacgcccatcaagtttgataacaattctggccagtccgcaattaaacacaatgtgaagtctcttataacaggaccatccaagttatcgcgagggatgccccctctggaaattgtgcccgagaacattaaggtggtcgaaagagggaaatacgaagacgtaaaggccggtgagactgtacgctctcgtcacaccagcgtggtttcatccggcccttctgtcctgcgctctacattgcatgaggctcctaaggcccagctttctcctggcatatatgatgacactagcgctcgacggactccagtgtcctatcagaataccatgagccgaggatcacctatgatgaacaggacaagcgacgtcaccattagctcaaacaaatctacgaatcatgaaaggaagtccacccttactcccacgcagagggagagtattcccgctaaatctccagtgcctggcgtggaccccgtcgtcagccactctccctttgacccccaccaccgcggttccaccgcaggagaagtatacagatcccatctgcctacacacttggatccggctatgccctttcaccgcgcactcgaccctgccgctgccgcttatctatttcagcggcagttgtcccccactcctggctacccaagccagtaccaactctacgccatggagaacacccggcagaccattttgaacgactatattacctcgcagcagatgcaggtcaacctgaggccagatgtggctcggggactgtcgccgagggagcagcccttaggcctgccttatcccgctaccagggggatcattgacttgactaatatgccccctacgatcctagtcccccatcccggtggtacttccactcccccaatggatcgcatcacctacattcctgggacacaaataactttcccaccccgaccctataatagtgcctcaatgagccctggccaccccacgcatctggcagccgcagctagcgctgaacgagagcgagagcgcgaacgcgagaaggagagggaaagagagagaatcgccgcagcctcttctgatctgtatcttagacctgggtcggagcagccaggacggccaggctctcatggctatgtcagaagtccatccccatctgttcgtacccaggagaccatgctacagcaacgacctagtgtatttcaggggaccaatggaactagcgtgatcacaccactcgaccccacagctcagcttagaatcatgcctttgccggctgggggtccaagtattagtcaaggactcccagcttctcgatacaatacggctgctgacgcactcgccgctcttgtcgacgccgcagcctccgctcctcagatggacgtgagtaagaccaaggaaagcaaacatgaggccgctcgcctcgaagagaacctgagaagcaggtcagccgcagtcagcgaacagcagcaactcgagcaaaaaacactggaagttgagaagcgctcagtgcagtgtttatacactagctctgctttcccgtcaggcaagccacaaccgcacagttccgtcgtttactccgaggctggaaaggataaggggccacctccgaagtctagatacgaagaagaactgcggacacggggaaagactacgatcaccgctgccaactttattgacgtcatcatcacgcggcagattgcgtccgataaggacgctagggagagaggttcgcagtccagtgattcttccagttccctttcgtcacacaggtacgagactcccagcgacgctatcgaagtgatcagcccagcatcttccccagccccaccacaggagaagcttcagacctatcagcccgaagtggtcaaggccaaccaggcagaaaacgacccgactagacagtacgagggtcccctccaccattatagacctcagcaggagtccccttccccgcagcagcagttacccccttccagccaggccgaaggcatggggcaggtgccccgtacacacaggttgatcacactcgccgatcatatctgccagatcattactcaagactttgcacgcaatcaggtgtcaagtcagacaccgcagcagcccccaacaagcacctttcaaaactccccttctgcattggtgtctactcctgtacgcaccaagacctctaatcggtattcccctgagtcacaagcgcaatccgttcaccaccagagacctgggtcgcgcgtttccccagaaaacctggttgacaaaagtagagggtctcggcctggcaaatcccctgagcgctctcatgtctccagcgaaccttatgaacccatttctcctcctcaggtgcccgttgtgcacgagaagcaagacagtctcctactgctttcccaacgtggggcagagcctgccgagcagaggaatgacgcacgctctccaggctcaatatcttatctgccatcatttttcacaaagttagagaacacctcccctatggtgaaatctaagaagcaggagatcttccgtaagttgaactcgagtggcggtggggatagcgatatggctgccgcacagcccggaaccgagatttttaacctcccagccgtgacaacttccggttcggtgagctccaggggtcatagctttgccgaccccgctagcaacttgggtctcgaggatattattagaaaagcactgatgggctcatttgacgataaagttgaagaccatggggttgtgatgagccaacccatgggcgttgttccaggaaccgcgaacacgagcgtggttacttctggagagacaagacgagaggagggggaccccagcccccactctgggggagtgtgcaaacccaaacttatctctaagtcaaattcccgcaaaagtaagtcaccaatacccggtcagggctacctcggcactgagcgacccagctctgtgtcctctgtgcattctgagggcgattaccaccgccagaccccaggttgggcttgggaggaccggcctagctcaactgggagcacacaattcccgtataaccctctcaccatgcgaatgctctcgtccacacctcccactcctatagcatgtgccccaagcgctgtgaaccaggcggcaccacatcaacagaatagaatctgggagcgggaacccgcacccctgctgtcagctcagtatgaaacccttagcgacagtgatgacta

SEQ ID NO: 27577 - DNA, 2313 bp, synthetic construct
  source 1..2313: mol_type = other DNA; note = Synthetic coding sequence
atgcttcaacaggtgaacggtcataaccctggaagcgatggacaggcacgggaatatttaagagaagacttacaggagtttttgggcggtgaggtccttctatacaaactggatgacttgacgcgggttaacccggtgaccttggagacagtgttacgatgcctgcaggcccgatatatggcggacactttctatacgaacgcagggtgcaccctggtggccctcaatccattcaaacccgtgccacagctctacagccccgagctaatgagggagtatcacgccgcaccccagccacagaaactgaaaccacatgtttttaccgtgggagagcagacgtataggaatgtgaagagtctcatcgagcccgtgaaccagtcaatcgtcgtgtcaggcgaaagtggcgctgggaagacttggacgagtcgttgcctaatgaaattctatgccgtggtcgccactagtcccgctagctgggaatcgcataagattgcggagcgcatcgaacagaggatcctgaactcaaacccagtgatggaggccttcggaaatgcgtgcacactccggaacaacaattcttccaggtttgggaagttcattcaactgcaactcaaccgggcacagcagatgacaggagccgcagttcagacctatctcttggaaaagacacgcgtagcttgtcaggcatctagcgaacgcaactttcacattttctaccagatatgcaagggggcatccgaagatgaaaggctgcagtggcacctgcccgaaggcgcagccttttcctggctgccaaaccctgaaaggagtttggaagaggactgttttgaagtcactagagaggctatgctccacctgggaattgatacacccacccagaacaacatatttaaggtgctggcagggcttctacacctgggcaatatccagtttgccgcttccgaggacgaagctcagccctgtcagccaatggatgacgctaaatacagtgtacgtaccgccgcatctctgttaggcctcccagaggacgttctgctggagatggtgcagatccgtaccattcgggctggtaggcagcagcaggtcttccggaaaccatgcgctagagccgaatgtgacactaggcgagattgtctagctaagcttatttatgctcgattgtttgactggttggtgtcagtcataaattcatccatttgcgcagacactgactcttggaccacatttatcggcttgcttgacgtttacggtttcgaatcatttcctgataatagcctcgagcagctctgtataaactatgcgaatgagaagcttcagttggaagcctgcggcctcgtggagacaatacacatcagtgctgcaggatttcccattcgcgtgagccacaggaattttgtggaacgctataagctgttgcgacggctgcacccctgtacttccagcgggcctgactcaccctacccagccaagggcctaccagaatggtgcccacattctgaagaggcaactctggagcccctaatacaggatattctccacactctgcctgtactcacacaggccgctgctatcacgggcgatagcgcagaggcaatgcctgctcccatgcactgcggcaggacgaaagtcttcatgaccgactccatgttagagttgctcgaatgtggtagagcacgtgttttggagcagtgcgcaaggtgcatccagggcggatggaggaggcaccgccatagagagcaggagagacagtggagagccgtgatgctgattcaggctgcgatccgtagttggctcaccaggaagcacattcaaagacttcatgccgctgcaaccgtgattaagcgtgcatggcagaagtggcgcatccgtatggcctgtctggctgcaaaagaactggacggtgttgaagagaagcatttctcacaggcaccctgttcgttgtccacgagcccactgcagactaggttgttggaggcaattatccgactgtggccgttaggtctagtgctggccaacacagctatgggagtgggcagtttccaacggaaactggtggtatgggcttgcttacagctaccccgaggctctcccagtagctacaccgtccagacagcgcaggatcaggctggagtcacaagcatcagggccctgccgcaaggaagcataaagtttcactgtcgcaagagccccttgaggtatgcagatatctgtcctgagcctagtccatattctatcaccgggtttaaccaaattctgctcgaacggcataggttgattcacgttacgtctagcgctttcacaggtttggggtag

SEQ ID NO: 27578 - DNA, 2796 bp, synthetic construct
  source 1..2796: mol_type = other DNA; note = Synthetic coding sequence
atggccgaagtggaagcagtacaacttaaagaagaaggcaacaggcacttccaattgcaggattacaaagcagccactaatagttattctcaggcactgaaattgacaaaggacaaagccctgctcgccactctttaccgtaacagagccgcatgtggtctcaagaccgaaagctacgtgcaggctgcctccgatgcgtcacgcgctattgatattaattccagtgatatcaaggccttataccgcagatgtcaagccctagaacatttgggaaagcttgatcaagcatttaaagatgtgcagagatgcgcaacgctggaaccacgaaaccagaatttccaggagatgctcaggcggcttaataccagcatccaggagaaactgcgggtgcaatttagtacagattcccgagtgcagaagatgtttgagattctgttggacgagaactccgaagcagacaagagagagaaagcagcaaataatctaattgtgctgggcagggaggaagcaggagccgaaaagattttccagaacaatggcgtggccctgctcttacagcttctggacacaaagaagcccgaactggtcctggcagccgtaagaaccctctcaggtatgtgcagcggacaccaggccagagctaccgtcattctccacgctgtgcgtatcgatcgcatctgctctttaatggcagttgagaatgaagaaatgtccttagccgtctgcaatctactacaagccatcatcgactctctttctggggaagataagagggagcatcgcggtaaagaagaggccctggtcttggacactaaaaaagacctgaaacaaataacctctcacctcctggatatgttagtgagcaagaaggttagcggacaaggtagggaccaggctctgaacctactgaataaaaatgtgcccaggaaggatttagccatccatgataactctagaaccatctacgtcgtcgataacggacttcgcaagatactgaaggtggttggacaggtgccggatttgccttcctgccttcctctcaccgacaatacccgcatgttggccagcatcctcattaataagctgtacgacgatctgcgctgtgaccccgaacgggaccactttaggaagatatgcgaagagtatataaccggcaagttcgacccccaggacatggacaaaaacttaaatgctatccaaaccgtgtcaggaatacttcagggtccctttgacctcggcaaccagctcctcggactgaagggggttatggagatgatggtggcattatgcgggtccgaacgagagacagaccaactcgttgcagtcgaagcactgattcacgcttccacgaagctcagtagagctaccttcataattaccaatggcgtctccctcttaaagcagatctacaagactacgaaaaatgaaaagattaagatcagaacccttgtaggcctgtgcaaactgggatccgccggaggcactgactacggcctcaggcagtttgccgagggttccactgaaaaactcgcaaaacagtgtcggaaatggctgtgtaacatgagtatcgacacgagaacaaggaggtgggcggtggagggcctcgcatatctgacgttagatgccgatgttaaagatgatttcgttcaggacgtgcctgccttgcaggctatgttcgagctagccaaggccggtaccagcgataaaacaatcctgtactcagtggcaactaccttagttaactgtactaatagttatgatgtgaaggaagttatccctgaactggttcagctggctaagttctctaagcagcacgtcccggaggagcatccaaaagacaagaaggatttcattgatatgcgcgtgaagcgtcttttaaaggccggtgttatctctgcactcgcatgcatggtgaaggctgatagcgcgatactcactgaccaaacaaaagaactgctggcaagagtgtttctggccctgtgtgataacccaaaagaccgtggcacaattgtcgcccagggcggaggaaaggccctcatacctcttgcgttggaaggaaccgacgtcggtaaagttaaagccgctcatgccctggctaaaattgccgctgtctccaacccagacatcgcctttccaggtgagcgcgtctacgaagttgtgcgaccgcttgtgaggctgctggacacccagagagacgggcttcagaactatgaagcgttgctggggctcactaacctctccggcaggtccgacaagctgcggcaaaaaatctttaaagagagggcccttcccgatattgagaactacatgtttgagaatcacgaccaactgagacaggccgctaccgagtgcatgtgtaacatggttctgcataaggaggtgcaggaaaggttccttgccgatggcaacgaccggctgaaactggtcgtgctgctgtgcggcgaggatgacgataaggttcagaatgcagccgcaggggctctggcgatgctgaccgccgcacacaaaaagttgtgcctgaagatgacacaggtgaccacacagtggttagaaatattacagaggctgtgtctgcacgatcagctatcggtgcagcatagaggcctggtaatagcctacaacctgttagctgccgacgccgagcttgccaagaaactcgtggagtccgagctgttggagattctgactgtggtcggaaaacaggaacctgacgaaaagaaggcggaggtggtgcaaactgccagagaatgtctgattaaatgcatggattacggtttcatcaagcccgtgtcttag

SEQ ID NO: 27579 - DNA, 2022 bp, synthetic construct
  source 1..2022: mol_type = other DNA; note = Synthetic coding sequence
atggcctcccagttctgcctacctgagtctccttgcctgtcccctttaaaaccacttaagccacattttggggacatccaggagggtatttatgtagctattcagcggtctgataagaggatccatctagcggtggtgacagagattaaccgcgagaactattgggtcacggtagagtgggtggagaaggccgtgaagaaggggaaaaaaatcgacctcgagaccatcctgctcctgaaccctgccctggattccgctgaacacccaatgcccccacctccgttgtcacccctggcattggctccctccagcgctatccgagaccagcgcaccgctacaaagtgggtcgctatgattccccagaagaatcagactgcatccggagattcactggatgtgcgggttcctagcaaaccctgtctgatgaaacagaaaaaatcaccctgcctgtgggagattcagaaacttcaggaacagagagaaaaaaggagacgtctgcagcaggaaatacgggctcgtcgggcactggacgttaacactaggaacccgaattacgagatcatgcatatgattgaagagtatcgccgtcacctcgacagctctaaaatcagcgtgctcgagcctcctcaggaacatcgaatctgtgtttgcgtgagaaaacgaccattgaaccagagagagaccacactgaaagacctggacataatcactgtaccgagcgataacgtagtgatggtacatgagtccaagcagaaggtggaccttacacgctatctccaaaatcagactttctgttttgatcatgcgttcgatgataaggcaagcaatgagctcgtttaccagtttaccgctcagcctctggtggaatccatattccgtaagggaatggcaacttgcttcgcatacgggcagaccggcagtgggaagacctacaccatgggaggagatttcagcggtacggcgcaggactgctctaagggcatctatgcattggttgctcaagacgttttcctcttgttgagaaactccacatatgagaaactggacctgaaagtttatggaaccttctttgaaatttacggcggtaaggtgtatgatttactgaactggaaaaagaagctgcaggtgctcgaagatggtaaccagcagatccaggtggtgggccttcaggagaaagaggtctgttgtgtcgaggaagtgctcaacctcgtcgaaattggtaactcctgtcgaacatcgcggcagaccccagtcaacgcccattcctcccgctcacacgcggtgttccaaattatcctgaagagtgggagaatcatgcatggcaagttttcactggtggacctggctggaaatgagcgtggggctgacaccaccaaggcgtcccgcaaacgccagcttgagggggcagagataaataaatcactgctggcacttaaagaatgcatcttggccctgggtcagaacaaacctcacacacctttccgcgcttcaaaactgaccctcgtcctcagagattcctttattggtcagaactcatccacatgcatgatcgccacgatcagcccaggtatgacgtcttgtgaaaatacgctaaatacccttaggtatgcaaaccgcgtcaagaagcttaacgtggatgtccgaccttatcatcgcggtcactaccctatagggcacgaagctccgaggatgctgaaatcccacatcgggaactccgagatgtccctccagcgggatgagttcattaaaattccgtacgtccagagcgaggaacagaaagagattgaagaagtggagactctccccactcttctcggcaaggacacaaccatttcaggaaaagggtcttctcagtggttggaaaatatccaggaacgcgcaggaggtgtccatcacgacatcgatttttgcatcgcacggtctctatcgatcttggagcagaagatcgacgcactcactgaaatccaaaaaaaactgaaacttctcttggccgatctgcatgtgaaatctaaagtcgagtag

SEQ ID NO: 27580 - DNA, 1236 bp, synthetic construct
  source 1..1236: mol_type = other DNA; note = Synthetic coding sequence
atggccacgacagctaccatggcaacttcagggtctgccagaaagaggctcctcaaggaagaggatatgacgaaggtggaatttgaaacaagcgaggaggtggacgtgaccccgacattcgacactatgggcctccgcgaagatttattacggggtatttatgcatacggattcgaaaaaccttctgcgatacagcagcgggctataaaacagatcatcaaaggcagagatgtgattgctcagtcacagagtggcactggaaaaaccgcaaccttctccattagtgtcctccaatgtttggacatccaggtccgcgagacccaggcactgatcctagctcccacaagggagctggcagttcagattcagaagggcttactagccctgggtgactatatgaacgttcagtgccacgcctgtatcggtggaacaaacgtcggcgaggacatccgcaagctagattatgggcagcacgttgttgcaggcacccctggccgtgtcttcgatatgatccgccgaagaagcttaagaactagggctatcaagatgttggttttggacgaggcggacgaaatgcttaacaaaggattcaaagagcaaatctacgatgtttatcgctatttgccgccagcaactcaggtggtgttgattagtgcaacccttccacatgaaatcttggaaatgaccaataagttcatgacggaccccattagaattcttgtgaaaagagatgagctcacgctcgaagggatcaagcagttctttgtagcagtggagagagaagaatggaagttcgatacactgtgcgatttgtacgacacactaaccatcacacaggcggtcattttttgcaatacgaagcggaaagtggattggctgacggagaagatgagggaagctaacttcactgtgtcatctatgcatggagatatgccacagaaggagcgagagtccatcatgaaggagttccggtctggtgcatcaagagtgctgatctcaaccgatgtttgggccagggggctggatgtaccacaagtcagtttaatcatcaattacgaccttcccaataatagggaactgtacattcatcggatcggtagatccggtaggtatggtcgcaaaggggtagccataaatttcgtgaagaacgatgacatcagaattctgagagatattgagcaatattactctacccagattgatgaaatgccaatgaacgtggctgatctcatttag

SEQ ID NO: 27581 - DNA, 1683 bp, synthetic construct
  source 1..1683: mol_type = other DNA; note = Synthetic coding sequence
atggagctgcccgcagtcggcgagcatgtcttcgcggtcgagagcatcgaaaagaagaggattcggaagggccgtgtcgaatacctagtgaagtggcgtggctggtctccaaaatacaatacctgggagccggaagagaacatactggacccacgcctcctgattgcttttcaaaacagggagagacaggaacagctgatgggataccgaaaaagaggcccaaagccaaaaccactcgtggtgcaagtgcctacctttgctagacgtagcaacgtgcttactggtctgcaggactctagtacggacaacagggcaaagctggacctgggggcacagggtaaaggtcaggggcatcagtatgaactcaattctaagaaacaccaccaataccagcctcacagtaaggagcgggctggcaagccccctccacccggaaaatccggaaagtactattaccagttaaattccaagaagcaccacccctatcagcccgaccctaagatgtatgatctgcaatatcagggcggacacaaagaagctcctagccccacctgtccagacctcggggctaaaagccacccaccagacaagtgggctcagggggctggagcgaaggggtatctaggggctgtgaaaccactcgcaggcgctgccggagcgcctgggaagggtagcgagaagggcccaccaaacggtatgatgccagctccaaaggaggccgtaaccggaaatggtattggcggtaaaatgaagatcgtgaagaataagaacaagaacgggagaatcgtgatcgtgatgagcaagtatatggaaaatggcatgcaggctgtgaagattaagtctggggaagtagccgagggagaggccaggtctccttcccacaagaagcgcgctgcggatgaacgccaccctccagctgacaggacctttaagaaggccgcaggagctgaggagaagaaggtcgaagccccacccaagcgccgagaggaagaggtcagcggggtttctgacccacagccgcaggatgctgggagcaggaagctttcccctactaaggaggccttcggggaacaacccttacagctgacgacaaaacctgatctcctggcttgggacccagcgagaaacacccatcctccatctcaccatcctcacccgcacccacatcatcaccaccaccatcaccaccatcaccaccacgccgtgggattgaacttgtcccacgttcgcaaacgttgtctgtccgaaacccatggagaaagagagccttgtaaaaaacgcctcacagccaggagtatctccactcccacatgtttaggcggttcacccgctgccgaacggccagcagatctccctccggctgcagccctgccccagccagaggtgatcttacttgattcagatcttgatgagcccattgacctccgatgcgtgaaaacgcgctcagaggccggtgaaccaccatcttctctccaggtgaagccagaaactcctgcatctgccgctgtcgccgtggccgctgccgcagcccctacgacgacggcagaaaaacctccagctgaagctcaggacgaacccgctgagtctttgtccgaatttaaaccatttttcgggaacattatcattaccgatgtcaccgctaattgtctaactgtgacgttcaaagagtatgtcaccgtttag

SEQ ID NO: 27582 - DNA, 1218 bp, synthetic construct
  source 1..1218: mol_type = other DNA; note = Synthetic coding sequence
atggattcactggtaaccgctaacactaaattctgcttcgatctctttcaggagattggcaaagacgatagacataagaatatctttttctcaccactgtcccttagtgcggctctcggaatggtgcgactgggcgctagatctgacagtgctcaccagatcgacgaggtgttacactttaatgagttctctcaaaatgaatccaaggaaccagacccctgtcttaagtcaaacaagcagaaggcaggttctctcaataacgaatccgggctcgtcagttgctatttcggtcagctgctgagcaagctcgatcgaattaagactgattacacattgagcatagcaaatcggctctatggcgagcaagaattccctatctgccaggagtacctggatggagtaatccagttctaccacaccacaatcgagagcgtggactttcagaagaacccagagaaatcgaggcaggagatcaacttttgggtggagtgtcagagccaggggaagataaaggaactgtttagcaaagacgctatcaacgctgagaccgtcctggtccttgtgaatgccgtctacttcaaggccaagtgggagacatacttcgatcatgagaatacggtggatgcacccttctgcctcaacgctaacgaaaacaaaagcgtgaaaatgatgacgcagaaaggcttatataggatcgggttcattgaggaagtgaaggcgcagattctcgaaatgagatatacaaaaggcaaactgagtatgtttgtcctccttccctcccactcaaaggacaatctgaaagggctcgaagagttagagagaaagataacctacgaaaagatggtggcgtggtcaagttccgagaacatgtctgaggaatccgtggtactctcttttccccgattcaccctggaggatagctatgatctgaactcaatacttcaggatatggggatcactgatatattcgatgaaactcgcgctgatctgacaggcatcagcccatctcctaatctatacctgtcaaagattattcacaaaactttcgtggaggtggatgaaaatggaacccaggcagccgcagctaccggcgcagtggtttccgagaggtcattgcggtcctgggtggagttcaacgcaaatcaccccttccttttttttatcagacataataaaactcagacgatcctcttctacggccgtgtgtgctccccctag

SEQ ID NO: 27583 - DNA, 3537 bp, synthetic construct
  source 1..3537: mol_type = other DNA; note = Synthetic coding sequence
atgcttaggatgaagctgcccttaaagccgacacaccctgccgagcctccacccgaagctgaagagccagaggccgatgctcgaccgggagctaaggccccttcaaggcggagacgcgattgccgaccccctcctccgccaccaccacccgcaggcccatccagaggtccactacccccaccccctcccccacgcggtctcggaccgccagttgctggaggggctgccgcaggcgcaggcatgccgggagggggtgggggacccagtgccgctttaagggagcaggaacgggtttacgaatggtttggactggtgctagggagcgctcagcggctggagttcatgtgcggcctgctggatctgtgtaacccgctggagctgagatttctcggctcctgtctcgaagacctggccaggaaggattatcattatttgagggacagcgaggccaaagcgaacgggctttcagaccccggacccctggcggacttccgagagccagctgtgagaagtcgcctgatcgtgtatttggctcttctgggtagtgaaaacagagaggctgccggaagactgcatcggctgttaccccaggtcgatagcgtgctgaaaagcctgcgcgcagcaaggggggaaggcagccgcggaggggctgaagatgagcgtggggaagatggcgatggggaacaggacgccgagaaggacgggtcagggcctgaagggggtatcgtggagcctcgggtgggcggagggcttggcagtcgggctcaggaggagttgctactgctctttaccatggcctcattacatcccgcttttagtttccatcagcgagtgactttgagggagcacctagagcggctgcgggctgccctcagaggcggacctgaggacgcagaggtcgaggttgagccgtgcaagttcgccggtcctcgggcacagaataactctgcacatggggattacatgcaaaacaatgaaagttcactgattgagcaggccccaatcccccaggacggactgactgtggctccccaccgcgcacagcgggaggctgtgcatatcgagaagatcatgttgaaaggagtacagagaaaaagggcagacaagtactgggaatatacttttaaggtgaactggtctgatttgagcgtcaccactgtgactaaaacccaccaggagttacaggagttcctgcttaagctgccaaaggaactaagcagcgagacatttgacaagaccatcctgcgtgcacttaaccaaggctcactaaaaagggaggaacgacggcacccagaccttgagccgatactgcgacaactcttttctagtagctcccaagcatttttgcaaagccagaaggtccactcattctttcaaagtatcagttctgattctctccatagcattaacaatttacagagcagcctcaagacctccaagatcctggagcacctcaaagaagatagcagtgaggctagtagtcaagaggaagacgtgcttcagcacgccattattcacaaaaagcacaccggtaagtcaccaatcgtgaacaatattggcacgtcatgctctcccctggacggattaaccatgcagtattccgaacagaacggaatcgtcgattggaggaaacagtcttgtacaactattcaacacccggaacattgtgtcacttccgccgaccagcattctgcagagaagcgatcactgtcctcgatcaataagaaaaagggcaagccacaaaccgaaaaggagaaaatcaaaaaaactgataatcgtctgaatagccgaatcaatggaatccgattgtcgaccccacagcatgcacacgggggaaccgtgaaagacgtgaaccttgacataggatccggccatgatacatgtggggagactagctcggagagttattctagcccttccagtccacggcacgatggaagagagtctttcgagtcagaggaagagaaagatcgcgacacggacagcaacagcgaagatagcggcaatccctctacaacccgcttcactggatacggctccgtcaaccagacagtgactgtgaaaccaccggtgcagattgccagtttgggcaacgaaaacggcaatctgttggaggatcctctgaactcgcctaaataccagcacatcagcttcatgccgacactccattgtgtgatgcacaatggggcacagaaaagcgaggttgtggtgccggcacctaagcccgcagatggaaaaaccataggaatgctggttccttccccagtcgctatttcggctattagggaatccgccaattctacgccggtggggatcctcggtcctactgcctgcaccggcgaatctgagaagcatctagagctactcgccagtcctctgccaatcccaagcaccttcctccctcactcttcaacccccgcactgcatctaaccgtgcagaggctcaaactgcctcccccacagggaagctccgagtcatgcaccgttaatatccctcagcagccccctggatctctgtcaatcgccagcccaaacacagcattcatccctattcacaacccaggttcattcccaggctctccagttgccaccaccgatcctattaccaaatccgcctcccaggtcgtcggtctcaatcagatggtgccccaaatcgaagggaacacagggaccgtgccccagcccacgaacgtcaaggtagttctgccagccgctgggctgagcgccgctcagccacctgcgagctaccccctccctgggagtccccttgcggcaggagtcctcccaagccaaaacagctctgttctatccactgcagccacatcccctcagccggcaagcgccggaattagtcaagcacaggcaaccgtcccacccgctgtgccaacccatactcccggacctgctccaagcccttctcctgccctgacgcacagtacagcacagagcgatagcacctcttatattagcgccgtagggaacactaacgcaaacggtactgtcgtgccccctcagcagatgggatcagggccatgtgggagctgcgggagaagatgtagttgtggtaccaatggaaacctgcaacttaactcgtattattaccccaatccaatgccaggcccaatgtacagggttccttccttctttacgctccctagcatttgcaacggcagctatctgaatcaggctcaccaatctaatggtaaccagctgccctttttcttgccacaaaccccctacgcaaatggcctggtgcatgatcctgtgatggggagtcaggctaactacggaatgcagcagatggcaggatttggcagattttatccggtatatccagctccgaacgttgtggcaaatacatctggaagcggccctaagaagaatggtaacgttagctgctacaattgcggtgtctccggacattacgcccaggattgcaagcagagcagcatggaggccaaccagcagggaacctaccgattgaggtacgccccaccattacctccctctaacgatactctcgactccgccgattag

SEQ ID NO: 27584 - DNA, 411 bp, synthetic construct
  source 1..411: mol_type = other DNA; note = Synthetic coding sequence
atgcccggtaaaaaggctcgcaagaacgcacagccatctcctgcccgagctcctgcaggccctgctggcaccgcaggaaccgctcgcgatcaggcgggatttgccatcggcatgcagctccgctttacacggggaaaaaaactgctgtctagcagtttgagtagctctcctcttgcgctccctaggggtcatgaagagcaagttcaggttgctggatcacgcgtatgctacagtacacaggagatctggaggcagacagagctacccgctgagacgagcgagtccgatattcagacactacttctgaggaacctaaccgcatctaagacgtgcatgcgtggcttgctgcagaagagctttctgcggagatgcacattccatcaattcgaagagcgtttacattgtaattag

SEQ ID NO: 27585 - DNA, 879 bp, synthetic construct
  source 1..879: mol_type = other DNA; note = Synthetic coding sequence
atgaaagccaccgtgctcatgagacagcccggacgcgtgcaggaaatagtaggcgctctgcgcaaggggggtggcgacagattgcaggtgatcagcgatttcgatatgactttgtcacgcttcgcctacaatggaaaaagatgtccaagctcatataatatcttggacaattctaaaattatttccgaagaatgtcggaaagagctgacagcactgctgcatcattactacccaattgaaattgaccctcatcggactgtgaaggagaaacttccacacatggtcgaatggtggactaaggcccataacttgctctgtcagcagaagatacagaaattccagattgcgcaagtggtgcgagaatccaatgccatgctccgtgagggctataagacattttttaacaccctgtaccataacaacattcccctgttcatcttctccgcgggtattggagacattctggaggagattattagacagatgaaagtgtttcatccaaatatccacattgtgtcaaactacatggacttcaacgaggacgggttccttcaaggatttaaaggtcagctaatacacacctataacaagaattccagtgcttgcgaaaacagcggatacttccagcagttggaaggcaagacgaacgtcatcttactcggggatagcatcggcgatctgaccatggcagatggggtgccaggcgtccaaaacatcctaaagatcgggttccttaatgacaaagtggaagagcgacgcgaaagatacatggacagctacgacatcgtactggagaaggacgagacacttgacgtggtgaacggcctgctccagcacattctctgtcagggcgtacaattggaaatgcaggggccttag

SEQ ID NO: 27586 - DNA, 2010 bp, synthetic construct
  source 1..2010: mol_type = other DNA; note = Synthetic coding sequence
atggacctgcggaccgctgtgtacaacgcagcccgagatgggaagcttcagcttctccagaagttgttgagcgggcgttcacgtgaagagcttgatgaacttaccggcgaggtcgctggagggggaactccactactcatagccgcaaggtacggccatctggatgtggtggaatacttagtggataggtgcggcgcaagcgtagaagctgggggatccgtgcacttcgacggagagacaattgagggcgctcctccactctgggctgcctccgcagcgggacacctcgatgtagtgcggtccctgctgcgccgaggggcaagcgttaatcgcaccacgcgcaccaacagcacgccactgcgcgctgcctgtttcgatgggcacctagaggtcgtgcggtatcttgtgggcgaacaccaagccgacctggaggtcgccaatcgtcatgggcacacgtgcctcatgatctcatgctacaaagggcaccgagagatcgcacgatatttattagaacaaggggcacaggttaaccgacgatccgccaaaggcaataccgccctgcacgactgcgctgaaagcggaagtcttgagatcctgcagttactgctcgggtgtaaggcgcgtatggaacgagatggctacggaatgacacctctacttgctgcctctgtcaccggccacaccaatatcgtggagtacctgatacaggaacagcccggtcaggagcaggtggctggcggagaggcgcagcctgggctgccccaggaagatccatcaacatcccagggttgcgcccagccacaaggggctccttgctgttcctcctcaccagaggagccgctgaatggagaaagttacgaatcttgttgccctacaagccgggaggcagccgttgaagcgctggaactgctcggcgcaacctacgtcgacaagaagcgggaccttctgggagcacttaagcactggcgcagagcaatggaactgcgacaccaggggggagaatatctgccgaagcctgaacctccacagctggtactagcatacgactatagcagagaagtcaataccacagaggagctagaagcactgattactgatccagatgagatgcggatgcaggcactcctcatccgagaacgaatcctgggaccttcccatcccgacacctcgtattacatccgatacaggggtgcggtttacgcagactccggaaactttgagcgctgcatccgtctgtggaagtacgccctggacatgcagcaatctaacctcgagcccttgtctccaatgacagcgtccagcttcctctcttttgctgagctgtttagctacgtgctccaggatcgcgcagccaaggggtcactcgggacccagatcggcttcgctgacctgatgggcgtcctaacaaagggagtgcgggaggttgagcgtgccctgcagctgccacgtgagccaggggacagcgcccaattcactaaagcactggccataattcttcatctgctttatctcctagagaaagttgagtgcacacctagccaagaacatttgaagcatcagacagtctacagattactcaagtgtgctcctagagggaaaaatggctttactcccctgcacatggctgtggacaaagataccactaatgtgggacggtaccctgtgggaaggtttcctagcttacatgttgtgaaggttctgctggattgtggcgctgacccggattcgagggactttgacaataacacacctttacacatcgccgctcagaacaattgtccagccataatgaacgccctaatagaggctggggcacatatggacgctactaacgcgtttaagaagacagcatatgagctgctggatgaaaagttgttggctcgaggcaccatgcagcccttcaattatgtgacgcttcagtgtttggctgctcgcgctctggataagaacaaaataccttataagggattcattcctgaggacttggaggcttttattgagctacactag

SEQ ID NO: 27587 - DNA, 720 bp, synthetic construct
  source 1..720: mol_type = other DNA; note = Synthetic coding sequence
atggccgctacgttactagcagctcgtggagccggtcccgctccagcctggggcccagaagccttcaccccggactgggaaagtagagaggtttccaccggaacgacaataatggccgtgcagtttgatggcggtgtcgtgttgggtgccgatagcaggacgactacgggtagctatatagccaaccgagtgacagataaactgacccctatccatgacaggatattctgctgtcgctctgggagcgccgcagatacccaagccgtagccgatgctgtcacataccagcttgggtttcactccatcgaactgaacgagccacccctggtacacactgccgcatccctatttaaagagatgtgttatcggtatcgggaagacctcatggcgggaatcatcatcgctgggtgggacccacaggagggagggcaggtgtacagcgtccctatgggcggaatgatggtcagacagtctttcgccattggcggaagtggttcgtcttacatctacggttacgtagacgctacttatagagaaggtatgacaaaagaggagtgcctgcagttcaccgccaatgcactagctctggcaatggaaagagatgggagcagcggaggggttatcaggctcgccgctattgccgaatccggtgtggagcggcaagtcctgctaggagaccagatccccaagttcgctgtggccaccttacccccagcttag

SEQ ID NO: 27588 - DNA, 1383 bp, synthetic construct
  source 1..1383: mol_type = other DNA; note = Synthetic coding sequence
atgaacttttctgaagtatttaaacttagctctctcctgtgcaaattctccccagacggtaaatatctggcctcatgtgtacaataccgtctcgtagtccgggatgttaatacactccagatcctgcagctgtatacgtgcctcgatcagatacagcatatagaatggtcggcagactcactgttcatactctgtgctatgtataaacggggactggtgcaggtgtggtccttggagcaaccagagtggcactgtaaaatcgatgaggggtctgctggactcgtcgcatcttgctggagtcctgacggcagacatatactcaacaccaccgagtttcatcttcgtattaccgtgtggtccttgtgcacaaaatccgtttcctacatcaaatatcccaaggcatgcctgcaaggtattaccttcacacgcgatggcaggtacatggctttggccgaaagacgtgactgtaaagattatgtttctatcttcgtctgttctgactggcaactcctccggcacttcgacaccgacacgcaggacctgacggggatagaatgggcccctaatggctgtgtgctggccgtgtgggacacctgtctcgagtacaaaattttactgtattctctggatggcagacttctttctacctactcagcttatgagtggtcactcggcattaaaagtgtcgcttggtctccgagctcacagtttctagcagtcggttcctacgatgggaaggttcgaatcctcaaccatgtgacatggaagatgatcacagagtttggtcacccagcagctattaatgaccctaaaatcgtggtttataaggaggcagagaaatccccccaactcgggctcggatgcctgtcctttcctccacctcgcgctggagctgggccactgccatccagcgagagtaagtacgaaatagccagcgtaccagtctcgttgcagactctgaagcctgtgacagaccgggctaaccccaagattggcattggcatgctggccttctccccagattcttactttctggccacaaggaacgataacatccctaacgcggtgtgggtctgggatatccaaaagctgcgtctgtttgcggtgctggagcagctttccccggtgcgtgcatttcagtgggacccccagcaaccaaggcttgccatctgcacaggagggtccagactgtatctgtggagccctgccggttgtatgtctgttcaagtcccgggagagggggattttgcagtcctgtcgttatgctggcacctttctggtgattccatggcactgctctcaaaggatcacttctgtctttgcttcctcgagacagaggctgtcgttggaacagcatgtcgccagctcggcggacatacgtag

SEQ ID NO: 27589 - DNA, 282 bp, synthetic construct
  source 1..282: mol_type = other DNA; note = Synthetic coding sequence
atgagtggccttcgagtctactcaacttcagtgacaggttcccgggagatcaaatcccagcagtcggaggttacaagaatcctcgacgggaagcggatacaataccagcttgtcgacattagtcaagataatgctctccgcgacgagatgcgggctttagccggaaaccccaaggccaccccacctcagatagtgaacggagaccaatactgtggtgattatgaactgttcgtcgaagcagtggaacagaacaccctgcaggagtttctgaagctggcttag

SEQ ID NO: 27590 - DNA, 1920 bp, synthetic construct
  source 1..1920: mol_type = other DNA; note = Synthetic coding sequence
atgaacctcgaaaagttgtctaagcctgagcttttgacattgtttagtatcctcgaaggcgaattggaagctagggatcttgtgattgaagcactgaaagcccagcacagagacaccttcatagaggagcggtacggaaaatataacatttctgacccgctgatggcactgcagcgagacttcgagaccctcaaagaaaaaaatgacggcgagaagcagcctgtctgtacaaaccccctgagcatactcaaggtggttatgaaacagtgcaagaacatgcaggagagaatgctttcccagctggctgcagccgaatccaggcatcgcaaagttattctagatctagaggaggagcggcaacggcacgcccaggatactgctgagggcgatgacgtgacttacatgctcgaaaaggagcgcgaacgactaacccagcagctggagtttgaaaaatcgcaggttaagaaattcgagaaagagcaaaagaagctgagctctcagttggaagaagagcggagtcggcacaagcaacttagcagcatgctcgtgctggagtgcaagaaggctactaacaaagcagccgaagagggtcagaaggccggagaactgagtttgaagctcgagaaagagaaaagtcgagtttctaagctggaggaggagctggccgcagaaaggaaaagaggtttgcagaccgaggcccaggtagagaagcagctttcagagtttgatatcgaaagagaacagcttcgggcaaagctgaatcgcgaggagaaccgcacaaaaacgttaaaggaggagatggagagtttgaaaaaaatcgtgaaggacctcgaagcttcccaccagcatagttcgcccaatgagcagctcaagaagcctgtgacagtgtctaaagggacagcaacggaacccctcatgctgatgtcagtgttttgtcaaacggagtcctttccagcagagcggacccacggcagcaacattgccaagatgaccaacacgggacttccgggtccagccaccccagcctactcctacgcaaaaactaacggccactgtgacccagaaatccagaccaccagggagctcaccgctggcaataacgtcgagaaccaggtcccacccagggagaaatccgttgcactcgcacaagagaagccagtggaaaacggcggttgccccgtgggcattgagacgcccgtccctatgccctcccctctgagttcctcaggttcttctttaagcccctcctccacagctagctcctccctcacgtcatccccttgctcttcaccagtgttgactaagcgcctgctcggtagttccgcttcctctcccggatatcagagttcttaccaggttggcatcaaccagagatttcatgcggctcggcataagtttcagagccaggccgaccaagaccagcaggcctccggtctccaatcgccaccctcccgagacttgtcccctacgctgatcgataactcagctgcaaaacagctagcaaggaacactgtgacacaggtactttcgcgttttacaagtcagcaggggcctattaagccagtgtctccgaattcgtccccatttggcaccgactaccgcaatctcgccaacaccgctaaccccagaggggacactagccactctcctaccccgggtaaagtgtcaagtccattatctcccctgtctccaggtatcaaatcacccacgatcccgagggctgaacgtggtaacccaccacccattccgcctaagaaacccggactgacccctagcccttctgccacgactcctctcacgaagactcatagtcaggccgcttctctaacgacagccgaagacctggctagttcctgttcatcaaataccgtagtagccaatggtaaagacgtcgaactgctgctgcccacgagttcatag

SEQ ID NO: 27591 - DNA, 2487 bp, synthetic construct
  source 1..2487: mol_type = other DNA; note = Synthetic coding sequence
atgcgttttcttgaggcgagatccctggctgtggcaatgggtgatactgttgtggaaccagctcctctgaagcctacttctgagcctacaagcggccctccaggaaacaatggcggttctctgctgagcgtaatcactgaaggcgtcggtgagctgtctgtgattgaccccgaggtggctcaaaaagcctgccaagaagtcctggagaaagtgaagcttctccacggtggggtagctgtatcatcaagggggacccctctggagctggtcaacggtgacggcgttgactccgaaatccgatgcctcgatgatcctcccgcacaaatccgggaagaggaagatgagatgggagccgcagtggcttccgggactgccaaaggagctcgacgacgccgtcagaacaactcggccaagcaaagttggttgctgcgcctgttcgagtctaagctttttgacatatcaatggccatatcatacttgtacaatagtaaggaacctggcgtgcaggcttacattggtaacagactgttctgtttcaggaatgaggacgtggatttctacctgccccaactgctgaacatgtatatccacatggacgaagatgtcggagacgctattaaaccatatattgtgcaccgctgcaggcagtccataaactttagcctgcagtgtgcactgttattaggtgcctattcttcagacatgcatatttccactcagcgccactcccggggtacgaagcttcgtaagctgatcctttcagacgagttaaagccagctcaccgcaaacgcgaactccctagcctgagccctgccccagatacaggtctcagcccgagcaagcgaacgcaccagcgttccaaaagcgatgccaccgcgtccatcagcctgagctccaacctgaagcggactgctagtaatcctaaagtcgagaacgaggatgaggagttgtcctcttctacagagtcgatcgacaatagcttctccagccccgttagattagctccggagagggaattcatcaaaagcctaatggccatcggcaaacggctggctacattgcccaccaaggaacagaaaacgcagagacttatttctgagctgagtctgctgaaccacaaattacccgctcgagtatggctgccaacagccggatttgatcatcacgtcgttcgggtacctcacacacaggctgttgttctgaactctaaagataaggctccgtacctcatttacgtggaggtcttggagtgcgaaaactttgacactaccagcgttccagcaaggatcccggaaaatcgcattagatccacccgatccgtggaaaacctgccagagtgcggaatcacccacgaacagagggccggatccttttcaactgtgccaaactacgataatgatgacgaggcttggtccgtggatgacattggagaactgcaggtagagcttccagaagtccacacaaattcatgcgataacatctctcaattttctgtcgattccatcactagccaggagagcaaagagcctgtgttcatagctgcaggcgatatcaggagacggcttagcgaacagctcgcccacacgcccaccgcgttcaagagagatccagaggatcctagcgccgtcgccctcaaggagccctggcaggagaaggtgcggcgtattcgagaaggctcaccttatgggcatttgcccaactggcgactgctcagtgttatcgttaaatgtggcgatgacctgaggcaggaacttctggcgtttcaggtgctgaagcagctccagtccatctgggagcaagagcgggtaccactttggattaaaccctataagatcctggtgatttccgccgacagtgggatgatcgagcccgttgtcaacgccgtgtccatacaccaggtaaaaaagcaaagtcagctgtccctcctggactactttctccaagaacatggatcgtacactactgaggcctttttgtccgcccagaggaacttcgtgcagtcatgtgctggatactgcttggtgtgttacctcctgcaggtgaaagatcgtcacaacggaaatatcttactcgacgccgaaggtcatatcattcatatcgattttggcttcattctgagtagttcccctcgtaatctggggtttgagacttctgctttcaagttgacgactgagttcgtcgatgtgatgggaggtctggatggagatatgttcaactattacaaaatgttgatgctgcaggggctcatcgctgcgaggaaacatatggacaaagtggtacagatagtagagattatgcagcagggatcccagctgccctgcttccacggttcttccacaatcaggaaccttaaagagcgcttccacatgtctatgaccgaagagcaactccaacttcttgtggagcaaatggtcgacggaagcatgcgttccattacgaccaaactctacgatgggttccaatatctaacaaatggtataatgtag

SEQ ID NO: 27592 - DNA, 4233 bp, synthetic construct
  source 1..4233: mol_type = other DNA; note = Synthetic coding sequence
atggctgatactgacctctttatggaatgtgaggaggaggaactggagccttggcagaaaatttcagacgtcattgaagacagcgtcgtcgaggactataattctgtagacaaaaccacgacagtctctgtcagtcaacagccggtgtcggctccggtcccaatcgccgcacacgcctctgtggctggccacctgtcaactagcaccacagtgagctcgtctggcgcacaaaatagcgattccactaagaagaccctggtgacccttattgcaaataataacgcaggtaatccactggtccagcaaggcggacaacctctgatactgacgcagaatccagccccaggtttgggcaccatggttacccagcctgttttacgtcctgtgcaggtgatgcagaatgcaaaccatgtgacatccagccctgtggcttctcagcctattttcattactactcagggcttccctgtccgcaacgtgcgacctgtgcaaaacgcaatgaaccaggtgggcatcgtgctcaatgtgcaacaagggcagactgttaggccgatcaccctggtgcctgccccaggaactcaattcgtcaaacctacagtcggtgtgccacaggtattctctcagatgacaccagttcgtccaggctccacaatgccagtgcggcctacgacgaacaccttcaccactgtaatccctgctacactaaccatccgatccaccgtcccccaaagtcaaagtcagcagaccaagagcacgcctagcaccagcactacccctacagccacacagcccacctctttaggtcagctcgccgtgcagtcacctggccagagtaaccaaacaactaatcccaagctggccccaagtttcccaagcccacccgctgtctccatcgcaagcttcgtaaccgtgaaacgtcctggagtaactggagagaactccaatgaggtagccaaattagtcaacacccttaatactatacctagcttgggacagtccccagggcctgtggtggtgagcaataattctagtgcccacggatcacagaggacttcgggcccagagtcatctatgaaggttacgtcctccatccccgtgttcgatcttcaagatggcggtcggaagatctgtcctagatgtaacgctcaattcagggtgacagaagccttgcgtggccacatgtgctactgctgcccagagatggtcgagtaccagaagaaggggaaaagcctcgatagcgagccatctgtcccaagcgcagctaagcctccttcgcctgagaagacggcccctgtggcatctactccatcaagtactccaattccagcgttatcgccaccgacaaaggtgcctgaacccaacgaaaatgtaggggacgcggtacagaccaagctcatcatgttagtagacgacttttattatggccgtgatggaggaaaggtcgcacagctgaccaacttccctaaagttgctacttctttcagatgcccccattgtactaaaaggctgaaaaacaacatccgatttatgaaccacatgaagcatcacgtggagctggatcagcagaacggggaggtggacgggcacaccatatgccagcactgctacagacaattctcaactccctttcagctacaatgccacctggagaacgttcactctccttacgaaagcaccaccaagtgtaagatttgcgagtgggcattcgagagcgagcccctgttcttgcagcacatgaaggacacacacaagccaggcgaaatgccatatgtgtgtcaagtgtgccaatatagaagttctctgtatagcgaggtggacgtccacttccgcatgatccacgaggacaccaggcaccttctgtgtccttactgtctcaaggtctttaagaacggcaacgcttttcagcagcactacatgcgtcaccagaaacgaaatgtctaccattgtaataagtgtcggttgcagtttctgttcgcaaaagacaaaatcgaacataagctgcagcaccacaagacttttcggaagcccaagcagctagaaggactgaaaccgggaactaaagtgacaattcgggcttcccgtgggcagccacgaacagtgccagtttcatccaatgatacccccccttccgcactccaggaagcggctccgctgacaagctctatggatcccctacccgttttcctgtaccctcccgtgcagagaagcatccagaagagggcagtgagaaaaatgagcgtgatgggtcgtcagacatgcctggaatgttcctttgagattccagatttccctaatcactttcctacatatgtgcactgcagtttgtgtcgttactctacgtgttgttctagagcttacgctaaccatatgattaacaaccacgtccccagaaagtcgcctaagtatctggccctattcaagaacagcgtgagcggaatcaagctggcttgcacctcatgtacgttcgtaactagcgtgggtgatgctatggcgaagcacctggtgttcaatccatcccatcggtcctcctctatcctcccgaggggtcttacatggatagctcatagccgccatggacagacccgcgatcgtgttcatgatagaaacgttaagaacatgtaccccccaccgtcattccctactaacaaagccgcaactgtgaagtccgccggagctacccccgcagaacctgaggaactgctgactccactggcacccgctcttccctcgccggcttccacagccacgccacctccaacccccacacacccacaggcactggccttgccacccctggcaactgagggcgcagagtgtctgaacgtggacgatcaagacgagggatcccccgtgactcaagaaccagagctcgccagcggcggaggaggctcggggggagtaggaaagaaggaacaactgtccgtaaagaagctcagggtggtcctgtttgcactgtgctgcaatacagaacaagccgcagagcattttagaaacccacaacggcgtataaggagatggctcagaaggtttcaagcctcccaaggagagaacctggaaggaaagtatctgtcctttgaagctgaggagaagctggccgagtgggtgctgacgcagagagagcagcagcttcccgtaaatgaggagacattgttccaaaaagctaccaagatcggaaggagcctggaaggcggtttcaagatctcctatgaatgggcagtgagatttatgttgcgacatcacctgacgcctcacgccaggcgtgctgtcgcgcacacgttgcctaaagatgtggccgaaaatgccggactcttcatcgacttcgtacagcgtcagatacataaccaagacctgcccctcagcatgatagtagcgattgacgagatcagtctgttcctggacacggaagtgcttagctcagacgacaggaaagagaacgccctacagacggttggcacgggcgagccatggtgcgacgtcgtgctggccatactggccgacggcaccgtgttgcctacgcttgtcttctacagaggtcaaatggaccagcccgcaaacatgcccgacagcattcttctggaggctaaagaatctggttactctgacgacgagatcatggaactctggtctacacgggtttggcagaagcatactgcgtgccaacggtccaagggtatgctggtgatggattgccacagaacacacctgtccgaggaggtgctcgccatgttgtccgccagtagtactcttcccgcagtggtgccagcaggttgcagctccaaaatccagccccttgatgtgtgtatcaagcggaccgttaagaacttcttacacaagaaatggaaagagcaggccagagaaatggccgatacggcatgcgatagtgacgtgctactccagttagtgttagtttggctgggtgaagtactgggcgttattggagattgccctgagctcgtgcagcggagctttctagtggcgtctgtcctccccggaccggatggcaacatcaattctcctacgcgcaatgcggacatgcaggaagagctaatcgcctctctggaagaacagctgaaactgtcgggggagcactccgagtcctccacacctcgcccaagatcctcccccgaggagactattgaacccgagagccttcaccagttgtttgagggagagagcgagaccgagagcttttatggttttgaggaggctgacctggatctcatggaaatttag

SEQ ID NO: 27593 - DNA, 1488 bp, synthetic construct
  source 1..1488: mol_type = other DNA; note = Synthetic coding sequence
atgccacagcttctccagaacattaatggtatcatcgaagccttcagacgttacgccaggactgagggaaattgcaccgccttgactagaggggaattgaagagactgctggaacaggagttcgccgacgtcatcgttaaaccacacgatcctgccactgtcgacgaagtgttacgcctgctggatgaggatcataccggcacagtggagttcaaggagtttctcgtcctggtgttcaaagtcgcgcaggcctgtttcaagactctgtcggagagcgccgaaggagcttgcgggtcccaggagagcggcagcctacatagtggagcctcccaggagctgggtgaaggccagaggagtggcacagaagtgggcagggctggtaaaggccagcactacgaaggcagctcacaccggcagagtcagcaaggatctagagggcagaatagaccaggagtccagacacaggggcaagccactggctcagcttgggtctcgtcctacgaccgccaggccgaatcacagagtcaagaaagaatttccccgcagatccagttgagcggccagactgaacagactcagaaagccggtgagggaaagcggaaccagaccaccgagatgcggccagaacggcagccacagacaagggagcaagatagggctcaccagacaggagagactgtaaccggatccggcacacagacccaagcgggagctactcagactgtggagcaggattcaagccatcaaaccggaaggactagcaaacagactcaggaagcaaccaacgatcagaacagaggcaccgaaacacacggccagggcagatcccagacgagtcaagccgtcaccggtggacacgcccaaatccaggctggcacccatacccagacacccacccagaccgtcgagcaggacagcagtcaccagactggtagcacgtcaacccaaactcaggagtccacaaacggccagaatcgcggaactgagatccatggacagggtcgatcccaaacatcccaggctgtaaccggagggcacacacagatccaggccggaagccacacagagaccgttgaacaagatcggtcccagaccgtgtcccatggcggagcgcgtgaacaaggccagacccagactcagcctgggtccgggcagaggtggatgcaagtatctaatcccgaagcaggcgaaacagtccctggcggacaggcccagaccggggcttcaactgaaagcggaagacaggagtggtcctctacccaccccaggcgctgcgtcacagagggccagggagataggcagcctacagtggtaggcgaggaatgggtggatgatcattcccgggaaacggtaatccttcggctggaccagggcaatttacatactagtgtgtcttctgcccaggggcaggacgcggcacaaagcgaggaaaagcgcggtataaccgcacgtgaattgtactcatatttgaggtctaccaagccatag

SEQ ID NO: 27594 - DNA, 1233 bp, synthetic construct
  source 1..1233: mol_type = other DNA; note = Synthetic coding sequence
atgaatatgccatccacaccattagcgccaacaactgggaccgctacttgttcttggtcagcatctacctgcactactacgagacctgccgttcggcctccatcctttcctcatcggcctcccggaaatgctgctctgccaagccttatgccatcacgccctacacaggtcgccggacaatgcggcgcaggtaataattgggcgaaggggcactatacagaaggcgctgaattgatggaatccgtcatggatgttgtcagaaaagaggccgaatcttgcgattgcctccaaggattccagctcacccactcactgggaggagggacaggtagtggcatggggaccttattgctgagtaagattcgcgaggaataccctgatagaataataaacacgttctcaattttgccaagccccaaagtgtcagatacagtagtcgaaccatataatgccactctaagtgtgcatcagctgattgaaaacgctgacgagaccttctgtatcgataacgaagctctttatgacatatgctctaagacattaaagctcccaacgccaacttacggtgacctgaaccatctggtgtcagctaccatgtctggcgtgacgacgtgcctccgcttccccggacagctgaacgccgatctaagaaaactggccgtcaatatggtcccattccctcgactgcactttttcatgcccggttttgcccctctgacatctagagggagccaacaatacagggcgcttaccgtggccgagcttactcagcagatgttcgatgctaaaaacatgatggccgcttgtgacccacgccacggcagatacctgactgcagctgccatctttaggggacggatgcccatgcgcgaagtcgacgagcagatgtttaatatccaggacaaaaattccagttacttcgcagactggcttcctaacaatgtgaagacagctgtgtgtgacatccctcctcgcggattaaagatgagcgccacgttcattggtaacaatactgctatccaggagctttttaaaagagtgtccgagcaatttaccgctatgttccggagaaaagcattcctgcactggtatacaggtgaaggcatggacgagatggaattcacggaagcagagagtaatatgaacgacctggtctccgagtaccagcagtatcaggacgccactgcagaggaagaggaagatgaggagtacgccgaagaagaggtggcttag

SEQ ID NO: 27595 - DNA, 2106 bp, synthetic construct
  source 1..2106: mol_type = other DNA; note = Synthetic coding sequence
atgggctcggccgcagatgtgaggttctcccttgggacaaccacacacgcgcctcctggcgtccacaggcgctacagcgcactccgggaagagagtgccaaggattgggagacctcgccactgcccggaatgcttgcccctgcagcagggccagcttttgactcggatccagaaattagcgacgtggacgaagatgagcctggagggttggtcggcagcgcagacgttgtctccccctcgggccactccgatgctcagaccttagctatgatgctccaggagcagttagatgctatcaatgaggagattagaatgatccaggaggaaaaggagtctacagaactgagggctgaagaaattgagacacgggtaactagcggctccatggaggcgctcaatctgaagcagcttagaaagagaggttccatacctacatctctgactgcattatcactcgcttctgcatcgccaccactctctggacgttccacgcctaaactgaccagccggtccgctgctcaggacctggacagaatgggagttatgacgctgccgtcagatttgcggaaacaccgtagaaagctgctgtcaccagtctcccgggaggagaatagggaagataaagcaacaatcaagtgtgagacctcgcccccatcatcccctaggaccctgaggttggaaaagctggggcaccctgctctgtctcaagaggaagggaaaagcgctctggaggatcaggggtccaatcctagctcctctaactcctctcaagattcgctccacaaaggggctaaacggaaaggaatcaagtcttccataggtcgcctgtttggaaaaaaagagaaagggcgattaatccagttatccagggacggcgctaccgggcacgtacttctcactgacagtgagttctccatgcaggagcctatggtgcccgcaaaactgggaacgcaggctgagaaggatagacgcttaaaaaagaagcaccagttactggaagacgcacgcagaaagggtatgcccttcgctcagtgggacggacctacagtggtaagttggttggaactctgggtcgggatgcccgcatggtacgtggccgcatgtcgtgctaacgtaaaatcaggggctatcatgtctgccctgtccgacaccgaaattcagagagaaattgggattagcaatgctctgcacagattgaaacttcggttggccatacaggagatggtgtccctcacctcaccttccgcccctcctacatctaggacttcttccgggaatgtttgggtgacacacgaggagatggaaactctagagacctccactaaaaccgacagcgaagaaggtagttgggctcagacgctagcctatggggatatgaatcacgagtggataggaaatgagtggctgcccagcctgggtctgccccagtatcgatcctacttcatggaatgtcttgtggacgctcgcatgctggaccatctcaccaaaaaagatcttagggtccacctgaagatggtcgattcattccaccggacaagtctgcaatacggcataatgtgcttgaagcgcctgaattacgaccgaaaagagctggaaaagagacgggaagaatctcagcacgagattaaagacgtgctggtgtggaccaacgaccaagtggtgcactgggtccagtcgatcggcctcagagactacgctggtaacttacatgagtccggcgtgcatggtgcactgttggcactggacgagaactttgatcacaatactcttgcactcatcttgcagattcctacccagaatacacaagcgaggcaggttatggagagggagttcaataacttattagcgctcggaacggaccggaaactcgatgacggagatgataaggtgttcagacgagcaccttcgtggcgtaaacgttttagaccaagagaacatcatggtcggggaggaatgctgtccgcctctgccgaaacccttccagctggtttccgcgtttctaccttaggaactctccagcccccaccggcacctccaaaaaaaatcatgccggaagcacattcccattacctgtacggccacatgctcagcgcctttagagattag

SEQ ID NO: 27596 - DNA, 1029 bp, synthetic construct
  source 1..1029: mol_type = other DNA; note = Synthetic coding sequence
atggcatccgtgacacgggctgtttttggtgagttgcctagtggtggcggaacagtcgagaagttccagctacagtctgacttattaagagtagatatcatctcctggggctgcactataaccgcattggaggtcaaagacagacagggaagagcctccgacgtcgtcctaggtttcgctgagctggaaggatatctacaaaagcagccctattttggggcagttatcggccgagtggcaaacagaatcgcgaagggaactttcaaggtggatggaaaagagtatcacctggctatcaataaagaacctaacagcctccatggcggtgtgcgaggattcgacaaggtgctgtggactcctagggtcctgtctaacggggtgcagttctccaggatctcacctgacggagaggagggatatcctggagagctgaaagtgtgggtaacttacaccctcgacgggggtgaattgatcgtgaactatcgagcccaggcctcccaggccacccctgtgaatctcaccaaccactcttatttcaacttagccggacaagctagtccaaacattaatgaccacgaggtgacaattgaagcagatacctatctcccagtcgacgagaccctgatacctacgggcgaagtggcacccgtccaagggaccgcctttgacctaaggaagccggtggagttaggtaagcatctgcaggattttcacctcaacggtttcgatcataatttttgccttaaagggagcaaggagaagcacttctgcgctagggtgcatcatgcagcttcggggagagtgctagaagtatataccactcagcctggcgtccagttctatacaggcaattttttagatgggacactcaaaggaaagaacggcgcagtctatcccaaacacagcggattttgtctagagacccagaattggccagacgccgtgaatcagcctcgatttcctccagtgttattgcgcccaggagaggagtatgatcataccacctggtttaagtttagcgtcgcctag

SEQ ID NO: 27597 - DNA, 2295 bp, synthetic construct
  source 1..2295: mol_type = other DNA; note = Synthetic coding sequence
atgtccgacacacgccgacgcgttaaggtttatacacttaacgaagatagacagtgggatgaccgtggaaccggacatgtctcttccacctacgtcgaagaattaaagggcatgagtcttctggtgagggccgagtcagatgggtccctgctactagagagcaaaatcaacccaaacacagcataccagaaacagcaggatacccttattgtctggtcagaagcggaaaactatgacttagcactcagctttcaagagaaggccggttgtgatgaaatctgggaaaagatctgtcaggtacaaggcaaagatccctccgttgaggtgacccaggacctcattgacgaatctgaggaagaacgatttgaggaaatgccggagacctcacacctgatcgacctccccacatgtgaattgaataagctagaggagattgctgatctggtgacatccgtcctctcatctccgatacgtcgggaaaagctagctctcgcattagaaaacgagggctatatcaaaaaacttctacagctgtttcaggcctgcgaaaacttagaaaatacagagggcctgcaccacttatacgagattattcgaggaatcctgtttctcaacaaagccactctgtttgaggtgatgttcagtgacgaatgtatcatggatgtggtggggtgcctggagtatgatcctgccctggcacagcccaagcgtcatagagaatttctgacgaagaccgcgaagtttaaggaagtcatacctattacagattcagagctgcggcagaagattcatcagacctaccgggtgcagtatattcaggatatcattctcccaactccaagcgtgttcgaagagaattttctcagcaccctgactagcttcatcttctttaataaggttgaaattgtgagtatgcttcaggaagatgagaagttcctgtccgaggtttttgctcaactgactgatgaggcgacagacgacgacaaacggagggaactcgtcaatttttttaaagagttctgtgcattcagccagaccctgcaaccacaaaatagggacgccttctttaaaactttggccaagctcggcatcctacccgctcttgagattgtaatgggaatggatgacctgcaggtgagatctgcagccaccgatatcttctcatacctggtggaattctcgcccagcatggttcgtgaatttgtgatgcaagaggcccagcagtcagacgatgacatcctcttaatcaatgtggttatcgaacagatgatctgtgacactgatccagagctgggcggagctgtgcagctcatggggctcctgcggaccttgattgatcccgagaatatgcttgctactaccaacaagaccgaaaagtctgaattcctgaacttcttttataaccattgtatgcatgtactgaccgcccctctccttaccaatacatctgaagataaatgcgaaaaagataatatcgtgggcagcaataagaataacaccatatgcccgggtgcattgagatttatgcgacggataatcgggctgaaagatgaattttacaatcgctatatcacaaaggggaacctgtttgaacctgtgatcaatgctcttcttgacaacggtactagatacaacttgcttaattccgcggtgatcgagttgtttgaatttatcagagtggaagacataaaaagtctgactgctcacattgtggaaaatttttataaggcactggagtctattgagtatgtacagaccttcaaagggcttaagaccaagtatgagcaggagaaggaccggcaaaaccagaaattgaatagcgtgccttcaatcttacggtctaatcgattccggcgagacgccaaggctctggaggaagacgaagaaatgtggtttaacgaagacgaagaagaagagggaaaggcagttgtggcgcctgtagaaaagccaaaaccagaagacgattttcctgataattacgagaagttcatggagactaaaaaagccaaagagagcgaggataaagaaaacttgccaaaaaggacctcaccaggcggattcaagtttacattttctcactctgcgtctgcagctaacggaacaaacagcaaatcagtcgttgctcaaatacccccagctacctcaaacggctctagtagtaagacaacaaacctgcccacctcagttacagcaacaaagggctctctggtcggtctagtggactatcccgacgacgaggaagaggatgaagaggaggaatcaagcccaaggaagcgaccaagactggggtcatag

SEQ ID NO: 27598 - DNA, 231 bp, synthetic construct
  source 1..231: mol_type = other DNA; note = Synthetic coding sequence
atgtctaaggcacacccaccggagctcaaaaagtttatggataagaagcttagcctgaaattaaacggaggcagacacgtccagggaatcctgagaggatttgatccctttatgaacctcgtgatcgacgagtgtgtcgagatggccacgagtggtcagcagaataacattggcatggtagtgattcggggtaacagtatcataatgctggaggccctggaaagagtctag

SEQ ID NO: 27599 - DNA, 528 bp, synthetic construct
  source 1..528: mol_type = other DNA; note = Synthetic coding sequence
atgcagctgactcaccagttagacttatttcccgaatgtcgggtaactctgcttctttttaaggacgtaaaaaatgccggtgacctgcgcagaaaagcaatggaggggaccatcgacggctccttgattaaccccactgtgatagtcgatcctttccagattttggtcgccgctaacaaagcagtccatctatacaagctgggtaagatgaagactcggacattgagtacagagatcatttttaacctctcacctaacaacaacatatctgaggccctgaaaaagttcggtatctccgctaacgataccagtatcctgatcgtctacatagaggagggggaaaaacagataaaccaagagtatctgataagccaggtggaggggcatcaggtgagtctcaagaatctaccggagataatgaatattacagaggtgaagaagatatataaactgagctcccaggaggaatcaataggcacacttttagacgctattatttgccgtatgagcacaaaagatgttctgtag

SEQ ID NO: 27600 - DNA, 909 bp, synthetic construct
  source 1..909: mol_type = other DNA; note = Synthetic coding sequence
atggctctgcacgatatggaggattttacctttgacgggacaaaaaggctgtcagtgaattacgtcaaaggtattttgcagccaacagatacttgcgacatatgggacaagatatggaatttccaggctaagcccgacgacctcctcatttcgacttacccaaaggccggaaccacatggacgcaggagatcgtagagctaatccagaacgagggagatgtggaaaaaagcaaaagggctccaacacatcagaggttccccttcttggaaatgaaaatcccgtctctaggtagcggacttgagcaagctcatgccatgccaagtcctagaattctaaagacccatctgccttttcaccttcttcccccatccctccttgagaaaaattgtaagatcatttatgtagccaggaatccaaaagacaatatggtttcttattaccacttccagcggatgaacaaagccttgccagctccaggcacctgggaagagtactttgaaacattcttggctgggaaagtgtgttgggggagctggcacgaacatgtgaaagggtggtgggaggcaaaagataaacataggattctttatctgttctacgaggacatgaagaaaaatcccaaacatgagattcagaagctggctgaatttataggcaaaaagctggacgataaagtgttagacaagatcgtccactatacaagcttcgatgtcatgaagcagaaccccatggctaactacagttccattcctgccgagattatggaccacagcatctcgccttttatgaggaagggcgcagtgggtgattggaagaagcatttcacagtagcgcagaatgaaagattcgatgaagattataaaaagaaaatgaccgacacgcggttgaccttccacttccagttttag

SEQ ID NO: 27601 - DNA, 2892 bp, synthetic construct
  source 1..2892: mol_type = other DNA; note = Synthetic coding sequence
atgtggtgcttgcattgcaattctgagagaactcagagcctattggagttggaattggattccggcgtggagggagaagcaccatctagcgaaaccggtactagtcttgacagtccttccgcttatccgcaaggccctcttgtccctggatcgtccctgagtcccgatcattatgagcataccagcgtgggagcttacggactttactcagggccaccagggcagcaacaaagaaccagaaggcctaagttacagcacagcacctcaatcctgcggaagcaggcagaagaagaggcaattaagcggtcgcgatctctcagtgaatcatatgagttgagctctgacctccaggacaagcaagttgagatgctggagagaaaatatgggggacgcttggtcacacgccatgcagcaagaaccatacaaacagccttccgccagtatcagatgaacaagaactttgagaggcttcggagtagcatgtccgaaaatcgcatgtcaagacgcatcgtcctcagcaatatgaggatgcagttctcgttcgagggtccagaaaaggtgcatagttcctattttgagggcaaacaggtgtcagttacaaacgatggctcccagctcggcgcacttgtgtcccccgaatgcggcgatctttcagagcccactacacttaagtccccagccccttcttccgacttcgctgacgccatcaccgagctggaggacgcattcagccgccaagtgaaatccttagcagagagcatcgatgatgccctcaattgtcgcagcctccacaccgaggaggcccctgccctggatgccgcacgcgcaagagatactgagccgcaaactgccctccatggcatggaccatagaaaactggacgaaatgacggccagctactcagatgttaccctgtatatcgatgaagaggaactgtccccacctctaccactgtcccaggcaggagaccggccttcaagcactgaatccgacctgagactgcgggcaggaggagctgctcccgactactgggctctcgctcacaaagaagacaaagcggatacagatacatcctgccgctccacgccaagcttggaaagacaagaacagagactgcgtgtggagcatctcccccttctcacaatcgagcccccatcagacagcagcgtcgacctatcagataggagcgaacggggaagtttgaaaaggcagagtgcttacgagagatcactgggaggacaacagggcagccctaagcacgggccacattctggagcaccgaaatctctgcctcgcgaagagcctgagctgcggccacgcccacccagaccactcgacagccacctggctataaacggcagcgcaaatcgccagtccaaaagcgaaagcgattactcggatggggacaatgatagtattaacagcacttcaaattcaaacgacactattaattgctcatccgaaagttcctccagggattctctgcgggagcagacgctgagtaagcaaacttatcataaggaggctagaaatagttgggacagcccagctttctcaaatgacgtcataagaaagagacactatcgcatcggtctgaacctgttcaacaaaaagccagagaaaggggtgcagtacctgattgaaagggggttcgtaccagatacaccagtcggcgtggcccatttcctcctgcaacgcaagggcctgtctcggcagatgatcggagagttcctgggtaaccggcaaaaacaatttaaccgcgacgtcctagattgtgttgtcgatgagatggatttcagcacaatggagttagacgaggcccttaggaagtttcaggcacatatccgggttcagggcgaagctcaaaaggtggagaggctgatcgaagctttctcacaacgctactgcatatgcaatccaggtgttgttcgccagttcagaaacccagacactatctttattctagccttcgcaattatactgctgaacacggacatgtattcaccaaacgtgaaacctgagcgtaaaatgaagctcgaggatttcataaaaaacttgcgtggggtggacgatggggaggatatcccacgggaaatgctcatgggaatctacgagcggataagaaagcgagaactgaagacaaacgaagaccatgtaagccaagtgcagaaggtcgagaaactgattgtaggaaaaaaacctataggcagtctccaccccggactgggctgtgtgctctcactcccacatcggaggctggtgtgttattgccgcttgtttgaggtgccagaccctaacaaacctcagaagctggggcttcatcagagagagattttcttgttcaatgaccttcttgtcgtgacaaagatatttcaaaaaaaaaagaacagcgtcacatattcctttagacaaagcttctccctgtatggcatgcaggtgctactgttcgagaatcagtactaccctaatggaattaggctgacttcttcggtgccaggagccgacattaaggttctcattaatttcaatgcccctaatccccaagacaggaaaaagttcaccgacgacttgcgggagagtatcgctgaggtgcaagaaatggagaaacaccgcatcgagtcggagttggagaagcagaagggtgtggtcaggccttccatgtcccagtgcagtagcctgaagaaggaaagtggcaacggcaccttgtcccgagcttgtctggatgactcctacgccagcggcgagggtcttaagagatctgccttgtcctcctccctacgggatctgtcggaagcgggaaaacgcggaaggagatccagcgccggttccctggaatcaaatgtggagttccaaccctttgaaccccttcagccctctgttctgtgcagctag

SEQ ID NO: 27602 - DNA, 711 bp, synthetic construct
  source 1..711: mol_type = other DNA; note = Synthetic coding sequence
atggcaagccttgacagagtgaaggtactggtcctgggggactctggggttggaaagagttctctagtgcacctgctttgccagaaccaggtgctgggcaacccatcatggacagtgggctgcagcgtggacgtgcgagtgcacgactacaaagagggcactcccgaagagaaaacttactacatcgagctctgggacgtggggggatccgtagggagtgctagttccgtaaaatccacgcgcgctgtcttctacaacagtgttaatggcatcatcttcgtccatgacttgactaataaaaagagttcccagaatctgcgccgatggagcctggaagcgctgaatagggacttagtgcctacgggagtcctcgttactaatggcgactacgaccaggaacagttcgctgacaaccaaattcctctgctcgtgatcggaacgaaactggaccaaatccacgaaactaaacgtcacgaagtcctcacaaggacagctttcctcgcggaagattttaatccagaagagataaatctggactgtacaaatcctcggtacctggccgctgggtctagtaacgctgtcaagttgagcagattcttcgacaaagtcatcgaaaagcggtactttctccgggagggcaaccagattcccggatttccagaccgcaagaggtttggcgcaggcaccctcaaaagtttgcactatgactag

SEQ ID NO: 27603 - DNA, 2784 bp, synthetic construct
  source 1..2784: mol_type = other DNA; note = Synthetic coding sequence
atgcaaagcatcctgtaccatgggctgattagggaccaggcttgtaggcgtcagaccgactattggcagttcgtgaaggatattagatggctcagcccacacagtgccctacacgtggagaaattcatctccgtccacgagaacgaccagagttccgctgatggtgcttccgaacgtgcagtcgctgagctctggctgcagcacagtttacagtaccactgcttatccgctcaactgaggcctctactgggagatagacaatacattaggaaattctacactgatgccgcattcctgctgagcgatgctcacgtaactgcgatgttacagtgtctcgaagctgtggagcagaataatccacgactcttagcacagatcgatgcatctatgttcgcaagaaagcacgagagcccactcctggtgactaagagccagtccctgacagccctgcccagcagtacctataccccccctaatagttatgcgcagcattcttacttcggatcctttagctctctgcatcagagcgtgcctaacaacggctcagaaagaagatccacctcattccctctgtcaggtccgccacggaagccccaggagtctagaggacatgtgagccctgctgaggaccagaccatccaggccccacctgtctctgttagtgcactcgcacgcgatagtcctctgacgcccaatgagatgagtagctctaccttaacaagtcctatcgaggcgtcctgggttagctcccaaaatgactctcccggagacgccagtgagggtcccgaatacttggcaataggaaatcttgatcccagaggaagaacggccagctgccagtcacattcatcaaatgcggaatcatcaagctctaatctgttctcaagtagtagcagccagaaacccgacagcgccgctagctcactgggcgaccaggaggggggaggtgagagccaacttagcagcgtattgagacgctcctcattcagcgaagggcagacactcactgttacatctggcgctaagaaatctcacattagatcacacagtgacaccagcatcgccagtcggggagccccaggtggaccacgcaacattacgatcatcgtggaagacccgatcgcagagtcgtgcaacgacaaagcaaaactccgcggtcccttaccctacagtggccagagtagcgaagtttcgacaccttcttcgctgtacatggagtatgaggggggtcggtacttatgttctggggagggcatgttccgcagaccctcagaaggtcagagtctgatttcctacctgtccgagcaggacttcgggagttgcgccgacctggaaaaagaaaacgctcacttttcaatcagcgaatccttgatcgcagccatcgaactgatgaaatgcaacatgatgagtcaatgcctcgaggaagaggaggttgaggaagaagactctgatagagaaatccaagagctgaaacagaagatccggctgcgcagacagcagatcaggaccaagaatctattgcctatgtaccaagaggcagaacacggatcatttcgggtgacctcttcttccagccagttttcttccagagacagcgcccagctatcagactctggatccgcggatgaagttgacgaattcgaaattcaggacgccgatattcgcagaaatacagcatcctcgagcaaatcattcgtctcctcgcagtcattttcccattgctttctccactccactagcgcggaggctgtggcgatgggacttctgaagcaattcgaggggatgcagctgccagcagcatcagagctcgaatggctagtcccggagcacgatgccccacagaaactgttgcccatccctgactcactacccatttctccagacgacggacagcatgcggacatctataagctgagaattcgggtgcgaggaaatttagaatgggctcccccacggcctcaaattatcttcaacgtgcatcctgctccgacacgcaagatcgccgtcgctaaacaaaattatcggtgtgcaggatgcgggatcaggacagacccagactacattaaacggctcaggtattgcgagtatctgggcaaatacttttgccagtgctgccacgagaacgcgcagatggccatcccgagccgagtgctccgcaaatgggatttttccaagtattacgtcagtaacttttccaaggatcttctgattaaaatctggaacgatcccttgtttaatgttcaggacattaactctgctctgtacagaaaggtaaaactgctgaatcaagtgaggttgttacgggtgcaactgtgtcatatgaaaaacatgtttaaaacttgccgcttggctaaggagttgctagattcattcgatacagtcccgggacatctgactgaggaccttcacctgtattcactcaacgaccttacagccacgcgaaagggagaacttggtccaaggctggccgaactgacaagggccggagctacgcacgtggagcgatgcatgctgtgtcaggctaagggcttcatttgtgaattctgccaaaacgaggacgacatcatttttcccttcgagctgcacaaatgccgtacatgtgaggaatgtaaggcatgttaccataaagcatgtttcaaatcaggatcttgcccgcgttgtgaacggctgcaagctcggcgtgaagcactcgcgaggcaatctctggaaagctacttgagcgattacgaggaggagccagccgaggccctcgccctagaagcagcagtactcgaagctacatag

SEQ ID NO: 27604 - DNA, 300 bp, synthetic construct
  source 1..300: mol_type = other DNA; note = Synthetic coding sequence
atggcaagcgcctcagcacggggtaatcaggataaggatgcccacttccctccaccatctaaacaaagtttattattttgccctaaatctaaattgcacattcaccgggcagagattagtaagatcatgagagagtgtcaggaagagtcattttggaagcgcgctctgcccttctccctcgtttctatgctagtgacccagggcctggtctatcagggatatctggccgcaaattcaagattcgggagccttccaaaggtagctcgcactgcttctctgccagttcggaacgctaaatag

SEQ ID NO: 27605 - DNA, 786 bp, synthetic construct
  source 1..786: mol_type = other DNA; note = Synthetic coding sequence
atggttgtcttaagcgtgcccgcagaggtgacagtgattctcctagacatagaagggaccactacccccatagcctttgtgaaagacatcctgtttccttacatcgaggaaaacgtgaaagaatacctgcagacacattgggaagaggaagagtgccagcaggatgttagtctgctgcgcaagcaggcggaggaagatgcccatttagacggggcagtccccatccccgctgcctcaggcaacggtgtggatgacttgcagcagatgattcaagcagtggtggataatgtttgctggcagatgtcactggaccggaagactacggccctcaagcagctgcagggacacatgtggcgcgcagcatttactgccggacgcatgaaggctgagttcttcgcagacgtcgtaccagccgtccgcaaatggagagaggcagggatgaaagtctatatctattcctcaggcagcgtagaagcccaaaagttattgttcgggcacagcaccgaaggagatattctggagctcgtggatggacattttgatactaaaattgggcataaagtggagagcgagtcttatcggaagatcgctgatagcattggctgctccacgaacaatatcctgtttttaacagacgttacccgtgaggcctctgcggctgaggaagccgacgtgcacgtcgcagtcgtggttcggcctggtaatgcaggtttgactgatgacgagaagacttactactccttgatcaccagctttagtgagctgtatctgcccagtagcacttag

SEQ ID NO: 27606 - DNA, 1188 bp, synthetic construct
  source 1..1188: mol_type = other DNA; note = Synthetic coding sequence
atggccgaggatggcctgccaaaaatctacagccaccctcccacggagtccagcaaaacccccactgctgctactattttctttggagccgacaatgcaatccctaaaagtgaaactacaattacttctgaaggtgatcacgtgacaagcgttaatgaatacatgttggaatctgatttctcgaccaccaccgataacaagttgactgcaaagaaggagaaattaaaatcggaagatgacatggggaccgacttcattaaatcgaccactcacctgcagaaggagataacttccctgactgggaccacgaacagtataacacgtgattcaattactgagcactttatgcctgtgaagataggtaatataagctctccagtcaccacagtgtccctaatcgatttcagcaccgatatcgccaaggaggatattttgctggctacaatcgatacgggcgatgcggaaatttctattacctccgaggtgtcaggcacacttaaggactcaagcgccggtgtggccgacgctccagccttcccccgtaagaaggacgaggcagacatgagtaactacaattcttctatcaagtcgaatgtgccagctgacgaagctgtgcaagtgaccgattccactatccccgaggcagaaatccccccagcacctgaagaatccttcaccacgatccccgatatcacggcactggaggaggaaaagatcaccgaaatagatctgagcgtgttggaagatgacactagcgctgtggccaccttgactgactcagacgaaaaattcatcaccgttttcgaactgacaacctctgcggagaaggacaaggacaagagggaggatactttgttgaccgatgaggagacaaccgaaggcgcttccatctggatggagagagacactgctaatgaagcggagacacacagcgtgctgctgaccgcggtagaatctcggtacgacttcgtggttcccgctagcattgctaccaacttggtggaagagagctctactgaagaagacctctctgaaactgataatacagagaccgtgcccaagattaccgaacccttttcggggacgacatctgtgttagacaccccggattacaaagaggatacctctacgactgagaccgacatttttgagttgctgaaggaggagcctgatgagttcatgatctag

SEQ ID NO: 27607 - DNA, 921 bp, synthetic construct
  source 1..921: mol_type = other DNA; note = Synthetic coding sequence
atgtacttttgttggggggcagattcccgggagctgcagcgcagaagaacggctggcagtcccggtgcagaactgctgcaagcagcctctggagaacggcattccctgctccttttgacaaaccaccgagtgctgtcttgcggcgacaactctcgcggtcaactcggccgaagaggggctcaacgcggagagctccctgagccgattcaggcattggagacactcattgtggatctggtctcttgcgggaaagagcacagccttgctgtctgtcataaaggacgggtgttcgcctggggtgccggaagcgagggacagctgggtattggagaatttaaagagataagcttcacgcctaaaaaaatcatgacattaaacgatattaagattatacaggtcagttgtggacactatcacagcttggctctcagtaaagactcccaggtcttttcttgggggaagaattcccatggccagttagggctggggaaggagttcccgtctcaggctagcccacagcgcgtccggtccctagagggcatacccttggctcaggtcgctgccggtggagcacactccttcgctctgagtctgtgcggaacctcattcggctggggatccaactctgctggccagctggctttgtctgggaggaacgttccagtgcaaagtaacaagcccttgtctgtcggagcgcttaagaatttaggagtcgtgtatatctcctgtggcgacgcacacacagctgtgctgacccaggacggcaaggtatttaccttcggagataaccggtcgggacagcttggttacagcccaactccggaaaaaagaggcccacagttagtcgagcgaatcgacgggctggtgtcccagatcgactgtggcagaaatagcaagcatggatttatgacctttttttag

SEQ ID NO: 27608 - DNA, 909 bp, synthetic construct
  source 1..909: mol_type = other DNA; note = Synthetic coding sequence
atgggaaactgttgttggacccagtgtttcggccttctgcgaaaggaggccggacgacttcagcgtgtgggcggagggggaggcagcaagtattttcgcacctgtagcaggggagagcacttgacgattgagttcgagaacctggtagagtcggacgaaggcgagagtcctgggtcctcccataggcctttaaccgaggaggagatcgttgatctcagagaacgccactacgacagtattgctgagaaacagaaagatctggacaaaaagatccagaaagagctggccttacaggaagagaagttaagactggaagaagaggctctatacgctgcacagcgcgaagccgcacgtgctgcgaaacaacggaaactgctggagcaagagcggcaacgcattgtgcagcagtaccacccgtctaacaacggggagtatcagagttccggccctgaggatgactttgaatcatgcctccgtaacatgaagtcacagtatgaggtctttaggagctcacgcctgtcatccgacgccaccgtgcttacacctaataccgaaagcagctgtgatctgatgaccaaaaccaagagtacgtctggaaacgatgattctacctccctggatttagagtgggaagacgaagagggcatgaacaggatgctcccaatgagagagaggtccaagactgaggaggatattctacgcgcagccctgaaatatagtaacaagaagacaggctcaaatcccaccagcgcctcagatgactccaatggtctggagtgggagaacgatttcgtgagtgccgagatggacgacaacgggaatagtgagtattcaggctttgtcaatccggtgctcgaactgtcagattcagggatccggcattctgataccgatcagcaaacccgatag

SEQ ID NO: 27609 - DNA, 1641 bp, synthetic construct
  source 1..1641: mol_type = other DNA; note = Synthetic coding sequence
atggccaccttggtggtgaataaactgggagccggtgtagattcaggtcgccagggtagtcggggtacagcggtggtaaaagtgctggagtgcggcgtctgtgaggatgtattttccctgcagggcgataaggttcctcggctgctactctgcggccacaccgtatgccatgattgcctcacacgactcccattgcatggcagagccatccgatgtccgtttgataggcaagttactgatttgggcgatagcggcgtgtggggcctcaaaaagaacttcgcgctcctggagctgttagagaggttgcaaaatggtcccattggacaatatggagccgctgaagaatcgatcggcatttcgggcgaaagtatcatccggtgtgacgaggatgaggctcacctggcctcagtgtactgcaccgtgtgcgccacccatctctgttctgaatgcagccaggttacacactcaaccaagaccctggcaaagcaccgcagggtgcctctggcggacaagccccacgagaaaacaatgtgttcccagcaccaagtccatgcgatcgagtttgtctgtttggaggaggggtgtcagacatctcctctgatgtgctgtgtgtgcaaagagtacggtaagcaccaagggcataagcacagcgtgttggagcctgaggcaaaccagattagagcctcaattctcgacatggcccactgcattcgaacttttaccgaggaaatttcagattactctaggaagctcgtggggatcgtgcaacatattgagggaggggaacagatcgttgaggacggcattggcatggctcatacggagcatgtcccaggcaccgccgagaatgcacggagttgcatacgtgcctatttttatgatttacatgagacactctgccggcaggaggagatggcactgtccgtggttgacgcccacgtccgcgaaaagttgatctggctgcggcagcaacaggaggatatgaccatcctgctgtcggaggtgagcgccgcatgcctccactgcgagaagaccctacaacaggacgactgtcgagtcgtgctggcaaagcaggagatcactaggctgctggaaacgcttcagaagcaacagcagcagtttactgaagtcgcagatcacattcagctggatgccagtatcccagtaacgtttaccaaggacaatcgagtgcatatcggtccaaagatggaaatccgggtggtcacactgggcttagatggcgcaggaaagactaccattctgttcaagcttaagcaggatgaattcatgcaacctattccgacaatcggatttaacgtggagaccgtggagtataagaacctgaagttcaccatctgggacgtgggaggcaagcataagcttcggccactctggaagcactactacctgaacacacaggcggttgtgttcgtggtggatagtagccatagggacaggatctcagaggcacactccgagctagccaagctgttgaccgaaaaggagttgcgagacgctcttttgctaatttttgctaacaagcaggacgtggccggtgcgctcagtgtggaagaaataaccgaactgctgagcttgcataagttatgctgtggacgatcatgtttctctgataatatgtag

SEQ ID NO: 27610 - DNA, 609 bp, synthetic construct
  source 1..609: mol_type = other DNA; note = Synthetic coding sequence
atggcggtacctgctgccctaattctgagagaatctcctagcatgaagaaggccgtatcactgataaacgcaattgacactggaagatttcctcggctgctaacaagaattctgcagaagctacatttaaaagccgagagcagcttctccgaagaggaagaagaaaagcttcaggccgcattctctttagagaagcaagatctccacctggtattggaaactatctcttttattctcgaacaagctgtttatcacaacgtgaagcccgctgcccttcaacagcaattggagaatatccacctgaggcaggacaaggcagaagcctttgtgaatacttggtcttcgatgggacaggaaactgtagaaaagtttcggcaacggattctggccccatgcaagctggagacagtaggatggcaactgaatttacagatggcccacagcgcccaggctaaactcaagagccctcaagctgtgctgcagctgggtgttaacaacgaggactctaagtctcttgagaaggtcctggtcgagttctctcacaaagagctctttgatttctataacaagcttgagaccatccaggcccagctggacagtctgacctag

SEQ ID NO: 27611 - DNA, 1521 bp, synthetic construct
  source 1..1521: mol_type = other DNA; note = Synthetic coding sequence
atggaggctgatattattacaaaccttcgctgcagactgaaggaagcagaggaggagagactgaaagcagctcagtacgggttgcagctcgttgagtctcagaatgaactccagaaccaactcgacaaatgtaggaacgagatgatgaccatgactgagagctacgagcaagagaagtacacactccagcgagaggttgaactcaagtcacggatgctggagtccctgagttgtgagtgcgaagccataaaacaacaacagaaaatgcacctcgagaagctcgaagagcagttgagccggtctcacgggcaggaggtcaatgaactgaagaccaagattgagaagctgaaggtggaacttgacgaggccaggctttccgaaaagcagctgaaacaccaagttgaccatcagaaggagctcctgtcttgcaaatccgaggaactgagggtgatgtcagagagggttcaagaaagtatgtcttctgagatgcttgctttgcaaattgagctgaccgaaatggaatctatgaaggtgaaatatcagagcctgaaaaagcaaaatgtgtttaatcgtgaacagatgcaacgaatgaaactccagatcgcaaccctgttgcagatgaagggaagccagactgaatttgaacagcaggagagattgttggccatgttagagcagaaaaatggggaaataaagcacctcctgggcgaaatccgaaatctggaaaagtttaagaacctgtatgattcaatggagtcgaagccctccgtggattcggggaccttggaagataatacatattataccgacttgctccagatgaaactggacaatctcaataaagaaatcgagagcacaaagggggagctgtctattcagcggatgaaagccttgtttgaaagccagcgagctctagacatcgaaagaaagctgttcgccaatgaacggtgcctccagctgtcggaaagtgagaacatgaaacttcgtgccaagcttgacgagctaaaactgaagtatgagccggaggagactgtggaggttccggtcttaaagaagcggcgtgaggtgctgccagtggacatcacaactgcaaaagatgcatgcgttaataattcagcgcttggtggagaagtgtatcgactccctccccaaaaggaggaaacccaatcttgccctaactcacttgaagacaacaatctgcaactggagaagagcgtgtccatttacactcctgttgtgtctctgtccccacacaagaatctgccagtggacatgcagctgaagaaggaaaagaagtgcgtgaaattaatcggcgtgcctgcagacgccgaagccctttcagaacgcagcggaaataccccaaactccccaaggctcgccgcagaatcgaagcttcaaactgaagtgaaggagggaaaagaaacctcctccaagctcgaaaaggagacatgtaagaagctccatcccattctctacgtgtccagtaaatctactcctgagactcagtgcccccagcagtag

SEQ ID NO: 27612 - DNA, 1842 bp, synthetic construct
  source 1..1842: mol_type = other DNA; note = Synthetic coding sequence
atggcaactattccggattggaagctacagctgctcgccaggcggagacaggaagaagcaagtgttcgcggaagggagaaggccgaacgggagcggctcagtcagatgcccgcttggaaacgaggcttgcttgaacgccgtcgcgctaagttgggactcagccccggagagcccagccccgtcctcggcacagtggaggccggtccaccagaccccgatgagtccgcggtgcttctggaggctatcgggccagtgcaccagaatagatttatccgccaggagcgtcagcaacagcagcaacagcaacaacggtcagaagagcttctggctgaacggaagccaggaccactggaggcaagagagcgtagaccttcaccaggtgagatgagagaccaaagtccgaagggcagagagtccagggaagaacggctgagcccccgagaaacaagggaaagacgacttggaataggaggtgctcaagagctgtcactcagacctcttgaggcacgtgattggcgccaatcacccggagaggtcggtgataggagctcaagactctctgaggcctggaagtggcgcctcagtcccggagagaccccggagaggagcttgcggctggctgaatcccgcgaacagtcccccagacggaaggaagtagagtcccgcctctctcctggcgagtccgcctaccaaaaactgggactaaccgaggcccataaatggaggccagacagtcgggagtctcaagagcaaagtctggtgcagctggaggcgaccgaatggcggctgagatctggagaggaacggcaggattattcagaggaatgtggccgaaaagaagagtggcccgtccctggagtcgcccctaaagagacagcagagctgtctgagacgctgactagggaggcccagggaaatagtagcgctggggtggaggctgccgagcaaaggccagtcgaggatggggagagaggcatgaagcctacggagggatggaagtggaccctcaattccggaaaggctcgggagtggactcccagagacatagaggcccaaactcagaagcctgaacccccagaaagcgccgagaaactcctggaaagccccggagtagaggcgggtgagggggaagccgaaaaggaggaggcaggcgctcagggcagacccctgcgagctctgcagaactgttgcagtgtcccctccccccttcctcccgaggacgctggaacgggagggctgcggcagcaagaagaggaggcagttgaattgcaacctccacccccagcccctctgtcgccacccccacctgctcccactgctcctcaaccacccggtgacccgttaatgtctaggctcttttatggggtcaaggcaggaccaggggtgggggcaccccgtaggtccggacacaccttcacagttaaccccagaaggtccgtgccccctgctacacccgctacaccaacctcccccgctacagtggacgccgcagtgccgggtgccggaaaaaaaagatatccaactgctgaagagattctggtgttgggtgggtacctcaggctgagtcgaagttgtctggcaaaagggagccctgagaggcaccataaacaactgaaaatcagcttctctgagaccgccctcgaaaccacataccagtaccccagtgaatcctcggtcttggaggagctgggccctgagcccgaagttccatctgccccaaatccccctgcagcccagcccgatgacgaagaggatgaagaggagcttcttttattgcagcccgaactgcaggggggattgaggaccaaggccctgattgtggatgagagctgccgacgatag

SEQ ID NO: 27613 - DNA, 654 bp, synthetic construct
  source 1..654: mol_type = other DNA; note = Synthetic coding sequence
atgtcttggacctgcccgcgatgtcagcaacctgtgttttttgccgagaaagtgtcatccttaggcaagaactggcacagattttgtttgaagtgcgagaggtgtcatagcattttaagccctgggggacacgcggaacataacggtcgcccttactgtcacaagccgtgctacggagccctcttcggccctagaggcgtgaacattggtggcgtcggatcttacctgtataatcccccaacccccagtcccggatgtacaacgcccctgagcccctcatcctttagcccaccacggcctaggacaggcttaccacagggaaaaaagtcaccgccacatatgaagaccttcaccggagaaacaagtctatgccctgggtgcggcgaacctgtgtatttcgccgaaaaggtgatgagcctgggccgtaactggcatcggccatgtcttaggtgtcagagatgtcataaaacgctgactgcagggagtcatgcagagcacgatggagtcccgtactgtcacgtgccctgctacggctatttattcggccctaaaggaggtcagccacacccacgccattgggacggaatgtacatgcccgaagtgtggcacgtgcacgggttatgggtttgcgtggacaatttcccatgtggctag

SEQ ID NO: 27614 - DNA, 1503 bp, synthetic construct
  source 1..1503: mol_type = other DNA; note = Synthetic coding sequence
atgaaccagcgaagatctgaaagcaggccagggaaccacaggttgcaggcgtacgccgagcctggaaaaggagacagcgggggtgccggacccctgtccggcagtgcccgacgcggacgaggagggggaggagcaattcgggttcggagaccatgttggagcgggggagcgggaaggggcggtggccctgcttgggccgtgcgccttcctaccgttacagcgggatggacgtggcctgctcttcgcacactcagcagtctgcgcgctggcccttccgaaccacatagccccggtaggaggcctccgagggcgggacgccctctctgccaggccgacccccaacccggaaaggccgcaaggcgcagtctggagccagatcccgctcagacgggtccccgtcctgctagagccgctggcatgtcagaagctaggaaagggccagatgaggcggaggagagtcaatacgatagtggaattgaaagcctacgcagcctccggagcctgccggaatcgacaagcgcgccagccagtggcccttcagatggatctccacaaccatgtactcacccaccaggtccggtcaaagaaccccaagaaaaagaagatgccgacggcgaaagggccgattccacctacggatcttcctccctaacatataccctttctttactcgggggaccagaggccgaggatccagcgcctcggctgcctctcccccacgtcggcgctcttagcccacagcagctggaggccctgacgtacatctcggaagacggagacacacttgtccacttagccgttatccatgaagccccagctgtgttactgtgttgtctagccctgcttccccaggaggttctggatattcaaaataacttgtaccagacagcccttcacttggcagtgcacctggatcagcctggcgcagtgcgcgcactggtgcttaagggcgctagtagagcacttcaagatagacatggggatacagccttgcatgtcgcgtgtcagcgccagcacctggcgtgcgccaggtgcctcctcgagggtcgccctgagccaggcagaggcacctcgcattccctcgacttgcagttgcaaaattggcagggattggcctgccttcatattgcaacactgcaaaaaaatcagcccctgatggagctgctgcttcgcaatggtgcagacattgatgttcaggagggaacctcaggcaagaccgctctgcaccttgctgttgagacgcaagaacgcggactggtgcaatttttgctccaagccggtgcacaagtggacgctcgcatgctgaacggctgcacccccctgcacctagcagcagggagagggcttatggggataagtagtacgctctgtaaggcaggcgctgattcccttctgcgaaacgttgaggatgagacgccccaagatcttacagaggagtctctggtgctgttaccattcgatgacctcaaaatctctggaaagctgctcctatgcactgattag

SEQ ID NO: 27615 - DNA, 1881 bp, synthetic construct
  source 1..1881: mol_type = other DNA; note = Synthetic coding sequence
atggagggcccacgagaaaaccaggacccgcctccccgtagtctcgcccgacacctgagcgacgcggatcgtctgagaaaggtgatccaggaactggtggacacagaaaaatcatatgtgaaggacctatcgtgcttattcgagctgtatctcgaacctttgcagaacgaaacattcttaacccaggatgaaatggaaagtcttttcggttccctgccagagatgctggaattccaaaaagtgtttctagagactctagaggatggcatttcagcatctagtgacttcaatacgctcgagaccccatcccagttcaggaagctgctgttctctttgggtggatctttcttatattatgccgatcactttaagttgtattcaggcttctgcgccaaccacataaaggtgcagaaagtgctggaacgcgctaagacagataaggcctttaaagccttcctcgatgcccgaaatccaacaaaacagcatagcagtacactggaatcttacctgattaagcccgtgcagcgagttctgaagtatccccttctcctaaaagagcttgtctccttaactgaccaggagagcgaggagcattaccatctcactgaagcgctgaaggctatggagaaggtggcctcgcatataaatgaaatgcagaagatctacgaggactacggcacggtgtttgaccagttagtggccgagcagtccggaaccgagaaagaggtgacggagttaagcatgggggagctgcttatgcattctactgtgtcttggctgaatcctttcctatccttgggcaaagctcgaaaggacctagaactcacggttttcgtattcaagagagccgtcatacttgtttacaaggagaattgcaagctgaagaaaaaactcccctcgaattctcgacccgcacataactcgacagacctcgacccgttcaagttccgctggctgatccctattagtgcgcttcaagtcaggttaggcaatccagctgggaccgaaaacaattctatttgggaactgattcataccaaatctgagatcgagggacgcccagagacaatctttcagttatgctgctcagacagcgagtccaaaacgaatatcgtgaaagtgattaggtctattttacgcgaaaatttccggagacacatcaagtgtgaattgcctttagaaaagacctgtaaggatcggctggttccattaaaaaaccgagtgcccgtctccgccaagctcgctagttccagatctcttaaagtccttaaaaacagcagttcaaacgagtggaccggggaaactggcaaggggaccctcctggactctgatgaagggagcctttcctcaggcactcaatcctccggttgccccaccgcggagggccgtcaggacagtaagtctacctcccctggaaaatatccacacccgggactggccgacttcgccgacaatctcattaaggagtccgatatactgagcgatgaagatgatgaccaccgtcagacggtgaagcagggatcgccaacaaaggatatcgaaattcagtttcagagactacggatttccgaagacccagatgttcatccagaagccgagcagcagcccggaccagagtcaggggagggccagaaaggtggagagcagccaaaactggttaggggtcatttttgccctatcaagcgcaaagcgaacagcaccaaacgcgatagaggaaccctgctcaaggcccaaatacgacatcagagcctggattcccaatcagagaacgctacaatcgacctgaatagcgtcctggaaagggagtttagcgtccagagccttacatctgtagtttcagaagagtgcttttatgagaccgaaagccatggcaagtcctag

SEQ ID NO: 27616 - DNA, 1596 bp, synthetic construct
  source 1..1596: mol_type = other DNA; note = Synthetic coding sequence
atggccgctgtaaaaacactgaatccgaaagcagaagtcgccagagctcaggctgccctagccgtcaacatcagcgccgctaggggactgcaggacgtgctgcggaccaatctggggccaaaagggactatgaagatgctggtgtccggcgcaggcgatattaagctcacgaaggacggcaatgtcctcttgcacgaaatgcaaattcagcacccaacggcgagcttgatagctaaggtggccacagcccaggacgatatcaccggggatgggacaacttccaacgtgctgatcataggcgaactgttaaagcaggctgacctgtacatctctgaggggttgcatccaagaatcatcacggaaggattcgaagctgccaaggagaaagcacttcaattcttagaggaggtaaaggtatcgcgcgagatggatcgcgaaactttgattgatgtagcccgaacctccttgcggacaaaggtgcatgctgaacttgcagacgtccttacagaagctgttgtcgacagcattctggccatcaaaaaacaggacgagccgatcgatctgtttatgatcgaaataatggagatgaaacataaatccgaaactgacacctcgttaataagaggcctggtgctcgaccacggggctcgccacccagacatgaagaagcgggtggaggatgcctacatccttacatgtaatgtgtctcttgagtacgaaaagactgaagtgaacagcgggttcttctacaagagcgctgaggagagggagaagctagtgaaagccgaaagaaagtttatcgaagatcgagtgaagaagataatcgaactgaaacgcaaagtgtgcggcgactcagataaaggatttgtggtgatcaatcagaagggcatcgacccctttagcctggatgctctatccaaggagggcatcgttgcgctgcgcagagccaagagaaggaacatggaacggctaacacttgcctgtggaggcgtggctctcaactcctttgacgacctgtcgcccgactgtcttggccatgcaggtctggtgtacgagtatacactaggcgaggagaagtttacatttatcgaaaaatgcaataatcctaggtccgttacgttgttgattaaggggcctaataaacacactttaacccagattaaagacgccgttcgggatggcctgagggctgtgaagaacgccattgacgacggatgtgtagttccgggagccggagccgtagaggttgcgatggcagaagcccttataaagcataagccctccgtcaaaggtcgggctcagttaggggttcaggccttcgccgacgcactgctgatcattcctaaggtcctagcacagaactctggttttgatcttcaggaaacgttggtcaaaattcaggccgaacattcggagtccggccagctcgtgggggtggacctcaatactggcgagcctatggttgccgctgaggttggcgtgtgggacaactattgtgtcaagaagcaactcctgcatagctgcactgtgattgccaccaacattctgctcgtggatgagatcatgcgggctggtatgagcagcctgaagggttag

SEQ ID NO: 27617 - DNA, 666 bp, synthetic construct
  source 1..666: mol_type = other DNA; note = Synthetic coding sequence
atgtcagcttttggacatgacgaggcttggatggaagcagggggtttcggtctcgaggctgcggagcgcacagagtaccagtccctatgtaaatctaaactgttattcctgggggaacaatcaggcaagactagtatcatctctagatttatgtacaactccttcggatgtgcatgtcaggccacagtagggatcgattttctcagtaaaactatgtacttggaggatcaaattgtgcagctgcagctctgggatactgcagggcaagagaggtttcacagcctaatcccaagctacatacgcgactccacaattgccgttgtcgtgtacgacataacaaatattaactcatttaaggaaaccgataaatgggtggagcacgtgcgggcagagaggggagatgatgtggtaattatgctcctcggtaataagattgatctcgataacaagcgacaggttaccgcagaacagggggaggagaaatctaggaacctcaatgttatgtttatagagactagcgccaaaaccggatataacgtgaaaaagcttttccggagagtcgcttcggcactcctgagtactagaacttcccctcctcccaaagaaggcacagtcgagatagagcttgaaagtttcgaagagtccggaaaccggagctactgttag

SEQ ID NO: 27618 - DNA, 6222 bp, synthetic construct
  source 1..6222: mol_type = other DNA; note = Synthetic coding sequence
atggctgaggtgagaaaatttaccaagcgcctctccaagcccggtactgcagcagaattacgtcagagcgtctccgaggccgttaggggaagcgtagttttagagaaggcaaaggtggttgaacccctcgactacgagaacgtgatagcccagcgcaagacgcagatctattccgatcccctgagagatctcttgatgtttccaatggaagacatctcaataagcgttatcggcagacaaaggcgcaccgtgcagtctacagtcccagaggacgcagaaaaacgtgcacagtctctttttgtgaaggagtgcattaaaacctacagcactgattggcacgttgtgaattataaatatgaagacttctctggcgatttccggatgttgccatgtaagtcccttcggcctgaaaagatcccgaaccacgtgtttgaaatcgatgaagactgtgagaaggatgaagactccagcagtctctgtagccagaagggaggtgtcataaaacagggttggctgcacaaggctaatgtgaactctacaataaccgtgactatgaaggtgttcaagcgacggtacttctacctcacgcagctcccagatggaagctacatactcaactcttacaaagacgagaagaactctaaggaatcaaagggatgcatctacctggacgcatgcatagatgtggtccaatgtcccaagatgaggaggcacgcttttgagctgaaaatgctggataagtattctcactacttagctgctgagactgagcaggaaatggaggaatggcttattaccctcaagaagataatccagataaacacagactctctggtccaggagaaaaaagagaccgtggagaccgctcaggacgatgaaacatcttcccaggggaaagccgaaaacattatggctagtctggaaaggagtatgcatccggaattgatgaagtatggacgtgagaccgagcagttgaacaaactgagtcgaggggatggacgccagaacctcttttcttttgactccgaggtgcagcgtctggactttagtggtattgagccagacattaagcctttcgaggaaaaatgtaacaaacgtttcctggtcaactgtcatgacctgacatttaatatcctgggacagattggagataacgcaaaaggtcctcccacgaacgtggaacctttctttatcaacctcgctttatttgatgtgaagaacaactgtaaaatctctgctgacttccatgtggacctcaaccccccttccgtcagggaaatgctgtgggggtcctcaacccagttggccagcgatggctctcccaagggcagttcgccagaatcgtacattcatggcattgccgaatcccagctccgatacattcaacagggcatcttctcagtaacaaacccgcatccggagatttttctggttgccagaatcgagaaggttttgcaaggaaatattactcattgtgccgagccctacatcaaaaattctgaccccgttaaaacagcgcagaaagtccataggactgcgaagcaggtatgtagcagactcggccagtaccgcatgccctttgcatgggcagcaaggccaatttttaaggatacccagggctctctggacctggacggtagattttctcctttatacaaacaagactccagcaagctcagttcagaggacatcctgaagctactcagtgagtacaaaaaacccgagaaaacgaagctacagataatccctggtcagctaaacattaccgtggagtgtgtgccagtggacttgagcaactgcataacatcctcctacgtgcccttgaaaccatttgagaaaaattgccagaatattactgtcgaagtcgaagagttcgtgcccgagatgaccaagtattgctacccgtttaccatttataaaaaccatctgtatgtataccccctccagctgaagtacgattcccagaagacatttgccaaggcccgaaatatcgcagtatgcgttgaatttagagattccgacgaaagtgacgcctccgccttaaagtgtatctacggaaaacctgccggatcggtgttcaccacaaatgcctacgctgttgtgagccaccataaccaaaaccctgaattttacgatgaaataaaaatagagcttcccatacacttgcaccagaagcaccatctcctgttcacattttatcacgtgtcatgtgagatcaatactaaagggactacaaagaaacaagataccgtggaaacaccggtgggtttcgcatgggttccactgctgaaggatgggagaattattacctttgagcagcaactgccagtctccgcaaacttgccgcctggctatttgaacttgaatgatgcggagtctagaaggcagtgtaacgtggacatcaaatgggtagatggggcaaaacccctactaaaaattaagagccatctcgaaagcactatttacacacaagatctccatgtgcacaaattttttcaccactgccaactcatccagtctggctctaaggaggtgcccggagaactgataaaatatcttaagtgcctgcatgcgatggaaatccaggtgatgatacaattccttcccgtgattctcatgcaattatttagagtgctgaccaacatgacacacgaggatgacgtgccaatcaactgcactatggtgctgttgcacattgtgagcaaatgtcatgaggaaggactggactcatatttgagatctttcattaaatactcgtttcgacccgagaagccttccgctcctcaggcccaactgattcatgagactcttgctaccaccatgattgctattctcaagcagtcagcagacttcctctccataaataaactgctgaagtattcctggtttttttttgaaatcatagctaaaagcatggccacatatctgctggaagaaaacaagattaaactgcctcggggacagaggtttcccgagacctaccaccacgttcttcatagtctgctgctcgctatcattccgcacgtaacaatccgctatgcagagataccagatgaaagcagaaacgttaattacagtttggcctcctttctgaaaaggtgtttgacgctgatggatagaggatttatttttaatctgatcaacgattacatctccgggtttagcccaaaagatcccaaggtacttgccgagtataagttcgagtttcttcagactatctgtaaccacgaacattacatccccttaaacctgcccatggccttcgcgaaacccaaactgcagcgtgtgcaggacagcaatttggagtattctctctccgatgagtattgtaaacaccacttcttggtcggacttctcctgagagagacatcgatagctctgcaagataactatgagatccgatatacagccatctctgttatcaagaatctgcttatcaaacacgcgtttgatacacgatatcagcataaaaaccaacaggcgaagatagcgcagctttacctgccctttgtcggtctgctgctcgagaatattcagcggctcgcgggacgagatacgctgtactcttgcgcagccatgccgaatagtgcctccagggacgaatttccatgtggatttacgagtcccgcaaacagaggtagcctttccactgacaaggatacggcctatggttccttccagaacggccacggcattaagagggaagattcacgcggttctcttatccccgaaggcgctacggggttcccggaccaagggaatacaggggaaaatactcgtcagagcagcacacgctcttcagtctcccagtacaacagactggatcagtacgagatcaggtctctgctgatgtgttatctatatattgtgaaaatgatttcggaggacaccttgttaacttattggaacaaagtgtcaccacaggagctaataaatattttaatccttctggaggtttgcctgtttcacttccggtatatggggaaacgcaacattgctcgcgtgcacgacgcatggctgtctaaacactttggaatcgaccgcaaatcacagacaatgcctgccctgcgcaatcggagtggggtaatgcaggccagactccaacacctgtctagcctcgaaagttccttcacccttaaccattccagtaccacaacggaggccgacatctttcatcaggctcttctcgaagggaacactgcaaccgaagtatccctcaccgtgcttgataccatctcctttttcacacagtgcttcaagacccagttactcaataacgacggtcacaatccactcatgaaaaaggtttttgacatccatcttgcctttctcaaaaacgggcaatctgaagtctctctaaagcacgttttcgcgtcccttcgggctttcatttccaaatttcctagtgccttcttcaaagggagagttaatatgtgtgcggcattctgttacgaagtgcttaaatgttgcacgtccaagatcagctctactagaaatgaggcttctgccctgctgtatttgctgatgcgcaataactttgagtacactaagcgcaagacctttctccggactcacctacaaattatcattgccgtgtcccagctgatcgctgatgtggcactgtccggtggatccaggttccaggagtcactgttcatcatcaataattttgctaattcggacaggcctatgaaggctactgcttttcctgctgaggtgaaggatctgactaagcgaatccgaacagtattaatggctaccgcccagatgaaagagcatgagaaagatcccgagatgctcatcgacctgcaatactctctggctaaaagttatgcctccacaccagagctgagaaaaacatggcttgactctatggccaaaattcacgtcaagaacggcgatttcagtgaggccgctatgtgctatgtacacgtcgcagcactggttgccgagtttctgcacagaaagaagttgtttccaaacggctgttctgcattcaagaaaattactcccaatattgacgaggaaggagctatgaaagaggatgccggaatgatggacgttcattattccgaagaggtgttgctggaacttcttgagcaatgcgtggacggcctctggaaggcggaacgatatgaaatcattagcgagatctccaagctgatcgtgcccatctatgagaaacgccgagagtttgagaaattgactcaggtctataggacactccacggcgcttatactaagatcttagaggtcatgcatactaaaaagaggctactgggtacttttttccgggtggccttttacggtcaatcatttttcgaggaagaggatgggaaggagtatatctacaaggagccgaaactgacgggccttagtgaaatttctctcaggctggtgaaactctatggagagaagttcggcaccgagaacgtgaaaataattcaggatagcgacaaggtgaacgcaaaggagctggaccccaagtacgctcacattcaggtgacttacgtgaaaccatattttgacgacaaggagctgaccgagcgcaaaaccgaattcgagaggaatcataacatctcccggtttgtgttcgaagccccatatactctgtcaggcaaaaaacagggatgcattgaagagcagtgtaagcggaggacaatcctcacaacatccaactcgtttccatatgtcaaaaagcgcattcccattaattgtgaacaacagattaatcttaagcctattgatgtcgcaactgatgaaatcaaagacaagactgcggagctgcagaaattgtgtagttccacggacgtggacatgatccaattgcagcttaagctgcagggctgtgtgagcgttcaagttaacgcaggccctctcgcatatgcccgagcattcctgaatgacagccaggccagcaagtatccccctaagaaagtgagtgaactgaaggacatgttccgaaagtttattcaggcctgttcaatagctctcgagttgaatgagaggctcatcaaagaagaccaggtcgagtatcacgagggcctgaagtcgaatttccgcgatatggtcaaagagctatcggacattattcatgagcagattctgcaagaagatacaatgcactccccttggatgagtaatacactccatgtcttttgcgccattagtggcacctccagcgatcgcggttatggaagccccagatatgcggaagtgtaa

SEQ ID NO: 27619 - DNA, 1644 bp, synthetic construct
  source 1..1644: mol_type = other DNA; note = Synthetic coding sequence
atgggcggatgtatccctttcctgaaggctgcacgggcactgtgcccgaggattatgcccccactgcttctgctctctgcatttattttcttagtatctgtcctcgggggagctccaggccacaatcctgacagaaggacaaaaatggtctctatccacagcctctccgagctcgaacgcctcaaactgcaggaaactgcctatcacgagctggtggccagacattttctcagcgagttcaagccagaccgagcattgcccatcgatcgccctaacacccttgacaaatggtttcttatccttcgcggacagcaacgcgctgtctctcacaagacattcgggatctcccttgaagaagtgctcgtgaacgagttcacaaggcgtaagcatttggaactgactgctactatgcaggtcgaagaggctacagggcaggccgctggcagacgacggggaaatgtggtccgtcgggtcttcggaagaatccggaggttcttcagcaggagaaggaacgagcctaccctgccaagagaattcacacggaggggcaggcgtggagcagtcagtgtagattctcttgccgaattggaagacggcgcactgcttttgcaaacactgcaactgagtaagatttcgttcccgatcggccagcgattgttgggctccaagagaaaaatgtcactgaaccctattgccaaacagataccacaggttgtagaagcctgctgtcagtttatagagaagcatggcttatcggccgtcggcatctttactcttgagtattccgtccagcgcgtccgccagctcagagaagaattcgatcagggccttgacgtggtactggatgacaaccaaaacgtgcacgacgtcgctgcgctcctaaaagagttcttcagagatatgaaagactctctcctgccagacgatctatacatgagctttcttttgacagctaccctgaaacctcaggatcagttaagcgccctccagctgctcgtttacctgatgcccccatgtcattctgacaccttagaacgcctgcttaaagccctgcacaaaattaccgagaattgtgaggattctatcggaattgacggtcagctggtgcccggtaatcgcatgacctccacaaacctcgctttggtgttcggatcagcactcctgaaaaaaggtaagttcggcaagagagaaagtagaaagactaaactcgggatagatcactacgtcgcaagcgtgaacgtggtgcgagccatgatagacaactgggatgtgctgttccaagtaccccctcacatccagagacaggtggcaaaaagagtgtggaagtcatcccccgaagccttagacttcattagacgcaggaacctgcgaaaaatacaatcagcccgaatcaagatggaagaagacgccctcctgtctgaccccgttgagacatctgcagaagccagagctgctgttctggctcagagtaagccttccgacgaaggtagctccgaagaacccgcagtgccctcaggcacagcgaggagtcacgacgacgaagaaggggctggcaacccgcctattccagagcaggaccggcctctgctgcgggtgcccagggagaaagaagcaaagactggagtgtcctacttctttccctag

SEQ ID NO: 27620 - DNA, 5613 bp, synthetic construct
  source 1..5613: mol_type = other DNA; note = Synthetic coding sequence
atggcgagatggattccaactaagcgacagaagtatggtgtggccatctataattataatgcatcccaggatgtggagctttcccttcagataggtgacacggtgcatatactggagatgtatgagggatggtacagaggatataccctgcagaataagtcaaagaagggcatcttccctgagacctatattcacctgaaagaggctacggtggaagacctcggtcagcacgagaccgtgatccctggggaactaccactcgttcaggagctgacctctaccctgcgggagtgggctgtcatatggcggaagttatacgtgaacaataagctaacattgttccgtcagttacagcagatgacctattccctcatcgaatggcggagccagatcttgagcggaactttgccgaaggacgaattagcggaacttaaaaaaaaggtcactgcaaaaattgatcacggaaatcgaatgctgggcctggatttagtggtgagagatgacaacgggaatattcttgatccagacgaaacatctacaatcgcattgtttaaagctcatgaagttgcctctaaacggattgaggagaagattcaggaagagaagtccatcctgcagaacttggatctgcgaggccagtcgatatttagcactattcacacctacggtctgtacgtcaacttcaagaatttcgtctgcaacatcggtgaagatgcggaacttttcatggccttatacgaccccgatcagagtacgttcatctctgaaaattatttaattcgctggggaagtaacggcatgcccaaggaaatcgagaaactcaacaacctgcaagcagtcttcactgatctctcctccatggatcttatccgacctcgtgtgagtctcgtctgtcaaatcgtaagggttggacatatggaattgaaggaagggaagaagcacacttgtggcctcaggcggccttttggggtggctgtgatggatattaccgatatcatccacgggaaggtcgacgacgaagaaaagcaacactttatcccctttcagcaaatcgccatggaaacctacattcggcaacggcaactgattatgtcccccctgattacctcccatgttattggagagaatgaaccactgaccagcgttttgaacaaggttattgcggctaaagaagtgaatcataaaggtcagggactgtgggtgtcccttaaacttctgcccggagatttgacacaagtacagaagaactttagccacctggtagaccggtcaactgccatcgctcggaagatgggcttcccagagatcatcttgccaggtgatgtgcgaaacgacatctacgtgacactgattcatggcgagtttgacaaagggaaaaaaaagacacccaagaatgtggaagtgaccatgtctgtacacgatgaggaaggtaagctgctcgaaaaggccattcatcccggagctggttacgagggtatctccgagtataagagtgtggtgtattatcaggtcaagcaaccatgctggtacgagaccgttaaggtttccatcgctattgaagaggttactcgctgtcacatccggttcacattccggcatagaagctcgcaggaaacaagagataaaagcgagcgggcttttggcgtagccttcgtcaagctaatgaatcctgatgggaccactcttcaggacgggagacatgatctcgtcgtgtataaaggggacaataaaaaaatggaagatgctaagttctacttaacattgcctggtactaaaatggagatggaagagaaggagctgcaagccagcaagaacctggtgacttttactccttcaaaggatagcacaaaagattccttccagattgctactttgatctgttcaaccaagctcacccagaacgtcgacctactcggcctgctcaactggcgttccaactctcagaacatcaagcataatctgaagaaactcatggaagttgatggcggagagatagttaagtttctgcaggacacactggacgctttatttaacatcatgatggagatgtcggactctgagacttacgactttctggtttttgacgctctggtcttcattatttccctcataggcgacatcaaatttcagcactttaatccggtcctcgagacctacatttacaagcacttctctgccactttagcctatgttaagctcagtaaggttctcaacttttacgtggcaaacgccgacgattcaagcaagacagaactactgttcgccgcacttaaggccctgaagtacttatttcgttttataattcagtcgcgcgttctgtatcttcgattctacggacagtctaaagacggagatgaattcaacaactccatccgccaactctttttggccttcaatatgcttatggacaggccgttagaagaagccgtcaaaatcaagggcgcagcactgaaatacttaccctccattataaacgatgtcaaactggtgtttgatcctgtagaactttccgttctattttgcaagttcattcagtccatcccagataaccaattggtacgtcagaagttgaactgtatgactaaaatagtcgagtcaactttgttcaggcagtcagagtgccgcgaggtgttgctgccactactcactgaccagctgtcgggccagctcgacgacaactccaacaaaccagatcacgaagcttcaagccagctgctctctaacatactggaggtgctggaccggaaagatgtaggagctactgccgttcatatccagctgatcatggaacgtttgctccggagaatcaacaggacagtgatcggtatgaatcgacagagcccacacatagggagttttgtcgcatgcatgatcgctctcctgcaacaaatggacgactcccactattcccactacattagcacatttaaaacaagacaagacattatcgattttctgatggaaacctttatcatgttcaaggacctgataggcaaaaacgtttatgccaaagactggatggtgatgaatatgacacagaaccgcgtgtttctacgcgcaattaatcagttcgcggaggtcctgacccggttctttatggaccaggcgagttttgaattgcagctgtggaacaactactttcatctagcagtcgcctttcttacgcatgaaagtctgcagttggagacctttagtcaggctaaacgtaacaagatcgtgaagaagtacggagacatgcgaaaagagattggtttcaggatccgggatatgtggtataatctgggaccacacaaaattaaattcatcccatcaatggtggggccaatactggaggtgacactgacgccagaggtggaattgcgtaaagctaccattccaattttctttgacatgatgcagtgtgagttcaatttcagtgggaatggcaactttcacatgttcgaaaatgagttgattacaaaacttgatcaggaagtcgaggggggaagaggggacgagcaatataaggttctccttgagaaactccttctcgagcattgtaggaaacacaagtacctgagcagttctggggaagtttttgctctgctcgtctcctccctgctggagaacctgctagattacagaacaattataatgcaggacgagtcaaaggagaatcgcatgtcatgcaccgtcaacgtgctcaatttttacaaggaaaagaaaagagaggatatttatatccgttatttgtacaaactgagggatctgcatagggactgtgaaaattatacggaggctgcctatacgctcctcctgcacgcagaattgctgcaatggtccgataaaccctgcgttccccatctcctccagaaggacagttactatgtctacactcagcaggaactaaaggaaaaactgtatcaagaaattatcagttactttgataaggggaagatgtgggagaaggccataaaactcagtaaagagctcgcagaaacctatgaaagcaaggtgtttgattatgagggactcggaaatttgctgaaaaagagggcctcattttacgagaacatcattaaggcgatgcggcctcagcccgaatacttcgcagtgggctactacggccaagggtttccctcttttcttcgcaataaaattttcatttacagggggaaagaatacgagcggagagaggacttctctctaaggctgctgacacagttccccaacgccgagaagatgactagtactactccacctggggaggacatcaaatcaagtccgaaacagtatatgcagtgcttcactgtgaagccagttatgtctttgccaccctcttataaggataaaccggtgcccgaacagattctgaattactatcgggcaaacgaggtgcagcagtttagatactctaggccatttcgaaagggagaaaaggatcctgataacgagtttgcgaccatgtggatagagcgtacgacctacaccaccgcttataccttccctggcattctgaagtggtttgaagtgaagcaaatttccaccgaggaaatttcacctctcgagaacgccatcgagaccatggaactcaccaatgagaggatctctaactgtgtacaacagcacgcctgggaccgctccctgtcggtgcatcccctgtctatgctgctctccggcatcgtggacccggctgtaatggggggattctcaaattatgaaaaagccttctttaccgagaagtatttacaggaacacccggaagatcaggaaaaggttgaacttctgaagaggctgatagcattgcagatgcccctcctaacagagggcattcgcatacatggggagaagctcaccgaacaactgaagccattacacgaacgcctgtcttcatgctttagggagctcaaggaaaaagtggaaaagcattacggggtgattactctaccccctaatcttaccgaacgtaagcagtcccgcaccggatcgatagtcctgccatacattatgagtagcacccttcggagactgtccataactagcgtgacatcttcagtggtcagcacttcaagcaactcttctgacaatgcgccatctaggcccggttctgatgggtctatactggagcctctgttggagagacgggcttccagcggggctagagtggaagacctcagtctgcgagaagagaactcagagaatcgaatttctaaattcaagcgcaaagactggagcctctcgaaatctcaggttatcgcagagaaagcgccagaacctgatttgatgtctccgaccagaaaagctcagcgcccaaagtctctgcagctgatggacaaccggctgtccccgttccatgggtcaagtccccctcaatctacacccttgagtcccccacccctcactccaaaggcaacgcggaccctttcatctcctagtctccaaactgatgggattgctgcaactcccgtcccaccgcctcctcctccaaaaagcaagccttacgagggctctcagcgaaatagtaccgaacttgcaccacctttgccggttcggagggaggcaaaggctccacctccccctccgccaaaggcaagaaaatccggaatcccaacaagcgagccaggctctcagtac

SEQ ID NO: 27621 - DNA, 1623 bp, synthetic construct
  source 1..1623: mol_type = other DNA; note = Synthetic coding sequence
atgtcagcgtcactgaactataaatcattttccaaagagcaacagaccatggacaacctggagaagcaactgatttgcccaatctgtctggaaatgttcactaagcccgttgtaatcttgccatgccagcataacctgtgccgaaaatgtgcaagcgacatctttcaggctagtaatccctatctcccaacacgcggaggcactaccatggcctccggcggacgctttcgttgtccatcctgccgccacgaggtagtgctggatcggcacggggtatacgggctgcagaggaacctgctggtcgagaacatcattgacatctacaaacaagaatcgaccagacccgaaaagaaaagtgaccaacctatgtgcgaggagcatgaagaggagagaatcaatatttattgcctgaattgcgaagtgccaacctgttccctctgtaaagtttttggcgcacacaaggattgtcaggttgcgcctctcacacacgtctttcagagacagaaaagcgagctgtccgacgggatagccatcctggttggaagcaatgatcgcgttcagggcgtgatcagccagttggaggacacctgtaagactattgaggagtgttgtcgaaaacagaaacaggaactctgtgaaaaattcgactacctctatggaatccttgaggaaaggaaaaacgagatgacccaagtaattacccgtacacaggaggagaagctggaacatgtgagagctctaatcaagaaatactcagaccaccttgaaaatgtatctaagctggtggaatctgggatccagttcatggacgaacccgaaatggccgtgtttctgcagaacgcaaagacgcttctcaagaagatatccgaggcctctaaggcgttccaaatggaaaaaatcgagcacggttacgagaacatgaaccatttcaccgtcaacttgaaccgtgaagagaagatcatcagggaaattgatttttatagagaggatgaggacgaagaggaagaagaagggggagaaggcgaaaaggaaggcgaaggcgaggtgggcggagaagcggttgaagtcgaagaggtagaaaatgtccagaccgagttcccaggagaggacgaaaatccagaaaaagcctctgaattgtcccaggttgagctgcaggcagctcctggggcattaccagtctcctctccagaacctccccctgcactcccaccagccgctgacgctcccgtgacacaaggagaggtggtccctacaggatccgagcagacaactgagagcgagacccccgtcccggcagccgcagagacagctgaccctcttttttatccatcctggtataaaggtcagacccgtaaggcgacaaccaatcccccatgcacgcctgggagcgagggcttgggacaaattggccctccaggctcagaggactccaacgttcggaaagctgaagtcgccgctgcggctgctagtgaaagggccgcagtgtcaggcaaggaaacgtctgctcccgctgcaacgagtcaggaattagtcatctgccttgctctgctcgcatttcttatcttgcattacatatggagtcagatccaatgtctgatctttaccctaatggactggatttag

SEQ ID NO: 27622 - DNA, 3252 bp, synthetic construct
  source 1..3252: mol_type = other DNA; note = Synthetic coding sequence
atgtcacagacgcaggactatgagtgccgttcacataacgtcgatcttcccgaatctaggattcccggaagcaatacgcgactggagtgggtcgagatcatcgagccacggaccagagagcggatgtacgctaatctggtaaccggggaatgcgtgtgggatcctcctgccggagtgcgtattaaacgtacgtcagaaaaccagtggtgggagctcttcgaccctaataccagccgattctactactataatgccagcacacagagaacagtctggcacaggccccagggctgcgacatcatacccctggccaaactccagacactcaaacaaaatacagaaagcccccgagcctccgccgagagtagccctggacgaggttcctccgtttcacgagagggctccacttcaagttcccttgaacctgagcccgacaccgaaaaagcacaagagttacccgctagggccggaaggcctgctgctttcgggacggttaaggaggacagtggaagctctagtccgccaggagtgtttctggaaaaagactacgagatttatcgcgactacagcgccgatggacagctgttacactaccgtacttcttcattgcggtggaactcgggagccaaggaacgtatgctgataaaagtggccgatagggagccctctttccttgcggcacagggcaatggttacgcacccgatggcccaccaggtgtgagatcccgtcggcctagcggctcccagcactcaccatccttacaaacatttgccccagaagccgatgggaccattttcttccctgaacggaggccctccccattcctgaagagagccgaactaccaggctcatcgtcccctctgctcgcgcagccacgtaaacccagtggcgattcgcagccaagcagtcccagatacggatacgaacccccactctatgaggagcccccagtggagtaccaagctccaatttacgatgagccaccaatggacgtccagtttgaagctggtggtggctaccaggcaggctctccgcagagatcccctgggaggaagccaaggccgttccttcaacccaacaagcagggacccccttccccttgccagcaacttgtattaacaaaacagaagtgcccggaacggtttctgtcactggaatactcccccgcaggaaaggagtatgtgcgccagttagtgtatgtggaacaggccggatctagccccaagttgcgtgctggacctagacataaatacgcacccaatcctggaggcggatcctatagtttacagcccagcccctgtctcctgcgtgatcagcgcctaggcgttaagtccggagattatagcacaatggaaggacccgagcttcgccactctcagcctcctactcctctacctcaggcacaggaggatgctatgtcgtggtcctcccagcaggatactctgtccagtaccggatacagtcctggaaccagaaaaaggaaatctcggaagccatccctttgccaggccacaagcgccacgcccaccgaaggcccaggcgacctgcttgtggaacagccgctggcagaggagcagccaccttgtggcacatcccttgctcccgtgaagagggcggaaggcgaggccgaaggggctcgtggagccgctgagcctttcctcgcccaggctcgactagcctgggaggcccaacaggcccattttcacatgaaacaaaggagtagttgggattcacaacaggacgggtccggctacgagagtgacggagccctgcccctgcctatgcctggtcccgtcgtccgcgcattctctgaggacgaggcgctggctcagcaggaaaatagacattggagaaggggaacatttgagaagctaggctttccacagattctgctagagaaatccgtgtcagtgcaaacaaacctcgccagtcctgagccctacctgcatccttcacagtccgaggacctggccgcatgtgcgcagtttgaatcatcaaggcagagtagaagcggagtgccatcaagttcttgcgtctttcctacattcacacttcgcaagccgtcctctgagactgacattgagaactgggcatctaaacacttcaacaagcatacgcagggcttgtttaggcgtaaggtgtccattgccaacatgctggcctggtcaagtgagtctattaagaaaccgatgatagttacaagtgatcgccacgtgaaaaaggaagcgtgtgagctgttcaaactaatccagatgtacatgggagataggcgtgccaaagccgaccccctccatgtcgcactggaggtggcaaccaaagggtggagtgtgcaaggcctcagagacgaactgtacatccagctgtgcagacagacgactgagaattttcgactggaatccctggcgaggggctgggagctgatggctatctgtctggccttttttccaccaaccccaaaattccactcctatctggagggctatatctatagacacatggaccctgttaatgatacgaaaggtgtggccatcagtacatacgcaaagtactgttaccacaagctgcagaaggccgcattgacaggtgcaaagaaggggctcaagaagcctaatgtggaggaaattcggcacgcaaaaaacgcagtctttagcccatccatgtttgggagcgcactccaggaggtgatgggcatgcagagggagaggtacccggaacggcagcttccctgggtgcagactcgcctgtcagaggaagtgctggccctcaatggggaccagacagaggggattttccgcgtgccaggggacattgatgaggtcaacgcactgaagctccaggtagaccagtggaaggtgccaaccgggctcgaagatcctcacgtgccagcatctcttctaaagctttggtatagagaactggaagagcccctgatcccccacgagttttacgagcaatgcattgctcattacgattctccagaagccgcagtggccgtggtgcatgccctgcccagaatcaacaggatggttctgtgctacttgatccgatttttgcaggtctttgttcagccagcaaacgttgccgttacgaagatggacgtgtccaaccttgcaatggtgatggccccaaattgtctgcgatgccagtctgatgacccacgtgtgatcttcgaaaatacaagaaaagaaatgtcattcttacgggtgctcatccagcacctcgacacatcctttatggagggcgtgctgtag

SEQ ID NO: 27623 - DNA, 426 bp, synthetic construct
  source 1..426: mol_type = other DNA; note = Synthetic coding sequence
atgggtaagggtattcctctcaacgatcaggatagaattccatggctctgtaatttgcatgacatcctcttacgggacgtagcttctggccaaagggttgtcctcgcatgcagcgccctcaagaagacataccgcgacattctgactcaggggaaggatggagtagcactgaaatgtgaggaatcaggcaaggaggccaaacaggctgaaatgcagttactcgtcgttcatttaagcgggagcttcgaggtgataagcgggagactgctgaagagggagggccatttcatgccgcctgagctgctgcaaagccagttcgaaacattagagccacccgctgcccctgagaacttcatccagatttctgtcgacaagaatgtctcggagattatcgccaccatcatggaaacattgaaaatgaaatag

SEQ ID NO: 27624 - DNA, 1701 bp, synthetic construct
  source 1..1701: mol_type = other DNA; note = Synthetic coding sequence
atggacatccagctggatcctgcccgtgacgacttgccactcatggcaaatacgtcgcacatccttgtcaagcactacgtgctcgatctggacgttgatttcgaatcacaagtaatagagggtacaatcgtgctgtttctggaggatgggaataggtttaagaagcaaaattcctccattgaagaggcctgtcaaagcgagagtaacaaggcgtgcaagttcggcatgccagagccttgtcacatccccgtcaccaacgcacggacgttcagctctgagatggagtataacgattttgcaatttgctctaaaggagaaaaggataccagcgataaagatggcaaccatgacaaccaagaacacgccagcggcatttcaagcagtaaatattgctgtgacactgggaatcacggttctgaggattttctcctagttctggactgctgcgatttgtcagtgcttaaggtcgaagaagtggacgtggctgccgtgcccggtctagagaaattcacacgatcacccgaattaaccgtggtatccgaggagtttcggaaccaaattgtccgcgagttagtgaccctcccagccaaccggtggcgcgagcaactcgactactatgcgcgttgtagccaggcaccagggtgcggggagttgttgtttgatacagatacctggagtcttcaaataaggaaaaccggcgctcaaacagctacagacttcccccacgctatccggatctggtacaaaacgaaacctgaaggtaggtccgtcacatggacttctgaccagtctggccgaccttgcgtctatacagtgggctcacccattaataaccgggctctgttcccatgccaagagccgcctgtggctatgtcaacatggcaggccaccgtgcgagcagccgcatcctttgtagtcctgatgtccggagagaactcagcgaagccgacccagttatgggaggaatgcagctcatggtactattacgtgactatgccaatgcctgcctccacttttactattgcagtgggttgctggactgagatgaaaatggagacgtggtccagtaacgacctggccacagaacgtcccttttccccttccgaagccaattttcgccacgtgggagtttgttcacatatggagtatccttgtcggttccaaaatgcatctgccacgacccaagaaattatcccacacagggtatttgcacccgtgtgcctgactggcgcttgccaggaaaccctgctgcgactgattccgccttgcttgtccgcagctcacagtgtgctaggggctcatccctttagccgccttgatgttttgatagtacctgccaatttccccagcctgggcatggcctctcctcatattatgttcctgtcgcaaagcattctgactggagggaaccatctgtgcgggacacgtctgtgccacgagattgcccatgcatggttcggcttagctataggtgctcgcgattggaccgaagaatggctgtctgaaggttttgccacacacctcgaagacgttttttgggcaactgcacaacaactggcgccttacgaagcacgcgaacagcaggagctgcgggcatgtttacggtggaggagactgcaagacgagatgcagtgctctcccgaagagatgcaggtgctccgcttccctcacgtgggcggttgttcaggatcgttctcatag

SEQ ID NO: 27625 - DNA, 1266 bp, synthetic construct
  source 1..1266: mol_type = other DNA; note = Synthetic coding sequence
atgccattcctgcatggcttccgcagaatcatctttgagtaccagcccctggtggatgctattctgggctccttaggaatccaggacccagagcgtcaggaaagcttggataggccaagttatgttgcctcagaagagagtcggatcttggttctcaccgagctcctagagaggaaggctcatagtcctttttatcaggagggcgtatctaatgcactgctgaagatggccgagctcgggctaacacgagctgctgatgtgctgctgcggcatggtgcaaacctgaacttcgaagatcccgtaacatattacacagccttgcacatcgctgttctacgaaaccaaccagacatggtggagctccttgtccaccacggggctgatgtgaatcgaagagaccggattcatgagtcctccccattagacctcgcctctgaagagccagaacgcctcccttgtctccagagattgctcgatctaggcgctgacgtcaatgcggctgataagcacgggaaaacagcactcctgcacgccctggcttcatcagatggcgtacagatccataataccgagaatatccgcctgctgctggagggcggagccgacgtgaaggctaccactaaagacggcgacaccgttttcacatgcataatttttttgctgggtgagacagtcggaggggacaaagaggaagcccagatgataaacagattttgctttcaggttacacggctgctgctagcccacggggctgatccatcagagtgtcctgctcacgagtcacttactcacatctgtctgaagagtttcaagcttcattttcctctactcaggtttctcctggaatcaggtgctgcctataattgctcgctccacggcgcttcatgctggagcgggttccacattatctttgaaagactgtgctcccaccctggttgcactgaggacgagtcacatgccgatttgctgcggaaggctgaaactgttctggacctgatggtgacaaatagccagaagctccaattacctgagaatttcgatattcaccccgttggctccttagctgaaaagatccaggctctgcacttcagcctgcggcagttagaatcataccctccccctctgaagcatctatgccgcgtcgctatccggctatatctccagccgtggcctgttgacgtcaaggtgaaagctttgcccctgcccgacagactgaagtggtatctcctttccgagcatagcggatctgttgaggacgacatatag

SEQ ID NO: 27626 - DNA, 594 bp, synthetic construct
  source 1..594: mol_type = other DNA; note = Synthetic coding sequence
atgccatttctgcatggatttcggaggataatttttgaatatcagcctcttgttgacgccatcctgggcagtctcggcatccaggaccctgaaaggcaggaaagtttggaccgtccttcatacgtcgcatcagaggagagccgtatcctggtgctcacagaactcctggagaggaaggcgcattcacccttctatcaggagggggtctccaacgctctgttgaagatggcggaattgggcctcacacgggctgctgatgttctcctgcgacatggcgcaaatctgaatttcgaggacccggtgacctactatacagcactgcacatagcagttctcaggaatcagccagatatggtggagctgttagtccaccatggagccgacgttaatagaagggaccgcgaaaagcttctgtgttcgatgctgtggcctgctgctacggggtgtcgttctaccatccttagaacatttgtgtcctattggaaagagggccagacatcaagaccccctccaaagatgggaacacagtgcagcccagcctcatctagctgcttggtgcggccttgggaaggtactaaacgcaggccaagatag

SEQ ID NO: 27627 - DNA, 684 bp, synthetic construct
  source 1..684: mol_type = other DNA; note = Synthetic coding sequence
atgtccgatatcaacctggattgggtagacaggcggcagctccagcgattagaggaaatgcttatcgtggtggacgaaaacgacaaggtgatcggggctgacaccaaaaggaactgccaccttaatgagaacattgagaaggggctgctgcaccgagctttcagcgtcgtgctcttcaacaccaaaaaccgcattttgattcaacagaggtccgataccaaggtgacttttcccggatacttcacagactcttgctcatcacatcccctttacaaccccgctgagctggaggagaaggacgcgatcggcgttaggcgcgcagctcagcgacggctgcaggctgagctgggcatccccggtgaacagatttcaccagaggacattgttttcatgaccatttaccatcacaaggccaagtcagaccgcatatggggagagcatgagatctgctatttattactggtaagaaagaacgtaacgttgaacccagatccatctgagaccaagtccatcctctacctgtcccaggaagaactctgggaattgctcgagcgcgaagctcgtggcgaggttaaggtgaccccctggctgcgcactattgccgagcggttcctgtacagatggtggcctcacctggacgatgtgacccccttcgttgagctacacaaaatccacagagtctag

SEQ ID NO: 27628 - DNA, 864 bp, synthetic construct
  source 1..864: mol_type = other DNA; note = Synthetic coding sequence
atggaggttatggaagggcctttaaacctggcgcaccaacagagtcgaagagccgaccggctgctggcagctgggaagtacgaagaagccataagctgccataaaaaggccgcagcctatctttccgaagcaatgaagttgacgcaatcggagcaggcgcatttatcactggagctccagcgtgattctcatatgaaacagctgctgctgattcaagaaaggtggaaaagggcacagcgagaggagcgtctgaaggcccagcaaaacaccgataaagacgcagccgctcacctgcagacttctcacaagccatctgcagaggatgccgaagggcagtctcccctttcccagaagtactcaccgtcaacagaaaagtgtctgccggagattcagggtattttcgatcgggaccccgatacgttgctttacctactccagcagaaatccgagcctgccgagccatgcatcggatcaaaggctcccaaggacgataagacgattatcgaggagcaggcgactaaaattgctgacctcaagaggcacgtggagtttcttgtagccgagaacgagcggttgcgaaaggagaacaagcaactcaaggctgaaaaagctaggctgctgaaaggcccaattgagaaggaactcgacgtggatgcagactttgtcgagaccagcgagttgtggtccctgccgcctcatgctgaaaccgccaccgcctcttctacctggcaaaaattcgcggcaaacaccgggaaggctaaagatatcccaatccctaacctgccccctttagacttcccgtcccccgagctgcctcttatggaactgagcgaagacatactcaagggatttatgaacaactag

SEQ ID NO: 27629 - DNA, 2844 bp, synthetic construct
  source 1..2844: mol_type = other DNA; note = Synthetic coding sequence
atgtgtgtggactctctggtgcggatttgctccggactgtcatatggtagaatccggaatattaaatctcttagcgacattcaaattgtgcaggtggcctgcgggtactaccatagtctcgcactatccaaggcctcggaggttttctgctgggggcagaacaagtacgggcagcttggattggggacagattgcaaaaaacagacttcaccgcaactgctcaagtcattgcttggtattccgttcatgcaggtcgctgcaggcggagcccacagcttcgtactaacactttcaggcgctatttttggttggggtcgaaacaaattcggtcagcttggtctgaacgacgaaaacgatcgctatgtgcccaatctgctaaaatcactgagatcacagaagatcgtctatatctgttgtggagaggaccacactgcagccctgactaaggaaggtggggtgttcacattcggtgcaggagggtacggacagttgggccacaactcaacgagtcacgagataaatccaaggaaggtcttcgagctgatgggctccatagtgaccgagatcgcctgtgggagacagcacacttccgctttcgtcccaagtagcgggaggatatactccttcggactcggaggaaatggtcagctcggcaccggctccacttccaatcgaaaaagtccatttactgtaaaggggaactggtatccatacaacgggcagtgtcttcccgacatcgactccgaggagtatttttgtgtgaagcggatcttcagtggtggggatcaaagtttttcccactacagttcaccacagaactgtggaccacctgacgattttcgctgtcccaatccaaccaaacagatttggacagtcaatgaagccctgatccagaaatggctgtcttacccaagtggtaggttccccgtcgagatcgccaacgagattgatggcactttttcctcttcggggtgcctgaatgggagcttcctggccgtttcgaatgacgaccattaccggacaggcacaagattctcaggtgtggatatgaatgcggctaggctcctgtttcacaaactgatccagcccgatcatccccagattagccagcaagtcgccgcatccctggagaagaacttaattcccaaactgacctccagtctaccggatgtagaggctctccggttctacttaacgctgcctgagtgcccgttaatgtccgatagcaacaacttcactaccatcgccatcccatttggcacagctctggtaaatctggagaaggctccgctcaaggtgctggaaaattggtggtctgtgctggagccacctctctttctgaagatcgtggaactgtttaaggaggtggtcgtgcatctgctcaagctttataaaattgggattcctccctccgaacgccgaatttttaacagcttccttcacaccgcgctaaaggttctggagattctgcatagagtcaacgagaaaatgggacagatcatacagtacgacaagttttacatccatgaggtacaggagttgatcgacatacgcaacgattatatcaattgggtgcagcaacaagcatacggcatggatgtgaaccacggcctcaccgagctggcagatattccggtgacaatttgtacctatccatttgtgtttgatgcccaggcgaagacaacactgttgcagactgatgcagtgctgcaaatgcaaatggccattgaccaggcccaccggcaaaacgtcagttcgctgtttctacccgtaatagaatctgtcaacccttgcctgatcctggtggtccggagggaaaacatagtcggagatgcgatggaagtgcttagaaagaccaagaacatagattataagaaaccccttaaggtaatcttcgtgggagaagacgccgtggacgccggaggtgtgcgcaaagaattcttcctccttatcatgagagagctgctagaccccaagtacggcatgtttagatactatgaagactcccggttgatctggttctcagataaaaccttcgaagacagcgatttattccatttgataggcgtgatttgtggattagccatctacaattgcaccatcgtggatctgcactttccactggccctgtacaagaaactactgaagaaaaagccgagtctggacgatcttaaagaacttatgccagacgtgggcagatccatgcagcaattacttgactatcctgaggacgacatagaggaaacattttgcttaaacttcacaataactgtggagaactttggcgcaaccgaggttaaagagctggtcttaaacggagccgataccgcagtcaataagcagaaccgccaggaatttgtggacgcctacgtggactacatcttcaataagagcgtcgccagtctctttgacgcgttccatgctggcttccacaaagtctgtgggggaaaggtgcttctcctgttccaacccaacgagttgcaggctatggtcattggtaacacgaactatgactggaaggagctcgaaaaaaacacagaatataagggagagtactgggccgagcatccgaccattaagatattttgggaggtgtttcatgaacttcccctggaaaagaagaaacagttccttcttttcctgacaggtagtgatagaataccaatcctcggaatgaaatctttgaaactcgttatccagagtaccggaggtggcgaagagtacctgcctgtgagtcacacgtgctttaatttactggatctgcctaagtataccgaaaaagagactctcagatcaaaactgattcaggctatcgatcataacgaaggatttagtctgatctag

SEQ ID NO: 27630 - DNA, 2541 bp, synthetic construct
  source 1..2541: mol_type = other DNA; note = Synthetic coding sequence
atgccagctttcttgggacttaagtgcctgggaaagctttgtagctcggagaagtcaaaggtgacgtctagcgagaggactagcgcccgaggctcaaaccggaagaggctgatagtggaggacaggagagtctccggcacctcattcacagctcatcggcgtgctacaataactcacttgctctatctgtgccccaaagattattgtccccgagggagagtttgcaactccgtcgatccatttgtcgcgcacccccaagaccctcaccacccatctgaaaaacctgtgatccattgccacaaatgtggcgaaccttgcaaaggagaagtcctgcgggtgcaaacgaagcacttccatatcaagtgcttcacttgcaaagtgtgcggctgcgaccttgctcagggtgggttttttatcaagaatggggagtacctttgtacattggactaccaacgaatgtatgggactcgttgccacggatgcggggagttcgtggaaggagaagttgttaccgcactgggaaaaacataccatcctaattgctttgcctgcaccatttgtaaaaggcctttccctcctggagaccgagtgacctttaatggtcgggactgtctgtgtcagctgtgcgcacagcccatgagcagctccccaaaagaaaccaccttctcttctaactgtgcaggatgcggccgagacataaagaacggtcaggccctgctcgcgctagataagcagtggcatttgggatgctttaaatgcaaaagctgcggcaaagtgcttaccggtgagtatatctcaaaagacggagcgccttattgtgagaaggattaccagggcctctttggtgtgaagtgtgaggcgtgtcaccaattcatcactgggaaggttctcgaagccggtgacaaacattaccaccccagttgtgccagatgctctagatgcaaccagatgttcaccgaaggggaggaaatgtatctgcaaggctcaacagtgtggcatcccgattgcaagcagtctacaaagacagaagagaagctgcgtctcccaaacatcaggcgcagctcatcagactttttctactctaagagtttaattagaagaaccgggaggtctccatcccttcagcctactagaacatcctctgagtcaatttattcaagaccagggtctagcataccgggttctccaggccatacaatatacgccaaggttgataatgagatccttgattacaaggacctggccgctatacctaaggttaaagcaatctatgacattgagcggccagaccttattacttacgagcctttctacacctcgggctatgatgataaacaagaaaggcaatccttaggcgagagccctcgcaccctgtctccgaccccttctgccgagggataccaggacgtgcgggatcgcatgatccacaggtccacaagtcagggatcaattaactccccagtgtattcccggcacagctatactcccaccaccagcaggagtccacagcatttccatcgtcccgagttactgtctcccggagttcaacgccttagctacctacgcacctccagccttagccccactcactcagatagcagacccaacccgccttttcgccatcatttcatcccccacatcaaagggaacgaaccaagctccgggcgtaattctccattaccatatagacctgactctaggccactgacaccgacttatgcacaggcacccaagcacttccacgtacctgatcagggtattaatatctatagaaagccccctatatacaagcaacacgcagctctcgccgctcaatccaagagttctgaagacatcataaaattcagtaagtttcctgctgcgcaagcccctgacccaagtgaaacccctaaaatcgaaacggaccattggcctgggccaccctcctttgctgtagtgggcccagacatgaagagacgcagcagtgggcgagaagaggatgatgaagaactgctgagacgcaggcagttacaggaggaacagcttatgaaattgaattcaggtctgggccagctgatactgaaagaagagatggagaaggagagtagagaaaggtcaagcctcctcgccagccgatatgacagtcctataaacagtgcttcccacatcccaagtagcaagaccgcatccctccccggatacggaaggaacgggttgcacaggcctgtatcaacagatttcgctcagtacaattcttacggggacgtgtcaggtggagtccgggactaccaaaccctccccgatgggcacatgccggctatgcgcatggacagaggggttagcatgccaaatatgctggaacccaaaattttcccttatgaaatgctgatggtgaccaatcgtggcagaaacaagattctacgcgaggtagaccgaacccggctggaaaggcacttggcacccgaggtttttagggaaatcttcgggatgagtattcaggaatttgatcgcttgccactctggcgtcggaatgatatgaaaaaaaaagctaagctcttttag

SEQ ID NO: 27631 - DNA, 594 bp, synthetic construct
  source 1..594: mol_type = other DNA; note = Synthetic coding sequence
atgtttggctgcctagtagccggacgcctagtgcagacagctgcccagcaggtggcagaggacaagtttgtgtttgacctgcctgactatgagagcattaatcacgtggtggtcttcatgctcggcactatcccttttcctgaggggatggggggatccgtgtattttagctaccctgactctaacggaatgccagtctggcagctgctcgggttcgtgacaaatggcaaaccctccgctatcttcaagattagcggactgaagagtggagaagggtcccagcatcccttcggggctatgaatattgttagaactccatccgtagcccaaataggaatctctgtagaactcttggactcgatggctcagcagacccctgtgggcaatgcagctgttagcagcgtagactcatttacgcaattcacccagaagatgctcgataatttttacaacttcgcgagcagctttgccgtctcccaagcccagatgacaccaagcccatctgagatgtttattcctgcaaacgtggtgctgaaatggtatgagaatttccaacgtagactcgctcagaacccacttttctggaagacgtag

SEQ ID NO: 27632 - DNA, 930 bp, synthetic construct
  source 1..930: mol_type = other DNA; note = Synthetic coding sequence
atggttttccccgcaaaacgcttttgcctcgtgccaagcatggagggcgtgaggtgggcgttctcatgcggaacatggctgccctcccgcgctgagtggctgctggctgtgaggtcgatccagcccgaagaaaaagaacggatagggcaattcgtgttcgctcgagatgccaaggcagctatggccggaagactgatgatccgtaagctggtggctgagaaacttaacatcccctggaaccacatccgactccagaggaccgccaaaggtaaacctgtcttagccaaagattcatccaatccgtatccgaatttcaacttcaacattagtcatcagggcgactatgccgtgctagcagctgaacctgaattgcaggtgggcattgacattatgaaaacaagcttcccaggtcgcggaagtatccctgagttctttcatattatgaagcgaaaattcacgaacaaggaatgggaaaccattcggtcattcaaggatgaatggacacagctagatatgttttaccggaattgggcacttaaggaatcttttattaaggcaatcggcgtcggcctcggatttgagttacagcgcctggaatttgacctaagccctctgaacttggatattggacaggtgtacaaagaaacccgccttttcttagacggcgaagaagagaaagaatgggcatttgaggagtccaaaatcgacgagcaccattttgtggcagtggcgctgagaaaaccagacggaagccgtcatcaggacgtccccagccaggatgattcaaagccaactcaacgacaattcaccattctgaactttaacgacttgatgagcagtgccgtccccatgacccccgaggacccctccttctgggactgtttttgcttcactgaggagattccgatcagaaacggtaccaaaagttag

SEQ ID NO: 27633 - DNA, 1599 bp, synthetic construct
  source 1..1599: mol_type = other DNA; note = Synthetic coding sequence
atgcagagttgtgagagtagtggcgattccgcagatgaccccctgagtcgcggactccggagaaggggtcagccaagagtcgtggtgatcggggctggtttagccggactggctgcagctaaggcgctcctcgaacagggattcacggatgtaaccgtgcttgaggccagctcccatattgggggacgggtgcagtctgtgaaactcgggcatgctacattcgaactgggagcaacatggatccacggaagtcacggcaaccccatatatcacttggctgaggccaacggcctgctcgaggagacgaccgatggcgagcgctcagtgggcagaatctccctgtacagcaaaaatggagtagcatgctatcttaccaatcatggcagacgcattcccaaggatgtcgtggaggaattctctgacctgtacaacgaggtgtataatctgacgcaggaatttttccgtcacgacaaaccagtcaacgccgagagtcagaactctgtcggtgtcttcacccgcgaagaagtcaggaatcgcatccgaaacgaccccgatgaccctgaggctaccaaacgcctgaagctggccatgatacagcagtacttaaaagttgagtcatgcgagtcctccagtcattctatggacgaggttagtctgtccgcgtttggagagtggacggagatacctggagctcaccacattattccgagcgggttcatgagagtggtggaattgctggcggagggcatcccagcacacgtgatacagttaggaaaaccggtacgatgcatccattgggatcaagcctccgcacgtccgagaggacccgagattgagcctaggggcgtccttaagcgtcaatacaccagcttttttcgccctgggctgccaaccgagaaagtcgctgccatccatagactaggtattggcactacagacaagattttcctggaattcgaagagcccttctggggccctgagtgtaactcgctgcagttcgtttgggaagacgaagccgaatcccacactcttacttacccaccggaactgtggtatcggaaaatctgcggttttgacgtgctgtaccctcctgagcgctacggccacgtcctgtccgggtggatatgcggcgaggaggcgcttgtcatggaaaaatgtgatgatgaggctgtggccgaaatttgtacagagatgctgcgtcagtttacgggcaatcccaacatccctaaaccgcgtagaattttgagatctgcatggggctctaacccttactttagaggctcctacagttacacccaggtgggctcttccggagcagacgttgagaagctcgccaagccattgccttacactgagtccagcaagacagcccatggatcgtctactaaacagcaaccaggccacctgttttcaagtaaatgtccagagcagcccctggatgccaatcggggagctgtgaagcctatgcaagtgttgttcagtggcgaggccactcaccggaaatattactcaacgacgcatggcgcactcttaagcggtcagcgagaagccgctcggcttatcgaaatgtatcgcgacctctttcagcagggaacctag

SEQ ID NO: 27634 - DNA, 2349 bp, synthetic construct
  source 1..2349: mol_type = other DNA; note = Synthetic coding sequence
atggactcttccatccatctgagttccctgatatcccggcatgacgacgaggccacaagaacctcgacttccgaaggattggaggagggcgaagtggagggggagacactgctcatcgtcgaatccgaagatcaggcttctgtggacctcagccacgatcagagcggtgacagcctgaactcggatgagggagatgtgagttggatggaggagcaactgtcttacttttgcgacaaatgccagaagtggatccctgcctcccagctgcgcgagcaactgagctacctgaagggagataatttttttaggttcacgtgctccgactgttctgccgatggcaaggagcagtacgagcgactaaaactgacctggcagcaggtggtgatgctggctatgtataacctgagtttggagggaagtgggagacaggggtattttagatggaaggaagatatttgcgccttcattgaaaaacactggacttttttgctcgggaaccggaaaaagacatccacttggtggtccacagtggcgggttgccttagcgtggggtctcccatgtacttcagaagtggcgcacaggagtttggggagccaggctggtggaagctggtgcacaacaagccacctacaatgaagccagagggagagaagctgtccgccagcactctgaaaatcaaggcagcctccaaacctacattggatccgataattactgttgaaggcttgcgcaagagagcttcaagaaaccctgttgagagcgcaatggagttgaaagagaagagatcaaggacccaggaggccaaagacatcagacgggctcagaaagaggccgctggttttctcgacagaagtacatcatctacaccagtgaagtttatttccaggggaagacgccctgatgtgatcctggagaagggcgaggttattgacttcagttccctgtcaagcagcgacaggacccctcttaccagtccgtctccttcccccagtctcgacttttcagccccaggcacacccgctagccatagtgctacgcctagtttgctgtctgaggctgacttgatcccggatgtgatgcctcctcaggcgctgtttcacgatgacgacgaaatggagggggatggcgtaatcgaccccggaatggagtatgttccccctcctgcaggatctgtggcctctgggccagtggtgggagtccggaaaaaagtgaggggccctgaacagattaaacaagaagtggagtctgaggaagagaagccagacaggatggatatcgattctgaggacacagatagcaatacttcgctccagacacgcgctcgtgagaagcggaagcctcaactcgaaaaagacactaaaccaaaagaacctcggtacactcccgtgtccatttacgaagagaagcttcttttgaagagactcgaagcttgtcccggtgctgtggccatgacaccagaggcccgacgactaaaacggaagctgattgtacgtcaggccaagcgtgatagagggttacccctgtttgaccttgaccaggttgttaacgccgctctgctgctagtcgatggcatttatggagccaaagaaggcggtatctctcggctgcccgcagggcaagctacgtaccggaccacctgtcaggactttaggatccttgatcgctaccaaacttcccttccatcccgaaagggctttcgacatcagaccacgaaatttctgtatcgcctcgtgggaagtgaggatatggcagtggatcagtctatagtgtccccctatacttctcgcatcctgaaaccctatatcagacgggattatgagacaaagccccctaagctgcagttgctgagccagattagaagccatttgcataggtctgaccctcattggacccccgaacccgacgcccctttagactattgctatgtcagacctaatcatattcctacgataaatagcatgtgtcaggagttcttctggccagggatagacttaagcgaatgcctgcagtatcctgatttctcagtcgtggttctttacaagaaagtcataatcgcgttcggctttatggtccccgatgtgaagtacaatgaggcatacataagctttctgtttgtgcaccccgagtggagaagggccggtatcgccacctttatgatttaccacctgattcaaacttgcatggggaaggacgtgaccctgcatgtctctgcgtctaaccccgctatgttattatatcagaagtttggattcaagacggaggaatatgtgttggatttctacgataagtactacccattggagtccactgagtgtaagcatgcattcttcctccgcttacgcaggtag

SEQ ID NO: 27635 - DNA, 2745 bp, synthetic construct
  source 1..2745: mol_type = other DNA; note = Synthetic coding sequence
atgggaacgacggcccctgggccaattcatctgctggagctctgcgaccaaaaacttatggagttcctgtgcaatatggacaacaaggaccttgtgtggcttgaggagatccaggaagaggctgagcggatgtttactcgggagttctccaaggagcccgaactgatgcctaaaacaccttctcagaaaaacaggcggaagaaaaggcgcatcagctacgtacaggatgagaaccgggatccgattagacgtagactgtcaaggcgcaagagccgctcatcccagctgtcatcccgacggttacgctctaaagatagcgtggagaagcttgctaccgttgtcggggagaacggctctgtactgcggcgagtaacacgggctgcagccgctgctgccgctgccacaatggccctggctgcgccttctagtcctaccccagagtctcccaccatgttgactaaaaagcctgaagataaccatactcagtgccagctcgtaccagtggtggagatcggcatctcggagcgccaaaacgctgagcagcacgttacccagttgatgtctacagaacctcttccaaggaccctctctcctacaccagcttccgccaccgcaccaacatcacagggtatcccgaccagcgacgaggagagtacaccaaagaagagtaaagcgaggattctcgagtcaattaccgtgagttccctgatggccacgccgcaagatcccaagggacagggggtcggaactggacggtcagcatcaaagctgcgcatcgcacaggtgtcccctgggcctcgcgactctcctgccttcccagactctccatggagggaacgggtccttgctcctatcctgcccgataatttctcaacaccaacaggctcaagaaccgactctcagagcgtcaggcactctcccatcgccccatcttctcctagcccccaggtactggcgcagaaatactctctggtggcaaagcaagagagtgtcgtgcgacgggcatctcgcaggctcgccaagaagacagcagaggagcctgccgctagcggaagaatcatttgccactcctacttggaaagattgcttaacgtggaagtgccccagaaggtggggtcagagcagaaagagcccccagaagaggccgaacctgtggccgcagcagagcccgaagtcccggagaataatggcaataactcttggcctcataatgacaccgagatcgcgaacagcacacctaacccaaagccggctgcctcaagccctgagacccccagcgcaggccaacaggaggcgaagactgatcaggctgacgggcctagggaacccccacagagcgccagacgtaagcggagctataaacaggcagtaagtgagctggacgaggagcagcacttggaagatgaagagttgcaacctcctcgtagcaagactccctcttcaccctgtccggcaagtaaggtggtgaggccactgaggacattccttcacacagtgcagagaaaccagatgttaatgacacctacctctgcacccagatccgtgatgaaatccttcataaagcggaacactcctctcaggatggatccgaaggagaaagagcggcaacgcctcgagaacctgaggcggaaggaagaggctgaacagttgcgtaggcagaaagtggaggaagataaacggagacggctcgaagaagtgaagctcaagcgcgaggagcggctcagaaaagtgcttcaggctagagaaagagtcgagcagatgaaggaggagaaaaaaaagcaaatcgagcagaagtttgcccagattgatgagaaaacagagaaagccaaggaggagagactcgctgaagaaaaggccaagaagaaggccgctgcaaagaagatggaagaggtcgaggccagaaggaagcaggaggaggaggcccgacggttgcggtggttgcagcaggaggaagaggagagaaggcaccaagaattgcttcagaagaagaaagaggaggagcaagagcggttgagaaaagccgcagaggccaaacggctggccgaacagagagagcaggagaggagagagcaagagagaagagaacaggagaggagagaacaggaacgaagagagcaggagaggcgtgaacaagaacgccagcttgcggagcaagaacgcaggagggagcaagaacggctgcaggccgagagggagctgcaagagcgcgaaaaagccctgcgcctgcagaaggagcagctgcaaagagagttagaggagaaaaagaagaaagaagagcagcagaggctagccgagcggcaattgcaggaagagcaggagaagaaggcaaaggaggccgctggagcgtccaaagcgctgaatgttaccgtcgatgtgcaaagtcctgcctgcacctcataccaaatgaccccccagggccatcgcgctcctcctaagatcaaccctgacaattacgggatggatttaaattctgatgattcgacagatgacgaagcacacccgagaaagccgataccaacatgggcccgtgggacacctttgagtcaagctattatccatcagtattaccacccacccaatttactggagctctttgggactattctgcctctggacctggaagatatcttcaagaaatcaaaacccagatatcataaaaggactagttccgctgtttggaactctccgccattgcaaggggcacgcgtgccatcctccctcgcatacagcctaaagaagcactag

SEQ ID NO: 27636 - DNA, 4149 bp, synthetic construct
  source 1..4149: mol_type = other DNA; note = Synthetic coding sequence
atggacgaagaagagaatcactatgtttctcagctgcgagaggtttattcaagctgcgataccacggggactggtttcctcgatcgccaagagctgactcagctatgcctcaagcttcacctcgagcagcagctgccagtgctccttcaaacgcttctcggcaacgaccacttcgcaagagtgaattttgaagagtttaaggagggcttcgtggcagtcctatctagcaatgccggagtgcgcccaagcgacgaagacagctcttcacttgaatcagctgcctcctcggcgattcctcccaagtatgtcaatggatctaaatggtatggacggagaagcaggcccgagctctgtgatgccgcaacagaggccaggcgggtccccgaacaacaaacccaggcatctcttaaatcgcatctctggcgatccgccagtctggagagtgtcgagtcaccgaagagcgacgaagaagctgagtcaaccaaggaggcccaaaatgagcttttcgaggcgcagggccagctgcagacttgggacagcgaggactttggctcacctcagaagtcttgttccccctcttttgatactcccgaatctcagattcgcggagtctgggaggagcttggtgttgggtccagcggacacttatccgagcaggagctggcagtggtatgtcagagtgttggcctgcagggactcgagaaagaggagctcgaagatctatttaacaaacttgatcaggatggggatggaaaagtgagtctggaagagtttcaactagggctcttctcacacgaaccagctcttctgttagaaagctctaccagggttaagccctccaaggcttggtctcattaccaggtgcctgaggagtccggatgtcacacaacgaccacctccagcctcgtgagcctgtgcagttcattgagactcttttcatcaatagacgatggaagcggattcgctttccctgatcaggtgcttgctatgtggacacaggaggggattcagaacggtagggagatcctgcagagccttgatttcagtgtggatgaaaaggtcaacctgctggagctgacctgggccctcgataatgagctgatgactgtggacagtgcggtgcagcaagctgcgcttgcctgttaccaccaagaactttcatatcagcagggccaagttgagcaactcgccagggaaagagataaggccagacaggatctggagagagcagaaaaaaggaacctggagttcgtgaaggagatggacgactgccactcaactcttgaacaactcactgaaaagaaaatcaaacatctcgaacaaggatacagggaaaggctgtccttgctccgcagcgaagtagaggctgagcgcgaactcttctgggagcaggctcacaggcaaagagctgccctagaatgggacgtgggcagactgcaggctgaggaggcgggactgagagaaaaacttacactcgctctgaaggagaacagtcgcctgcaaaaagaaatcgtggaggtggtagagaagctctcagactcagagcgtctcgctctgaagctgcaaaaggacctggagttcgttctcaaggacaagcttgaacctcaatccgcagagctactagcacaggaagaacggtttgctgcggttctgaaagagtacgaactgaagtgtagggacctccaagatcgcaatgatgagctccaagcagagctcgagggtctgtgggcaaggcttccaaagaaccgacacagcccttcttggtctcctgacggacgccgacgccaactccccggattgggtcctgctggaatttcttttctaggaaactcagccccagtttcaatcgaaacagaactcatgatggagcaagtgaaagaacactaccaggatctgcgtactcagttggagactaaggtgaactattatgagcgcgaaattgctgcactgaagagaaattttgaaaaagagcgcaaagatatggagcaggccaggaggcgagaagtttccgtgctggaaggacagaaagcagaccttgaggaacttcacgaaaaatctcaggaggttatatggggcctgcaggaacagttacaggacacggcacggggtcccgaacccgaacagatgggattagcaccttgttgtacccaggccctgtgcggcctcgccctcagacatcactctcatctgcagcaaatcaggagggaagctgaagccgaactgtcgggggaactctcgggactgggtgccctgcccgctagacgagacctgacgctggagttggaagaaccccctcaggggccactgcccagagggtctcaacgcagcgaacagctcgagctcgagagagcactgaagctgcagccatgcgccagcgagaaacgtgcgcagatgtgcgtgtctctcgcgctcgaagaggaggagctggagcttgcccgagggaagagagtcgatggcccatctctggaagcagagatgcaggccctgcccaaggacggccttgtggcgggatctggacaggaaggcactcgagggctgttgcctttgcggccagggtgcggggaaagacctctcgcctggttggccccaggagacggtcgggagtccgaggaagcagccggtgccggtcctcggaggagacaggctcaggacaccgaagcaacccagtcacctgccccagcccctgcacccgcttctcatgggccttcagaacgctggtcgagaatgcagccctgtggggtggacggcgatattgtgcccaaagaacccgagcccttcggagcctcagctgcaggccttgaacagcctggcgctagagaacttccactgttgggcaccgagagggacgcgtcccaaacccagccaaggatgtgggaaccgccactcaggccagccgcatcctgccgcggtcaggctgagagactgcaggccatccaggaggagcgggcacgatcatggagcagaggaactcaagagcaggcaagcgagcagcaagctcgtgctgaaggcgcactggaacctggctgccataagcattccgtggaggtggctcggaggggcagcctcccttcccacctgcagttagccgacccccagggtagctggcaagaacagctcgctgcgccagaggagggcgaaacaaagatagccttagagagggagaaagatgacatggaaacaaaactgctacaccttgaggatgtcgtcagggcactcgagaaacacgtcgacctgagagagaacgaccgactcgagtttcatcggctgtcggaagagaataccctccttaagaatgatctgggacgcgttaggcaggaattggaggctgcggaatcaacccatgatgcccagcggaaggaaatcgaggttctaaagaaggacaaagagaaggcatgttctgaaatggaagtgctcaatcgccagaaccaaaactataaggatcagctttcccaactaaacgtacgggtgctccagcttggacaggaagcatcaacccaccaggctcagaatgaggagcaccgtgtcactatccagatgctgacccagtccctggaggaggtcgtccggtctggacaacagcaatcagaccagatacaaaagcttcgtgtcgagttggaatgcctgaaccaggaacaccagtccctccagctgccatggtccgagcttactcagacactggaagagagccaggatcaagttcagggcgcacatctaaggctccgccaagctcaagcccagcacctgcaggaagtacgactcgtgccacaggaccgagtggccgagctccatcgcctgctgtcgctgcagggcgaacaagccaggcgacgcctggacgctcagagggaagaacacgaaaaacaactgaaggcgaccgaagaaagagtcgaagaggccgagatgatcctgaagaacatggagatgctgttacaggagaaagtggataagctcaaggagcagtttgagaaaaatactaagagtgatctcctgctgaaggaactctatgtggagaatgcccacctcgtgcgcgcactccaggccactgaggaaaagcagcgaggtgcagagaagcagagccggctcttggaagaaaaggtcagggcacttaacaagctggtgtccagaattgcacctgccgctttgtccgtgtag

SEQ ID NO: 27637 - DNA, 4383 bp, synthetic construct
  source 1..4383: mol_type = other DNA; note = Synthetic coding sequence
atggctgggagacctctcagaattggagaccagttggtcctcgaggaggactacgatgagacctatattccatccgagcaggaaatcctcgagtttgcgcgagagattggtatcgaccctattaaggagcctgagcttatgtggctggctagagagggaatcgtggcaccgctgcccggagaatggaagccttgccaggacattactggcgatatttactactttaatttcgccaacggtcagtctatgtgggatcacccctgtgacgaacattataggtccctcgtgatccaagagcgcgctaagctctccacctctggcgcaatcaagaaaaagaagaagaagaaagagaagaaggacaaaaaagatcgagacccgccaaagtcttcccttgcccttggctcatcccttgccccagtccatgtgcctctggggggactagccccactccggggattggtggacaccccaccttcagcactcaggggtagtcaatctgtctctctcggttcgtcggtcgaatctgggcgacaattgggtgaactgatgcttcctagtcagggattgaagaccagcgcctacacaaaaggtctactgggttccatatacgaagataagaccgcgttatcattgctaggcctgggtgaagagacaaacgaagaagatgaggaagagtctgacaaccagtccgtgcacagctcttctgagccgttacgcaatctccacctggatattggcgcacttggaggagactttgaatacgaggaaagtctacgcaccagccagcctgaggaaaagaaggatgtctcccttgattccgatgcagccggaccaccgaccccctgtaagccgtctagtcctggtgcggacagttctctttctagcgctgtaggcaagggacggcaggggtcaggtgccagacccggactaccggaaaaggaagaaaatgagaagagtgagccaaagatctgccgaaacctcgtgactcctaaggccgaccctactggatcagaaccagccaaggcctctgagaaagaggcgcctgaggacaccgtagatgcaggcgaagaggggtccagacgggaagaggccgcaaaggagccaaaaaaaaaggcatcagcccttgaggaaggctcatctgatgcatctcaggaactcgagatctcagaacacatgaaagaaccccagctgtctgattccatcgcctccgatccaaaatctttccatgggctggacttcggcttccggagccgaatctctgagcacctgctcgacgtagacgtgttgtcccctgttctgggcggtgcctgccggcaggctcaacaacccctaggtatcgaggacaaggacgactcacaatcctctcaggatgaactccagtcaaaacaatcaaaggggttagaagagcgcttatcccccccattgcctcacgaagagcgggcacagagtccccctcggtcactcgccaccgaagaggaacctccacaaggccctgagggccagccagagtggaaggaagcagaggagctcggggaggactccgctgccagtcttagtttgcagctgagcctgcagagagaacaggcccctagccccccagccgcatgtgagaaaggcaaggagcaacactctcaggccgaagagttaggccctggccaggaggaagcagaagacccagaggagaaggtggccgtctcccctacaccgcctgtctctccggaagtgcggagcacagaacccgttgcaccacccgagcaactgtcggaagccgcactcaaagcgatggaggaagcagtagcccaggtcctagaacaggatcagagacacctcctcgaaagcaaacaagaaaaaatgcagcagctcagagagaagctgtgccaggaggaggaagaggagattctccgtctacaccaacagaaggagcagtcactctcttctctgagggagcgcctccagaaggctatagaagaagaggaggcgcgtatgcgcgaggaggaatcccagcgtctgagttggctcagggcccaggtacagagctccacccaggctgatgaagaccaaatacgtgccgagcaggaggcttctttgcagaaactgagggaggaactggaatcccagcagaaagccgaacgggctagcctcgaacagaagaataggcagatgctcgaacaattgaaggaagagatcgaggcctccgagaagagcgagcaagccgcactaaacgccgcaaaagagaaagcactgcaacaattaagagaacaattggaaggcgaaaggaaggaagctgttgctaccttagaaaaggaacactctgcggagctggagagactctgttcgagtcttgaggccaagcatagagaggtggtcagttctcttcagaaaaagattcaggaggcgcagcagaaggaagaggctcaattgcaaaagtgcctgggacaggtcgaacatagagtccatcaaaagtcttaccacgtggctggctacgagcacgagctctcaagtctgctgagggagaagcgccaagaagtggaaggggaacatgagagacgcttagataagatgaaggaagagcaccaacaggtcatggcgaaggccagagagcagtatgaggctgaagagcgcaaacagagggctgagctgctcggtcacctaactggcgaactggagcgccttcagagagctcatgagcgggagctggagaccgtaagacaggagcagcataagcgcttggaggacctgcgcaggagacatcgagagcaggaacggaaattgcaggacctcgaactggatttggagaccagggccaaagacgttaaagctcgccttgccttattagaagtccaggaagagactgccagacgagaaaagcagcagctgctggatgttcaacgacaggtagctctgaagtccgaagaggctacagctacccatcagcagctagaggaggcacaaaaggagcacacccatctgttgcagtccaaccagcagctacgagagatactggacgagcttcaagcacggaagttgaagttagagagtcaagtggatctgctacaagcacagtcacagcagctccaaaagcatttcagtagccttgaggccgaggcccagaaaaaacagcaccttttaagggaggtgacagtagaagaaaacaacgcatcacctcatttcgagccagacctccacattgaggacctgcgcaagagtctcgggacaaatcaaactaaagaagtttcctcatcgctgtcccagtcaaaagaggacctgtacctggacagtctgtctagccataacgtatggcacctcctttctgccgagggggtcgccttgcgttccgccaaggagttcctggtccagcagacacgctctatgcgccgaagacagactgctttgaaggccgcacagcaacattggcggcacgagctggcgtccgcccaggaggtggccaaagatcctccagggatcaaggcactggaggatatgagaaaaaacttggagaaggagaccaggcacctcgacgaaatgaagagtgcaatgcgaaaaggccacaacctcctaaagaaaaaagaagagaagctcaaccagcttgaaagttccctgtgggaagaggcaagtgatgagggtacactgggaggctcccctacaaaaaaggccgtgacatttgacctgagtgatatggattccctctcatccgagtcctcagaatcctttagtccccctcaccgagagtggtggcgccaacagagaatagatagtaccccatccctgacaagtaggaaaattcatggccttagccactcattgagacaaattagctcccaactgtcctctgtgttgagtatccttgactcactgaatccgcagagtccccctccactgttggcatccatgcccgctcaattacctccccgagatcccaaaagcacgcctaccccaacgtactacggatctctggctcggttcagcgctctatcctcggctacacccacctcaacgcagtgggcatgggactcaggccaaggcccacggctcccttcaagcgttgcccagactgtcgatgatttcttactggagaagtggcgcaaatattttccaagcggcattcctctgttgagtaactcaccaacccctctcgagtcaagacttggctacatgagcgcctcagaacagctccggctgctacagcatagccactctcaggtcccagaggccggttcgaccacattccagggtatcattgaggctaatcgacgatggttggaaagagtgaaaaatgatccaaggcttcccctgttctcctcgacccccaagcccaaagccacattaagcctgctgcagctggggctcgatgagcacaatagggttaaagtctatcgattctag

SEQ ID NO: 27638 - DNA, 1881 bp, synthetic construct
  source 1..1881: mol_type = other DNA; note = Synthetic coding sequence
atgatggccaatgacgccaaaccggacgtgaagactgtacaggttctgagggacacggcaaatagactgagaatccattccatcagggcaacctgcgcgagcgggagcggccagctgacttcttgttgtagcgctgccgaagtggtcagtgtgctgttttttcacactatgaagtataaacagaccgatccggaacaccccgacaacgaccggttcatcctgagccgcggacacgcagcccctattctgtatgcggcatgggtcgaggtaggggacatctctgagagcgatctcctcaatctgaggaagctccattctgatctcgagaggcaccctacacccagacttccattcgtggacgtggctaccggcagccttgggcaaggtttaggcactgcttgcggtatggcctacacaggtaagtatttagacaaggcgagttatcgcgtcttctgcctcatgggagatggcgaatcctcggaggggtccgtctgggaagcattcgctttcgctagccactacaacctggacaatctcgtggctgtgtttgacgttaatcgcttagggcagagtggtcccgcacccctggaacatggtgccgacatttatcagaattgctgcgaggcatttggctggaatacatatcttgtggatggtcatgatgtcgaggccttgtgccaagctttctggcaagcctcacaggtgaaaaacaaacccacagcaatagtagcaaaaactttcaaaggtcgcggaatccctaacatagaggacgcggagaactggcatgggaaacctgtgcctaaggaacgcgcagacgccattgtcaaactcatcgagtctcagatccagactaacgaaaacctgattcccaaaagtcccgtggaagatagcccccaaatatcaatcacggatatcaaaatgaccagtcccccagcctacaaggtgggtgataagattgctacccagaagacatacggccttgctcttgcaaaactggggcgtgctaacgagagggtgatcgtgcttagcggagacaccatgaacagtacgttctctgagattttcaggaaggagcatcctgagaggttcatcgagtgtatcatagcggaacagaatatggtctccgtcgccctcgggtgtgccaccagaggccgtacaattgccttcgccggagcctttgccgctttctttaccagggcctttgatcaactgcgtatgggagcgatcagccaggctaacatcaatctcataggatcacactgtggtgtgtcgactggagaagacggagtatcacaaatggctctggaggacctcgccatgtttaggtccatccccaactgcacggtgttctacccttccgatgccatttccaccgagcacgccatttacctcgccgctaataccaagggcatgtgtttcatccgcacctctcaaccggagacggccgtaatttatactccccaggagaattttgaaataggacaggcaaaagtcgtccgtcacggagtaaatgacaaagttaccgtcataggggcaggcgttaccctgcacgaggccttggaggcagcggatcacctctcacagcaaggcatcagtgtccgagttatcgatcccttcaccatcaaacccctggatgccgcaaccattatatcctccgctaaggccacagggggacgagtaattacggtagaggaccactatagagaaggtggaattggagaggccgtctgcgctgcagtgtcccgtgagcctgatatcttggtccaccaacttgcagtgagtggagtaccccagaggggcaaaacctcagaacttttggatatgttcggtatttcgactagacacattatcgccgctgtgacgctgacgttaatgaaatag

SEQ ID NO: 27639 - DNA, 999 bp, synthetic construct
  source 1..999: mol_type = other DNA; note = Synthetic coding sequence
atggctactatcaaaagcgaactcatcaaaaactttgccgaagaggaagctatccatcataataagatcagcatcgtcggaaccggctccgtcggagttgcctgcgctattagtattctcctgaagggactgtccgacgaactggtgttggtggatgttgacgagggtaagttgaaaggtgagacaatggaccttcagcacggctctcctttcatgaagatgcctaatatagtatctagcaaggattacctagttacggctaattcgaatctggtcattattaccgccggtgcccgtcaaaagaaaggggaaacacggttagatctcgtacagcgaaatgtcagtattttcaaactaatgatcccaaatatcactcagtattcacctcactgcaagctgttaattgttactaatccagtggacattctgacgtacgtggcatggaagctcagtggcttccctaaaaacagggtgatcggttctggttgcaatttggatagtgctcgtttccggtactttattggccagagactcggaatccattctgaatcctgtcacggcctcatactcggtgaacacggtgatagttcggtgccagtgtggtcaggcgtgaacatcgccggagtgccattaaaggacctcaacccagacattggaacagataaggaccccgagcagtgggagaatgtacataagaaggtcatctcatccggatacgagatggtgaaaatgaaaggttacacttcctggggcatcagtttgagtgttgctgatctgaccgaatctatcctgaaaaacttgagacgcgtgcatcctgtttctacactcagcaagggcctttacggtataaacgaggatatttttctgtccgtcccatgtattctcggggagaacggcattacggatctcataaaagtgaaactgaccctggaggaggaagcttgcttacagaagagtgctgaaaccctatgggagatccaaaaggaactaaaactgtag

SEQ ID NO: 27640 - DNA, 972 bp, synthetic construct
  source 1..972: mol_type = other DNA; note = Synthetic coding sequence
atgcctgaaatgccggaagacatggaacaggaggaggtgaatatcccaaacaggagggtgctcgtgacaggcgcaaccggattgctgggtcgggcagtgcacaaggagttccagcagaacaactggcacgccgtcgggtgcggcttccgcagagccaggccaaagttcgagcaagtcaaccttctagatagcaatgcagttcatcatataattcacgattttcagccacacgttattgtccattgtgctgctgagaggcggcctgatgtcgtcgaaaaccagccagacgccgctagccagctgaatgtggacgcttccggcaacctcgccaaggaggcagccgctgtgggggcttttctcatttatatctccagcgactacgtcttcgacgggactaacccgccttaccgggaagaggatatcccagccccacttaacttgtacggcaaaacgaaactggatggagagaaagccgtgctcgagaacaacttgggggcagcagtgctgcgcatacccatcctgtatggagaagtggagaaacttgaggaatcggcagtgaccgtcatgttcgataaggtgcagttttctaataagagtgcaaatatggatcactggcagcagcgattcccaacacacgtgaaggatgtcgcaaccgtctgtagacagttggctgaaaaacgcatgctggacccatcaattaagggcaccttccattggagtggcaacgagcaaatgactaagtatgagatggcctgcgccatcgctgacgcctttaatctaccaagctcccatctgcggccaataaccgatagcccagtgctgggcgcacagaggcccagaaatgcacagctggattgttcaaaattagagactctcggtatcggtcagaggacaccctttagaatcggtatcaaagagagcttatggccttttcttatcgataaacgatggaggcaaacagtgttccactag

SEQ ID NO: 27641 - DNA, 3285 bp, synthetic construct
  source 1..3285: mol_type = other DNA; note = Synthetic coding sequence
atggcagaatcctccagtgagtccgaccatttccgctgtagagataggctttccccctgggccgcacgttccactcatagaggaacccgtagtctccctacagtggaagtaaccgaaaaagtgaatacaatcacctcaacgctgcaagatacatcaaggaatctgaggcaagttgatcagatgctgggaagatatcgcgaatacagtaacggccaggcaggcgcaatcgaacacctgaaggaatcactcgagcagagcattgaccaactgcgctcccagcggctgcttaggaattctggcggtaggtcgatcagcgtgacgtccctttcggcctcagatctggatgggggtaccggaagcgaactgcaccattttccccctacaagcccactgaaggattatggcgatccgcaaggcatcaagcgcatgcggtctaggaccggggtcagattcgtgcaggagactgatgatatgactcagttgcatgggtttcaccagagcctgagagacttgtcttcagagcagatccggctgggggatgattttaaccgcgagctgtctcggcgatctaggagtgatgccgagaccaagagggccctggaagagctgacagagaagttgaacgaggctcagaagcaggaggtggtcagcgatagagtggaaagacggctgcaagagttggagcgagagatgaggaccgagcgggaactagtggagaggcggcaggaccagctgggcctcatgagtctccagctacaagaggcgctcaagaagcaggaagctaaggcggacgagcacgagggggctatcaagaacaagctaagacagaccgaaaccgaaaaaaaccagctggaacaggagctagaactttcccgcagactgctcaaccagagcgagggatcgcgggagaccctgttgcatcaagtagaggagctgcgcactcagctcaccaaagctgagggagatcgaaaagggctccagcaccaagtgtcccagattagcaagcaacagtcgaattatcaggatgagcagggggaagactggcggttccgtcggggagtcgagagagagaagcaagatctggaaaagcagatgtctgatcttcgagtccagctcaacttttccgccatggcctcagagctggaggaagtgaaacgctgtatggagcgcaaggataaagagaaagcccacctggcttcacaagtggagaacttaacgcgagagctggagaatggtgagaagcagcagttacagatgcttgatagactgaaagagattcaaaatcatttcgacacatgcgaggcagagcgtaagcatgctgacttgcaaatcagcgagttgactaggcacgcagaggacgctacaaagcaggctgaacgctatctgagtgagctacagcaaagtgaggccctgaaggaagaggctgagaaaaggagagaggacttaaaactgaaagctcaggagtcgataaggcagtggaaactcaagcataagaaactcgagcgcgcactcgagaagcaaagcgaaacagtcgacgagctcactggcaaaaacaatcagattctgaaggaaaaagacgaattaaaaacacagctttacgccgctttacagcagattgagaacctgaggaaggagcttaacgacgtactgactaaaagagccctgcaagaggaggaactccactctaaggaggaaaaattaagggacattaaatcacaccaggcagacctggaactggaagtcaaaaattctctggacacgatacatcgtctggaatccgagctgaagaaacagagcaaaatacaatcccaaatgaaagtggaaaaggcgcatctggaggaggagattgccgaactgaagaagagtcaggctcaggacaaggccaagctgctcgaaatgcaagagagcataaaagacctgagtgccatccgcgcagacctggctaacaagttggcggaagaggagcgcgctaagaaagccgtactgaaagatctgtctgacctgactgcccaggcaaaatctcgcgatgaggagacagcaactatcatcactcaattaaagctggagcgtgacgtgcaccagcgcgagttgaaggatctgacttcatcgcttcagagcgttaaaaccaagcacgagcagaacattcaagaactaatgaaacacttcaagaaggagaagtccgaggcagagaatcatataaggacactcaaagccgaaagcctggaggagaagaacatggccaaaatccatcgtggacagctcgagaaacttaaatcccagtgcgataggttgacagaggagctgacccaaaacgaaaacgagaacaagaaactcaagcttaaataccaatgcttgaaggatcagctagaggaaagggagaagcacattagcatcgaggaagaacacctgcgcagaatggaggaggctaggctacaattgaaggatcagcttctgtgccttgagaccgagcaagagagcattctgggcgtcattggaaaggaaatcgacgcggcttgcaagaccttttccaaagattccgtcgagaagctcaaggttttcagcagcggcccagatattcactacgatccacatcgctggttggccgagtcaaagactaagctgcagtggttgtgcgaagaacttaaagaacgcgagaaccgcgaaaagaatctgaggcatcagctgatgttgtgcagacagcagttacggaatctgacagagaacaaagagtccgaactccaatgtctcttccaacagatcgaaagacaggagcagctgcttgacgaaattcacagggagaaacgagacttactcgaggaaacccagcgcaaagacgaggagatgggaagtcttcaggatagagtaatcgctctcgagacatcgactcaggttgctctcgatcaccttgagtcagtaccagaaaagctatctctgctggaagattttaaggattttagagattcatgtagcagtagtgaacgaacagacggcaggtactccaagtaccgggttaggaggaatagtctgcaacaccatcaagatgacacaaagtatcggacaaaatctttcaaaggggataggacttttctggaaggatcgcatactagggggcttgatcacagtagctcatggcaggaccatagccgattcctaagtagcccacgctttagctatgttaatagctttacaaaaaggactgttgcacccgattcagcctccaataaggaggatgctactatgaacggtacctcatctcagcctaaaaaagaggaatacggcagttag

SEQ ID NO: 27642 - DNA, 1011 bp, synthetic construct
  source 1..1011: mol_type = other DNA; note = Synthetic coding sequence
atgaagaaggagcacgtactccattgccaattctcagcatggtatcccttcttccgcggtgtgactatcaagtctgtcattctcccactgccgcagaatgtgaaggattatctgctggacgacggcaccctggtggtgtccggaagggacgatccacctacccacagccaaccagattcggatgacgaggctgaggaaatccaatggtccgacgatgaaaatacagccacactcactgcccctgaattcccagagttcgcaacaaaggtgcaggaggctatcaactctctcggtggctcagtatttcctaaactgaactggtccgcccctcgtgatgcgtattggattgccatgaactccagcttaaaatgcaaaactctatccgatatcttcctcctgtttaagtcttccgattttatcacacgcgatttcacgcagccatttatccattgtactgatgattcaccagatccttgcatagagtatgagttagtgctgcgtaaatggtgcgaacttatccctggtgcggagttccggtgcttcgtgaaggagaacaagctgatcggcattagccagagggattatacccagtattatgaccatatctccaaacaaaaagaagaaattcgaaggtgcatccaagacttctttaagaaacacatccagtataaattcctggatgaggactttgtgtttgatatatacagggattctcgcggaaaggtgtggctgatcgactttaatccattcggagaagtgaccgactctttgcttttcacctgggaggaacttatttctgagaacaatctgaacggggacttctcagaggtggacgctcaagaacaggatagcccagcatttcgctgtacaaatagcgaagtcaccgttcagccttctccttacctatcctatagactaccaaaggattttgtcgacctgtcaaccggggaagacgctcacaagttgatcgattttcttaagttaaaacggaatcaacaggaagacgactag

SEQ ID NO: 27643 - DNA, 1248 bp, synthetic construct
  source 1..1248: mol_type = other DNA; note = Synthetic coding sequence
atgaaattgtcccttactaaggttgttaatggctgtaggctggggaagattaagaacctcggcaaaacaggtgatcatactatggacatccccggttgtctgctgtacacaaaaaccggcagcgcaccgcacctgactcaccacaccctccataatatccacggggtcccagccatggcccaacttacattgagctcactagccgagcatcatgaggttttgaccgagtataaggaaggagtgggaaagttcatagggatgccagaaagcctgctctactgttcactacatgaccccgtgtctccatgcccagcaggctatgtcacaaacaaatcagtctcagtgtggagcgtggctggaagagtcgagatgaccgtatcaaagtttatggcaatccaaaaggctctacagccagactggttccagtgcctgtccgatggcgaagtttcttgcaaggaggccacgtcaatcaagcgcgtgcgcaagtctgtagatagatccctgttattcctcgacaactgcctccgacttcaggaagaatctgaggtgctacagaaaagcgtaataatcggggtgatagagggaggggacgtgatggaagagcggctgaggagtgctcgcgagactgctaaaaggcccgttggcggttttctgcttgacggatttcaggggaatcctacgaccttagaggcaaggctacgactcctgtcctccgtgacggccgagctgcccgaggataagccacgattgatatccggcgtgtctcgaccagacgaggtcttagagtgcatcgagaggggcgtcgatctgtttgaatccttcttcccataccaggtgacagaacggggatgcgctctcaccttttccttcgactaccagcccaaccccgaagaaactctgctgcagcagaatggaactcaggaggagattaaatgtatggatcaaatcaaaaagattgagaccacagggtgcaatcaggagatcaccagcttcgaaataaatcttaaggaaaaaaagtaccaggaagactttaatcctctggtacggggttgttcatgctactgttgcaaaaatcacaccagagcctatatacaccatttgctcgttacaaacgagttgctggctggggttttactgatgatgcacaactttgagcactacttcggcttcttccactacatacgggaagcacttaagtctgacaagcttgctcagttgaaggagctcattcatcggcaggcgtcttag

SEQ ID NO: 27644 - DNA, 1770 bp, synthetic construct
  source 1..1770: mol_type = other DNA; note = Synthetic coding sequence
atgcccactgtatctgtcaagcgcgacttactatttcaagcattgggcagaacgtataccgacgaggaatttgacgaactgtgtttcgagttcggactggaactcgatgaaattaccagcgaaaaggagataatctcaaaagagcagggtaatgtgaaggctgcaggcgcatctgacgtggtactatacaagatcgacgttcctgcaaaccggtatgatctactgtgcctggagggcctggtaaggggtctacaagtgttcaaggaacgcataaaggcacccgtctataaacgagtaatgccagatggcaaaatacaaaagctgataatcacagaagaaactgccaagatccggccattcgcggttgctgccgtgctgagaaatatcaaatttacaaaagaccgctatgactctttcatcgagctgcaggaaaaactgcaccagaatatttgtcgcaaaagggcgctcgtcgccatagggacacacgacctggacactcttagcggacctttcacttacaccgccaagaggcctagcgatattaaatttaaaccgctcaacaaaacaaaagagtacactgcttgtgagcttatgaacatttacaagaccgataaccacctcaaacactacctgcacattatcgagaacaagcctctctaccctgtaatttacgatagcaacggcgttgtgctatccatgcccccaattattaatggggaccacagccgcatcacagtgaataccagaaatatctttatcgaatgtaccgggacggattttactaaagccaagattgttcttgacataatagttactatgttcagcgagtactgcgaaaatcagtttaccgtcgaggcagcagaggtcgtgttccctaatgggaaatcccacacgttcccagagctagcataccggaaagagatggtccgggcagacttgattaacaagaaagtgggaatcagagagaccccagaaaatcttgccaagcttctgactcggatgtacctaaaatcagaagtgatcggagatggaaatcagatagagatcgagatcccccctacaagagctgacatcattcacgcatgtgatattgtagaagacgccgcaatcgcatacggctacaataacattcaaatgactctgccaaagacatacactatagccaaccagtttcctctgaacaaactgactgaactgctaaggcatgacatggctgcggctggattcacagaggcccttacattcgccctgtgttcccaagaggacatcgcagacaaactaggtgtggacatttctgccactaaggcagttcatattagtaatcccaagaccgctgagttccaggtggctaggactaccctcctccccggtctgctcaagacaattgctgctaacaggaagatgccactacctctcaaactgtttgagatttctgacattgtcataaaggattccaacacggatgtaggtgccaagaactaccgtcacttgtgcgccgtttactacaataagaaccccggtttcgaaattattcacggactgctggaccgcattatgcagctgctggacgtgccccctggcgaagataaaggcggttacgtgataaaagccagtgaaggtccggctttcttccccggaagatgcgccgaaattttcgccagaggacaatcagttggcaagcttggggtgctgcaccctgacgtgatcacaaagtttgaattgactatgccatgctcaagcctggagatcaatgtaggaccctttctttag

SEQ ID NO: 27645 - DNA, 477 bp, synthetic construct
  source 1..477: mol_type = other DNA; note = Synthetic coding sequence
atggccgctcagggagttggacctggacctgggtccgctgccccacccggacttgaggccgcacggcaaaagctggccttgaggcgtaaaaaggtactgagcacagaagagatggagctgtatgagctcgcccaggccgcaggaggggctatagatcccgatgtctttaaaattctagtggacctcctgaaactgaacgttgcacccttagccgtgttccaaatgttaaagagtatgtgcgccggacagcggctagctagtgaacctcaggaccccgctgccgtttccctccctacttcgtctgtgccagaaactagaggtagaaataaaggcagcgctgctctgggcggagctttagctctcgcggaaaggtcatctcgagaggggtcgtcacagcgcatgccaagacaaccctcagctaccagactccccaagggaggtggccctggcaagtcacctacaaggggatcaacctag

SEQ ID NO: 27646 - DNA, 675 bp, synthetic construct
  source 1..675: mol_type = other DNA; note = Synthetic coding sequence
atggtcgaggacgaactggccctgtttgataaatctatcaatgaattctggaacaagttcaagtcgaccgatacatcttgccagatggccggactgcgggacacatacaaggatagcattaaggcttttgccgagaaactgagcgttaagcttaaggaagaagagagaatggtcgagatgtttctcgagtaccagaatcaaattagtcggcagaataagctcatccaggaaaaaaaagacaacctccttaagctgatagccgaggtcaaaggaaagaaacaagagctcgaggtgttgacggctaatatccaggacctgaaggaggaatactccagaaagaaggaaacgatatcaaccgccaataaagctaacgccgagcggctgaagcgactccagaagagcgctgacctgtacaaggacaggctgggcttggagataagaaagatttatggggagaagcttcagttcatctttaccaatattgatccaaaaaacccagagagtcccttcatgttctccctccacctgaatgaagccagggactacgaggtgtccgattctgcaccacacttagaaggcctcgcagagtttcaggagaacgtaaggaagacaaataacttctccgcatttctggctaatgtccgaaaggcattcaccgctaccgtttacaattag

SEQ ID NO: 27647 - DNA, 1728 bp, synthetic construct
  source 1..1728: mol_type = other DNA; note = Synthetic coding sequence
atgaaactcaccgattcaaccaaaggctggattgtgtgggcggcactcgactcctccatgcgcggaatgagtctcagtgcagggtcaagccctttgcacagtcctaagataacaccccacaccagcccagctcctaggagaagatcacacactcctaatccagcaagctacatggtccccagctccgccagtacctcagtgaataatcccgtatctcagaccccgagctcaggccaggttattcagaaggagacagtgggcggaactacctacttttacacagatacaactcccgcaccactgactgggatggtgtttcccaattaccacatttacccgcctacggcccctcatgtagcttatatgcagcccaaggcaaacgcaccctctttctttatggcggatgagttgagacaagaattgatcaaccggcacctgattactatggcacagatcgatcaggctgacatgccagctgtacccaccgaagtagatagctatcactccctgtttcccctagaacctctcccccctcctaaccgaattcagaagtcctctaattttggctacatcacgtcatgttacaaggctgtgaactccaaggatgatctcccgtattgcctgcgacgcattcatggattccggttggtgaatacgaaatgtatggtcctggtcgatatgtggaaaaaaattcagcattcaaacatcgtgaccctgagagaggtgttcactacaaaggcatttgccgaaccctccctggtctttgcttacgatttccacgccggaggcgagaccatgatgagccgccactttaacgaccctaacgctgatgcctatttcaccaagcgcaagtggggacagcacgaagggccattgcctcgccaacacgccggactgctgcctgagtcgcttatctgggcttatattgtgcagctgtcaagtgccttgcgcacaatccatacagcgggacttgcctgcagggtaatggaccctactaagatactaatcacagggaagaccaggctgcgtgtgaattgcgtaggagtcttcgatgtgcttacatttgataattcacagaataataatcctctcgctctgatggctcagtatcaacaggccgacttgatttccttgggcaaggtagtcttggcattggcgtgtaactctctcgccggtatccaaagggagaacctgcagaaggccatggaacttgtgacgatcaattattcttcagacctcaagaatctgatcctgtatctactgacagaccaaaatcgcatgaggtctgtcaatgatataatgcccatgatcggcgcacgattctatactcagctggacgcagctcagatgcggaatgacgtaattgaagaggacctcgccaaggaagtccaaaatggacgactattccgtctgctggcgaaattggggactattaacgaaaggcccgagttccagaaagatcctacgtggtccgaaacaggagataggtacttgcttaagctgttcagagaccatctatttcatcaggtcactgaggcaggagctccttggatcgatttgtcccatattattagttgcttgaacaaactagatgccggagtacccgagaaaatttcactcatcagcagagacgagaagagcgtgcttgtagtcacatattctgacctaaaacggtgcttcgagaacacctttcaagaactcattgcagccgctaatgggcagctatag

SEQ ID NO: 27648 - DNA, 1785 bp, synthetic construct
  source 1..1785: mol_type = other DNA; note = Synthetic coding sequence
atggagtcaaatcacaaaagtggtgacgggctgtcgggaacacaaaaggaagctgccttacgggctcttgtgcagcgcactggctattccctggtgcaggaaaatggtcaacgcaagtacggcggacctcccccaggatgggacgcagctccccctgagcggggatgtgaaattttcatcggcaagttaccccgagacctgtttgaagatgagttgatccccctgtgcgaaaaaatcggcaagatctacgaaatgagaatgatgatggacttcaatgggaacaatcgaggatatgctttcgtcacatttagcaacaaggtggaggccaagaacgctatcaagcagttgaataactatgagatccgtaatggtcgtctcctgggtgtgtgtgcctctgtggataattgtcgcttgttcgtgggtggcatcccaaagactaaaaaacgggaggaaattctgtctgagatgaaaaaagtaaccgaaggcgtcgtggacgtgattgtgtacccttccgctgctgacaaaaccaagaaccgaggcttcgcttttgtggagtatgaatctcaccgggctgccgctatggcgaggcgcaaattgctccctggtcggatacagttgtggggacatggtattgccgtcgattgggctgagcccgaagtggaggttgacgaggacacaatgagctctgtgaaaattctgtatgttagaaaccttatgctgagtacaagtgaggagatgatcgaaaaggaatttaataacatcaaacccggtgccgtcgagagagtgaaaaagatcagagactacgcgtttgtccatttttcgaacagagaggatgctgtcgaggcgatgaaagcactgaatgggaaggttttagatgggtctcccattgaagtgaccctggctaaacctgtggataaagattcctatgtgcggtacacccgcggaaccggtggcagggggacaatgctgcagggagaatacacatactcgctgggacaagtctacgatccgacgacaacctacttgggagcgccagtcttctacgccccacagacctatgcggcaattccgtccttacactttccagccacaaaaggacacctcagtaacagagccattatccgcgctccctccgtaagggaaatctatatgaacgtgcctgttggcgctgcaggtgtcagagggttgggcggacggggatatttggcttacacaggcctgggacgtggttatcaagtcaagggtgacaagcgtgaagataaactatatgacattttgcccggaatggagctgacgcccatgaatcctgtgacgctgaaacctcaaggtattaaactggcaccacagatcctagaggagatttgtcagaaaaataattggggacagcccgtctaccaattgcacagtgcaattggtcaggatcaacgacagctgttcctctataaaatcaccatacctgcccttgcgtcccagaatcccgctatacacccattcacgccgcctaaactgtcagcctttgtggacgaggctaaaacatatgccgctgaatatactctacaaacactgggtatccctactgatggaggagacgggaccatggctaccgctgccgctgctgctaccgcattcccgggatatgctgtgccaaatgcaaccgccccagtgtcggccgctcagcttaaacaggctgtgacactcgggcaagatctggcagcatacaccacttatgaagtatacccaacctttgccgtgacagctcgtggagacggatacggaacattttag

SEQ ID NO: 27649 - DNA, 1167 bp, synthetic construct
  source 1..1167: mol_type = other DNA; note = Synthetic coding sequence
atgttggaaggatcatggatcaacagacgagaagataagctgggcgtgtactctctggtgcatttttcccccaaaatgctaggctcggtcgcaacaacccttccactcagctcatcaaactcctccgggatgcccctcggctattacctgagcagcccacagatttccagggtgacaatttcaactaccggtcagttgacctctaaagccacagtggggtcctgctccagggtggagaacagcctcgatgccagtccatttagcgtgccgaagaagcaggacgaaagccctatgatcggcgacggtgaggactacttcctttctctgttcggggactccaagaaacttacagctcatagcaattatacccagaaaacactgaaatactttagcatgatccttgaagaggtcggacaattcacaagttcatccctaggcgacgtcgagattgccgaagttaatgtcaaaggcctctttgtaaagctgatcaactcgtcgctggataaagagatggccatcggtgatcacatacttcagcagaatgtgaatggccagactatcagcctataccgcttccttcctaacattgtcatgcaagcaaattctacggtcactgtgtgggccgctgcatccgaagctaaacatcagccgccaagcgactttctttggaaggaacaggataaatttcgtgccagcccagactgtataaccatcttgtgcaaacccaatggccaggccattgcttggtacacccccatccactggaagcaggcctgggagaagcttgacgccgacgtggagttcaatcgctgtagtgtggtgagtcccaccttccgaaagcgggtcttccaatggacagcctcaacggcaacaattacaaaggagaaacaggatcaacccaagaaggacatttccaattaccaggtggagcaggcacaggtcttgcttaaaagggagaaggaaatccctccgaccgttttcccgaatagatctccttggtgccagaatccttatgtgagcgctcatccttactgccccttgatcgagccacataacacttcgactgcaggaggaaggctggaccgccaacccagaacacggtctactcgccctaatcgcgctagtggatctaaaaagaagaaaacttccgagtcgcaaaagcagtag

SEQ ID NO: 27650 - DNA, 744 bp, synthetic construct
  source 1..744: mol_type = other DNA; note = Synthetic coding sequence
atggaggaacaaccccagatgcaggacgctgatgaacctgctgactcaggcggtgaaggtcgggcaggaggacctcctcaagtcgccggtgcccaggcagcatgctccgaggataggatgactctgctattgagactacgggcacagacgaagcaacagctccttgaatacaaatcaatggtagacgctagcgaagagaagacccctgagcagatcatgcaggagaagcaaatcgaagccaagattgaagatctggagaacgaaattgaggaagtgaaggtggccttcgagatcaaaaaacttgccctggatagaatgcggctctccacggcactgaagaaaaatctggagaaaattagcaggcagagcagcgtgctgatggacaatatgaagcatctgctagagttgaataaactcattatgaaatcccagcaagagagctgggaccttgaggaaaagcttctggacattcgaaagaaaagactgcagctgaaacaggcttcagagtccaagctgctcgaaatccagaccgagaagaataaacaaaaaatagacctggattccatggaaaattccgagagaatcaaaattataagacaaaaccttcagatggaaatcaaaatcacgacagtcatccagcacgtgtttcaaaatttgattctaggttcaaaggtcaactgggctgaagacccagctctgaaagagatcgtgctgcaactggagaaaaacgtggacatgatgtag

SEQ ID NO: 27651 - DNA, 1458 bp, synthetic construct
  source 1..1458: mol_type = other DNA; note = Synthetic coding sequence
atggaatttctgggtacgacacaaacggcctcatactgcggtcctaagaagtgctgcggcctgactagcctgcccgctgtccaagcgccagtgatacaggagtgctaccagccatattacttacccggataccggtatctgaatagctggcgccctagcctgttttacaagatcgccaatgttcagacctgtccagatgaatcaacgagtactttacggccacccacaatactccctacccttcggtcagcactctttagccggtatagcccacacgattgggatcagtccaatcagctgcaggtccggggtgctgaagcttcaagactatgggcgagtcgcctgacggacgactctatgcgactcctgcaggacaaagaccaactgacacaccagatgcaggaaggaacctgtcggaatttgggacagcggctgtccgacatcgggttctggaagagtgaattgtcttacgagctggaccggctactcaccgagaaccagaatttggaaactgtcaaaagaagactcgaatgtgctgcaaatgaagtgaactgccctctgcaggtggccttggaatgcctctaccatcgagagaagaggatcggcattgatctggtgcacgacaatgtggagaagaatctgatcagggaggtggacctcctcaaatgctgccaagaacagatgagaaaacttgcccaacgcattgatattcagatgagagataatcgggacgctcaacatgtgttagagcgggacctggaggacaaaagttcagcccagtgcatcgatgagaaatgctttaacctgagaaacacctcagactgtatttcctttttccatgggatggagaagatcgacggcaccatctcagtacctgaaacctgggcaaaattttcgaatgataacatcaaacactcccagaatatgagggctaactcaatccagctgagggaagaggccgaacatctctttgaaaccttgtccgaccagatgtggcggcaattcactgatactaacctggcatttaacgctcggatctctgaggttaccgacgtaaaaaataaactgcagacccagttggccaaaactttgcaggagatcttccaggcagagaacactattatgttactggaaaggtcaatcatggctaaggaggggccactcaaagtggcccagacgcgattggaatgccgcacacgtcgccctaacatggagctctgtcgcgatatcccccagctaaagttggtcaatgaggtgttcactatcgatgataccctgcagactcttaagctgaggctacgggagactcaagacaccctgcaactgctagttatgaccaagtgtcggctagaacacgaactggctatcaaggctaatactctttgcattgataaagaaaaatgcatgggcatgcgcaagacttttccttgcaccccccgtctggtcggccacacttag

SEQ ID NO: 27652 - DNA, 837 bp, synthetic construct
  source 1..837: mol_type = other DNA; note = Synthetic coding sequence
atgggaaagtctagtgagtggtgcgagaggatcgccggtatccagaaatttgtgctggagaagtggacgaaaaaggccaaacctgaggatacgttgaatctgtgccaactcttgaataacgatctcgccagtaccgtcgtgagctatccacggcgattcgtagggttgggtactctaccaatgcaggcaccagagttagccgtgaaagaaatggagaggtgtgtgaaagagctgggctttcctggcgtccaaataggaactcacgtgaatgaatgggatctgaacgcacaggagctgttccccgtttacgctgccgctgaaagactgaaatgttccctgtttgtccatccttgggacatgcagatggacggtagaatggccaagtactggctgccatggctggtcgggatgcctgctgagactaccattgccatctgcagcatgatcatggggggtgtgttcgagaaatttcccaagctgaaagtgtgtttcgcccacgggggtggagcatttccttttactgtcggtcgcatatcgcatggattttcaatgcgtcccgacctctgcgctcaggacaatccaatgaatcccaagaaatacctgggcagtttctacactgatgctcttgtgcacgatccattgtccctcaaacttctgacggacgtgatcggcaaagacaaggtgattctcggcacggattatccttttccactcggcgaactggagcctggcaaacttatcgagtcgatggaagagttcgatgaagagactaagaataaactaaaagctgggaacgccctggcgtttctggggctggagcggaagcaattcgagtag

SEQ ID NO: 27653 - DNA, 2478 bp, synthetic construct
  source 1..2478: mol_type = other DNA; note = Synthetic coding sequence
atgtcaagcagcccagtgaacgtaaaaaaactgaaagtgtcagagctgaaagaggagctgaaaaagcggcgtctgtccgacaaaggactcaaggccgagctgatggagaggttgcaagccgctcttgacgacgaggaagcgggaggcaggccagcaatggagcctggcaatgggagccttgacctcgggggtgactcagccggtcgcagcggggctggcctcgagcaggaggcagctgctggaggcgatgaggaggaggaagaggaggaggaggaggaggaaggaatctctgctctcgacggggatcaaatggagctcggcgaggaaaatggagcagcgggtgcagccgatagtggaccaatggaggaggaggaggccgcaagcgaggatgaaaatggcgacgatcaaggctttcaggagggtgaggacgagctcggcgatgaagaggaaggggctggggatgagaacggccacggagagcaacaaccccagcctcccgcaacacagcagcagcagccgcagcagcagaggggcgctgcaaaagaggcagcaggcaagagcagtggccctacaagcctgtttgctgtgaccgtggcgcctccgggtgctcggcagggccaacagcaagccggagggaaaaagaaagccgagggagggggaggcggaggcaggcccggtgcacccgctgcgggagatgggaaaacggagcaaaaagggggagacaaaaagcgaggggtaaagcgtcctagagaagaccacggcagaggctacttcgagtacatcgaggagaacaagtattccagagccaagagtccccagccccctgtcgaagaagaagacgagcactttgatgatacagttgtctgtctcgacacatacaattgtgatctccactttaagattagcagagatcgtcttagcgccagctctttaacaatggaatctttcgcctttctctgggctgggggtcgcgcatcctacggtgtcagtaagggcaaggtatgctttgaaatgaaagttactgagaaaattcccgtccgacacctctacactaaagacatcgatatccacgaggtcaggatcggctggtcgctcacaactagcggcatgctgctgggggaagaggaattttcatacgggtattctctcaaaggcattaagacatgcaactgcgaaacagaggactacggcgagaagtttgacgagaacgatgttattacctgtttcgccaactttgagtccgacgaggtcgagctaagttacgctaagaacggtcaggatctcggcgtggccttcaagatttccaaggaagtgctggctggcaggcccctgttcccccatgtgctctgccataattgcgcagtcgaatttaatttcggccagaaagagaagccatactttcccattcctgaagaatataccttcatccagaatgttcccctggaggatagagtccgtgggccaaaaggacccgaagaaaaaaaggactgcgaagtggtgatgatgatcggacttccgggagccggaaagaccacttgggtgaccaaacatgcagccgagaacccaggtaagtataacatcctcgggactaacacaattatggacaagatgatggtggctggctttaaaaagcaaatggctgatacaggtaaactaaatactttgttgcagcgggctcctcagtgtctcggaaagtttatcgagatcgccgcacggaagaaaagaaacttcatactggatcaaactaatgttagtgccgctgctcagagaagaaagatgtgcttattcgctggatttcagcgcaaagctgtcgtggtgtgccccaaagatgaagactataaacagagaacccagaagaaagccgaagtagaagggaaggaccttccggaacacgccgttcttaagatgaaaggtaatttcactttacccgaagtcgccgagtgtttcgatgagattacctatgtcgaactgcagaaagaggaggcccaaaagctcctggaacagtacaaagaagagagcaagaaggctctcccacctgagaagaagcagaacactggcagtaagaagtccaacaaaaataagtccggtaaaaatcagtttaatagaggagggggacatcggggaaggggtggctttaatatgaggggtggaaactttcgaggtggggctccagggaatagaggaggctacaaccgacggggtaacatgccccaacgcggagggggtggcggaggttcaggaggaatcgggtacccttacccccgtgcacccgtgtttcccggtagagggagctattctaaccggggaaactataatagagggggaatgccgaaccgcggaaattataatcaaaacttcagaggtcgcggaaataataggggatataaaaatcagtcacaagggtataatcagtggcaacagggacagttctgggggcagaagccctggtcccaacattaccatcagggatattactag

SEQ ID NO: 27654 - DNA, 945 bp, synthetic construct
  source 1..945: mol_type = other DNA; note = Synthetic coding sequence
atgcagaatgtgattaataccgtcaagggtaaagcccttgaagttgctgagtacctgacacccgtcttaaaagagtccaaattcaaggaaacgggagtcattacccccgaggagttcgttgcagccggtgatcacttggtgcaccactgtccaacctggcagtgggccacaggggaagaactgaaggtcaaggcctaccttcctaccgggaagcagttccttgttacaaaaaacgtcccctgctataagcggtgcaagcaaatggagtacagtgacgagctggaggccatcattgaggaggacgacggggacggaggctgggtggacacatatcacaatactggtatcactggaataactgaagcagttaaagagattacactcgagaataaagacaatatccgactccaggattgctccgcactgtgtgaagaggaagaggatgaagatgaaggagaagccgctgatatggaggaatacgaggagagcggccttctcgaaactgacgaggcgaccttggacacgagaaagattgtcgaggcttgcaaagcgaaaaccgatgccggtggcgaagacgcgatcttacaaacaaggacttatgacctctacatcacatacgataaatactaccagactccgcgactgtggctgttcggatacgatgagcaacgccaaccactcaccgtcgaacacatgtacgaggacatcagccaggaccatgtgaaaaagactgtgaccatagaaaatcacccacacttgcctccaccacctatgtgttctgtacacccctgcaggcatgctgaagttatgaaaaagataatcgagactgttgccgagggcggaggggagctcggcgtgcacatgtaccttctaatctttctgaagttcgtacaagccgttatacccactatagagtatgactatactcgacattttaccatgtag

SEQ ID NO: 27655 - DNA, 900 bp, synthetic construct
  source 1..900: mol_type = other DNA; note = Synthetic coding sequence
atggttgacaagaagctggttgtcgtgttcggaggaactggagcacagggcggaagtgtagcaaggacactactggaagacggtacttttaaggttcgcgtggttaccagaaatcctcgtaagaaggctgcgaaggagctgaggcttcaaggagccgaggtggtgcagggcgatcaggatgatcaggtgattatggagctggctttaaacggcgcttatgccactttcatagtcactaattattgggagagctgcagtcaagagcaggaggtcaagcaagggaagctattagctgacctggcacgcaggctgggcctgcactacgtggtctactccggcctggagaacattaagaaattgacggcagggagactggctgccgcacattttgatgggaagggagaagtggaggagtacttcagggacatcggtgtccctatgacttcagtccgtctgccctgttacttcgagaacctgctgagccacttcctgccgcagaaggcaccagacggcaaatcatatttactttcactaccaacaggcgacgtgccgatggacggcatgagcgtttcggatttggggccagtggtattatccttactgaagatgcccgagaaatatgtcggtcaaaatatcgggctgagtacatgtaggcatacagcagaagaatatgctgccttgctaactaagcacacgagaaaggtggtgcacgacgctaagatgacaccagaagattacgagaagctgggcttccccggagccagagatctagcgaacatgtttagattctacgctctgagaccagaccgagatattgaactgacccttcggctgaaccctaaggccctgactctggaccagtggctggaacagcataagggcgatttcaacctcttgtag

SEQ ID NO: 27656 - DNA, 2571 bp, synthetic construct
  source 1..2571: mol_type = other DNA; note = Synthetic coding sequence
atggatataagtaagggcctccccggaatgcaggggggactgcatatttggatctcagaaaaccggaagatggtcccagtaccggagggtgcgtacggcaactttttcgaagagcactgctacgttatcctgcatgtccctcaatctccgaaagccactcagggtgcttcttctgacctgcattattgggtcggaaagcaggcaggtgcagaagctcagggtgctgctgaggcgtttcagcagcggcttcaagatgagctcggagggcagacagtgttgcatagagaagcccaggggcacgagagtgactgtttctgcagctacttcagaccagggatcatctatcgcaagggcggattggcatcagatctgaagcatgtagagaccaacctctttaacatccagcgtctgctccacatcaagggccgtaagcacgtctctgcgacggaagtggagttgagctggaattcctttaataagggcgacatatttttgttggatctcggcaagatgatgatacagtggaatggacctaagacatccatctcagagaaggctcgtgggcttgcgctgacgtactctctgagggacagggaacggggaggagggagagcacagatcggcgttgtggacgatgaggcaaaagcacctgacctgatgcagataatggaagctgttctcggccgtcgggtgggttccctcagagcggctacaccctcaaaagacataaaccagcttcagaaagctaatgtgcggctatatcacgtttacgagaaggggaaggaccttgtggtgctagagctggctacacctcccctgactcaggatctgttacaagaggaagatttctacattttagaccaaggtggctttaagatttacgtatggcaagggcgaatgagttccctgcaggagaggaaggccgcattttcaagggcagtgggtttcatacaggcaaaggggtatcctacctacacaaatgtcgaagtggtgaatgatggagccgagtccgctgcattcaaacagctatttcgtacttggtccgaaaagcggagacgcaatcagaaactgggcggacgcgacaagagtatccacgtgaagctggatgtcggcaaactgcacactcaaccaaaactcgctgcccagctcagaatggtggacgatggctccggaaaggtcgaggtttggtgtatccaggatctgcatcggcagccagtcgatccaaaacggcatggccagctgtgtgcgggaaattgttatctcgtgctgtatacctatcagcgcttaggacgggttcaatacatcctatatctgtggcaagggcaccaagcaactgcggatgagatcgaggcgttgaactctaacgctgaggagctggatgtcatgtatggtggcgtcttagtacaggagcacgtgaccatgggctcggaacctccccatttcctggcaatattccaggggcagctagttatctttcaggagagggcaggacaccacggcaaaggccagtccgcatcgactactcggctctttcaggtgcagggaacagattcgcacaacactcgaacaatggaagttcccgctagagccagctccctgaactcctccgacatcttcctgctcgtgacggcgtcggtctgctacctctggttcggcaaaggctgcaacggagaccaaagggagatggctagggtggtcgtcacagtgatcagtcggaaaaacgaggaaactgtacttgagggccaggaaccccctcatttctgggaagccctgggaggacgcgcaccatacccatccaacaagcggctgccagaagaggtgccctcctttcagcccagactgttcgaatgtagctcgcatatgggatgtcttgtgttggcagaggttggcttcttcagtcaggaggacctggacaaatatgacattatgctcttggatacatggcaggagatcttcctgtggctcggcgaagccgcttctgagtggaaagaagcagtagcctggggccaagagtacttgaagacccatcctgccggaaggagccccgctacgcctatcgtgctggtaaaacaaggtcacgagcctcccacatttatcggctggttcttcacttgggacccatacaagtggacttcccatcctagtcataaggaggtggtggacggatctccagcagcggctagcactatctccgagatcaccgctgaggtgaataatctccggctgagcaggtggcccggtaatggccgtgctggagcagtggcgttgcaggcactgaagggatcccaggacagctctgagaatgatctggttcggtcacctaaatctgcgggatctcggacctcttccagcgtcagttccacctctgcaactattaatggtgggctgcgcagggaacagttgatgcaccaggccgtggaggacctaccggaaggcgttgatccggctcgcagggagttctatctatctgattctgatttccaagatatctttgggaagtcgaaggaggagttttatagcatggccacttggaggcagcgtcaagagaagaagcagctaggctttttctag

SEQ ID NO: 27657 - DNA, 987 bp, synthetic construct
  source 1..987: mol_type = other DNA; note = Synthetic coding sequence
atggaggcgaatgggagtcagggtactagcggttcggccaatgactcacagcacgaccctggcaagatgtttatcggcggactctcttggcagaccagccccgatagcctgagggattacttctctaagttcggtgaaatcagggaatgtatggtcatgcgcgaccctaccactaaaagaagccggggttttggctttgtgacctttgcagatcctgcttcagttgataaggttctggggcaaccccaccacgagttggactctaaaaccatcgacccgaaggtcgcttttcctcgaagggcacagcctaagatggtgacgagaacaaagaaaatttttgtcggcggattatcggctaataccgtggttgaagacgtcaaacaatattttgagcagttcgggaaagtcgaagatgcaatgcttatgttcgacaaaacaaccaaccgacacagagggtttggtttcgtcacattcgaaaatgaagatgtcgttgagaaggtctgcgagattcacttccatgagataaacaacaaaatggtggagtgcaaaaaagctcagcccaaggaagtgatgtttcccccagggacacgcggtcgggctcggggactgccttacacaatggacgctttcatgcttgggatgggcatgctaggataccccaattttgtggccacctacggtagaggctatcctggatttgccccttcttacgggtatcagttccccggattccctgccgctgcctatggacccgtggctgcggctgctgtggctgctgcgcgtgggtccggaagcaacccagcaaggcccggtggattcccaggggctaatagtcccggacccgttgctgatctgtacgggccagcctcgcaggattcaggggtcgggaattatatttcggcggcatcccctcagcctggaagtggatttggtcacggcatcgccggtcctctgatcgcgaccgcttttacaaacggctatcactag

SEQ ID NO: 27658 - DNA, 654 bp, synthetic construct
  source 1..654: mol_type = other DNA; note = Synthetic coding sequence
atggagtcagtggctctgtactcttttcaggccaccgagtccgacgaacttgccttcaacaagggagataccctcaaaatactgaacatggaggacgatcagaattggtacaaggctgaactacggggtgtcgagggtttcattccgaagaactacattcgcgtaaagcctcacccatggtacagtggtagaattagccgccagctggccgaggaaatcctgatgaagaggaaccatttgggcgcttttctcattagagagtccgagtcttccccaggcgagttctctgtgagcgtgaactatggtgaccaagtacagcatttcaaggtgctaagagaagcatctggcaaatattttctctgggaagaaaagttcaatagcctgaatgaattggtggatttttaccggactactaccatcgctaagaagcggcaaatcttccttcgtgatgaggaacctctactgaaaagccctggagcctgcttcgctcaggcccaattcgacttttccgctcaagaccccagtcagctcagttttagaagaggagacatcattgaagtcctcgagaggcctgatcctcactggtggcgtggcaggagttgtggtcgggtaggcttttttcctcgatcatatgtgcagcctgtgcatttgtag

SEQ ID NO: 27659 - DNA, 231 bp, synthetic construct
  source 1..231: mol_type = other DNA; note = Synthetic coding sequence
atgggcctgaagatgagctgtcttaaaggctttcagatgtgtgtcagcagttcatccagctcccacgatgaggctcctgtcctcaacgacaaacacctcgatgttcccgacatcatcattacaccacccaccccaacaggaatgatgttacccagagatctcggctctaccgtgtggctggacgagacaggttcctgcccagatgacggggagatagatcccgaagcatag

SEQ ID NO: 27660 - DNA, 19863 bp, synthetic construct
  source 1..19863: mol_type = other DNA; note = Synthetic coding sequence
atggatcagccccagtttagcggtgctcctaggttcttgactaggccaaaggcctttgtcgtttcggtcggaaaagatgcgactttgtcctgtcaaatagtaggcaatcccacacctcaggtttcgtgggagaaggatcagcagcctgtcgcagccggagccaggtttcgtttagcacaggacggagacctctacaggctgactattctggacctggctctaggcgactctgggcagtatgtctgcagagcgcgtaacgctattggtgaggcttttgccgctgttggacttcaggttgatgctgaagccgcttgcgccgaacaggctcctcatttcctgctacgaccaactagcattagagtcagagaaggttcggaagccaccttcaggtgtagagtggggggatccccccgacctgcagtctcttggtcaaaggatgggagaagactgggcgagccagacggccctcgggtgagggtggaggagctgggcgaagcaagcgctctgcgaatccgggcagccaggcctcgcgatggaggcacctacgaggtacgtgctgagaaccccttgggtgccgcttctgctgccgctgccctggtggtcgactccgacgcagcagatactgcctccagacctgggacgtccaccgctgcactgctggcccacttacagcggcgtagagaggcgatgagagcagagggcgctcctgcctcccctccttcgaccggtactaggacatgtactgtgacagagggaaagcatgccagattgtcctgctatgtaactggggaacccaaacctgagaccgtgtggaaaaaggacggccaactggtcacagaagggagacgccatgtggtgtatgaggacgctcaggaaaactttgtgctgaagattctcttctgcaagcagtctgacaggggcctgtacacatgcactgcatcaaatctcgtggggcaaacttacagtagcgtgctggtcgtcgtcagggaaccggctgtgcctttcaagaagcggctgcaggatctcgaggtgcgggagaaggaatcagccacttttctgtgcgaagttccccaacccagcactgaagcagcttggttcaaagaagaaacacggctctgggcatccgctaaatacgggatcgaggaagaggggacagagagacgccttacagtaaggaacgtgtctgctgacgacgatgccgtgtacatttgcgagacaccagagggaagtcgaaccgtggctgagctggcagtccaggggaatttactccgcaagctaccgcgtaaaaccgcggtgcgcgtgggcgacaccgcgatgttctgcgtcgaacttgcagtccctgttggccctgtccattggctgcggaaccaggaagaggtggtcgcgggagggcgtgtcgcaattagcgcagaaggaaccaggcacaccctcacaatcagtcaatgctgcctggaggacgttggccaggtggcttttatggcgggtgactgccagacatcaacacaattttgcgtttcagcacccagaaagccaccgttgcagccacccgtggaccccgtggtgaaggccagaatggagtctagcgtgattctgagctggtcgcccccaccacatggcgaacgtcccgtgacaattgacggatatctggtggagaagaaaaaactcggaacctacacatggatccgttgccacgaggcagaatgggtggctacgcccgagctgactgtggcagacgtggctgaggagggcaacttccagttcagagtcagcgccctcaactcattcggccagtccccctacctcgaatttcctgggaccgtgcaccttgctcctaagctcgctgttcggactcctctaaaagctgtgcaggccgtggaggggggtgaagtgaccttcagcgtggatctgactgtggctagcgcgggagagtggtttctcgacgggcaggccctaaaggccagctccgtgtatgagatccattgcgataggacccgtcacacgttgacaatcagagaggtgcccgcatctctgcatggtgctcagctgaaatttgtggctaatgggatagaatcaagcatacgaatggaagtgcgagctgccccaggattgaccgcaaataaacctccagctgctgctgcccgagaggtcctggctaggttgcacgaagaagcccagctgctggccgagctgtcagatcaggccgcagccgtgacctggttaaaagacggtcggacactctccccagggccaaaatacgaagtgcaagccagcgccggtaggagggtgctgctagtgcgcgacgtggcccgagacgatgccggtttgtatgaatgcgtgtccagaggcggacgaattgcataccagctgagcgttcaagggctggctagatttttgcacaaagatatggccggttcctgcgtcgacgcagtggcaggagggccagcacaattcgaatgcgagacatccgaagcacatgtgcatgttcactggtacaaagacggcatggagctcggccatagcggggagcgattcctgcaggaggatgtgggcaccaggcacagactcgttgccgcaactgtcactcgtcaggatgaaggtacgtattcttgtcgggtgggtgaagactcggttgattttagactgcgcgttagtgaaccaaaggttgtatttgccaaggaacagcttgccaggaggaagctgcaagctgaagctggcgcttcagcgaccctgagctgcgaagtcgcgcaggcccaaaccgaggtgacttggtataaagatggaaagaagttgtcttcttcttcaaaggtgtgtatggaggccacgggctgtaccaggcgtctagtggtacagcaagccggacaagccgacgcgggagaatattcctgtgaagcagggggtcagcggttaagctttcatctcgacgtgaaagagcctaaagtggtttttgctaaggatcaggtcgcccatagtgaggtgcaggcagaagctggcgcttcagcaactctgtcttgtgaagttgcacaggctcagacagaggtaatgtggtataaggatggcaagaaattgtcatcctctttgaaggtacatgtggaggccaagggttgtcgacggcgtcttgtggtgcaacaggcaggcaaaactgatgctggtgactatagctgcgaggccagaggccaacgcgtctccttcaggctgcacattaccgagcccaaaatgatgttcgctaaggaacagtccgtgcataatgaggtgcaggccgaggctggggcatctgccatgctcagttgcgaggttgcccaggctcagaccgaggtaacttggtataaggacgggaaaaagctctctagctcctctaaggttggaatggaagtgaaaggatgtactcggcgtctggttctgccacaagctggcaaggctgatgctggggaatattcatgtgaagccggtggtcagcgtgtcagctttcatcttcatattacggagcctaaaggagtgtttgcgaaagagcagtcagtacataatgaggttcaggccgaagccggaacaaccgccatgctgtcatgtgaggtggcccagccccagaccgaggtgacctggtacaaggatggaaagaaattatccagctcctcaaaggttcgcatggaagtgaaagggtgcacccgaaggctggtagtccagcaggttggcaaagcggatgcgggagagtactcctgtgaggcgggaggacaaagagtgagcttccagttgcatatcactgaacctaaggctgtatttgcaaaggaacaactggtacataacgaggtccgcaccgaagctggcgcttctgccaccctatcctgcgaagttgctcaggcacagacggaggttacctggtacaaggatgggaagaaactatcctcgagcagtaaagtgagaattgaggcagccggttgcatgaggcagttggttgtccagcaggccggacaggcagacgctggcgaatacacatgtgaggccggaggtcagcggctctcttttcacctggatgtctccgagccgaaagccgtatttgcgaaagagcagttggcacatagaaaggttcaggccgaggcaggggcaattgccacactttcctgcgaggtggcacaggcacagactgaagtgacctggtataaggatgggaagaagttatcgagttcgagcaaggttaggatggaagccgtggggtgtacccgacgcctggtggtccaacaggcctgccaggcggatacgggtgaatactcttgcgaagctggcggacaacggttaagttttagcctggacgtcgccgagcctaaggtcgtgttcgcaaaggagcagcccgtacatcgtgaagtgcaggctcaggctggggcttctactaccctttcttgtgaggtggctcaggcccagactgaagtcatgtggtacaaggacggaaaaaagttatctttttcgagtaaggtccgtatggaagctgtagggtgtaccagaaggctcgtcgtgcaacaagcgggtcaggctgtcgctggcgaatattcttgcgaggcgggaagccagagactctcctttcatctgcacgtggcggaaccaaaagcggttttcgcgaaggagcagcccgcttctagagaggtgcaggcggaggctgggacatctgccactttgagttgtgaggtggcccaggcgcagacagaagtaacctggtacaaagacggaaagaagctctctagctcaagtaaagttcgaatggaagccgtgggttgcaccagacggctcgtagtgcaggaggctgggcaagcggacgctggcgagtattcatgtaaagccggagaccagcgactttcattccacctgcatgtggctgagccgaaggtggtctttgcaaaagaacagcctgctcaccgggaggtgcaggctgaagccggagcctccgccaccctgtcctgcgaagtcgcccaggcccaaactgaggttacttggtataaagacggcaaaaaattatctagctcatcaaaggtgagagtggaggcagtcggatgcacccgcaggctggtcgtccagcaagcaggccaggccgaggctggcgagtacagttgcgaggccggtggacagcagctgagcttcagattgcaagtcgccgagcttgaaccacaaatttcagagaggccctgtcgccgtgaacccctggttgtcaaggagcacgaggacatcatcttgactgccacactcgccacaccctcggctgctactgtgacgtggctcaaagacggagtcgagattagaagatccaagcgacacgagaccgccagccagggggatacgcatactctgacagtccatggcgctcaggtgctagactccgccatttattcctgccgcgtgggagctgaggggcaagattttccagtgcaggttgaagaggtggcagccaagttctgccgcctcctggaaccagtgtgtggagaactcggagggacagttacgctcgcttgtgagctgtcccccgcttgtgcagaagtggtctggaggtgtggcaatactcagctgcgtgtaggaaaaagatttcaaatggtcgcagagggacctgtgcggtcactgacagtccttggcttgagagctgaggacgcaggcgaatacgtctgcgaatccagggacgatcacacgtcagcacagttaacagtcagcgttccaagagtggtcaagttcatgtcaggtctctccaccgtcgtcgctgaagagggcggagaggcaacgttccaatgcgtcgtgagtccttcagacgtggctgttgtttggttccgggacggagcactactacagccatctgagaagtttgctatctcacaaagtggcgctagtcattcactgactattagcgacttggtcctggaggacgccggtcaaattacagtcgaagcagagggcgctagttcatccgcagccctgagggtgagagaagccccagtgctgttcaagaaaaaactcgagccccagaccgtagaggaaagaagctccgtaactctggaagtcgagctcaccaggccatggcccgagctaaggtggacgcggaacgcaaccgcgctggctcccggtaagaatgtggagatccacgccgagggcgctcgacaccgactcgtgctacataacgtggggtttgccgacagaggtttcttcggctgtgaaacacccgacgataagacgcaggccaaactcaccgtagagatgcggcaggtacgcctcgtccgtggccttcaggcagtagaagcaagagagcagggaactgccacaatggaagtacagctatcacacgcagatgtggacggtagttggactagagacggattacgatttcaacagggaccaacctgtcacttggccgtccggggtcctatgcatacattgactctctccggactcagacccgaggactccgggctgatggtgttcaaggccgaaggagtgcatacgagtgcacgactagtggtgaccgaacttccagtgtcgttctcacgacctctccaggacgttgtgactacagaaaaagagaaggtgaccctcgaatgcgagctcagcagacctaacgtggacgtgagatggttaaaggatggagttgagctgagagcaggcaaaaccatggctatcgccgcacaaggtgcttgcaggtctctgacaatctacaggtgtgagttcgccgaccagggcgtgtacgtgtgcgatgcgcacgacgcacagagttcagcatctgtgaaggtacaaggcaggacgtacaccctgatttatagacgcgtccttgccgaagacgcgggtgagatccaattcgtggcggagaatgctgagagtcgtgcacaactcagggtgaaagaactgccagtgacactggttagacctttgagggacaaaattgccatggagaagcaccgtggagtcttggaatgccaggtatcaagagcctctgcccaagtcaggtggtttaagggcagccaagaactacaaccagggccaaagtacgaacttgtctctgatggtctgtatcggaagctgatcatttcagacgtgcatgccgaggatgaagacacctatacgtgtgatgctggggacgttaaaaccagcgcgcagttcttcgtagaagaacaatccatcactatcgtacggggtctgcaagacgtgaccgtcatggagcctgcccctgcatggtttgaatgcgaaacgagcatcccttccgtccgcccacccaagtggttactaggaaaaacagtcctgcaagccggagggaatgtagggctagagcaggaagggaccgtacatcggctgatgttacgccgaacgtgctccaccatgacgggccctgttcattttacagttggcaagtcgaggtcctctgcacgccttgtggtctcagatattcctgtggttctgaccagaccattggaacctaaaaccgggagagagctacagagcgtcgtcttgagctgcgacttcaggcccgctcccaaggccgtgcagtggtacaaagatgacacacccttgagcccatccgagaagttcaagatgtccttagaaggccagatggcggagctccggatcttgcggcttatgcccgcagacgcaggggtctaccgctgtcaggcaggtagcgcccatagctccacagaggtgactgttgaggcgcgagaagtgactgtaaccggacctttgcaggatgcagaggccaccgaggagggctgggccagcttctcttgcgaactgtctcatgaggacgaggaggtagaatggtctctcaacggcatgccattgtataacgattctttccacgagataagccacaagggacgacgccataccctggtgctgaagtcgatccagcgcgctgatgctggaattgtccgtgccagcagtttaaaagtatctacctctgcaaggctagaggttagggtgaagcccgtggtatttctgaaggcccttgatgacctcagcgccgaagaaaggggcaccctggcactgcagtgcgaggtcagcgaccctgaggcacacgtggtttggcggaaggacggggtgcagctcgggccttcagataaatatgatttcttgcacactgcgggtaccagaggcttggtcgttcacgacgttagtcccgaagacgccggtttgtatacttgtcacgttggaagcgaagagacgcgtgccagggtacgtgtccatgatttgcacgttggcatcacaaagagactaaaaacgatggaagtcttagaaggggagtcttgctccttcgagtgtgtgctgtcacacgagtcagcctccgacccagcgatgtggaccgtcggcggaaaaacagtgggctcctcatccagatttcaggccacccggcagggcaggaagtacatcttggtcgtgagagaggcagcccctagcgacgccggagaggttgttttctccgtcagaggtcttacgtcaaaagccagcttaatcgtgagagaaaggcctgcagctatcattaagcccctggaagaccagtgggtggcccctggggaggatgtggagctgcggtgcgagctgtccagggctgggactccagtgcattggttgaaagacaggaaagcaatacgaaaatcacagaaatacgatgtcgtctgtgaaggcacaatggcaatgcttgtgattcgcggagctagtctgaaagacgctggcgagtatacctgtgaggtagaggcaagtaagtccacagctagtcttcacgtggaagaaaaggcaaactgttttacagaagagttaactaacctgcaggtagaagaaaaggggaccgctgtctttacctgcaaaactgaacaccccgcagctacggtcacatggcggaaggggttactggaattgagagcgtccggtaagcaccaacccagccaggaaggactaacccttcggttgacaatatccgctttagagaaagccgactccgacacctacacttgcgacattgggcaggctcagagtcgcgcacagctgctggtgcagggccgtagagtgcacatcattgaagatttggaagacgtggatgtccaggagggcagctcggctactttccgctgcagaatttcacccgctaattatgaacccgtccactggttccttgacaagacaccactgcatgccaatgaattaaatgagatagatgctcagccaggtggatatcatgtactgactctaaggcaactggccctgaaggactccggtacaatctattttgaagcaggcgaccagcgcgcttctgccgctctacgcgtgacagaaaagccttctgtcttcagtcgagaactgactgacgccaccatcactgagggcgaggacttgaccctggtttgcgagacatcaacttgtgacattccagtgtgttggacaaaggacgggaagacactccggggatctgcccgatgccaactgtctcacgaagggcaccgcgctcagctgcttattactggagccacattgcaggactccggtcggtataaatgtgaagccggaggggcatgttcctctagtatcgtgagagttcacgccaggccggtacgcttccaggaggcgctgaaggatctagaggttttggaggggggtgccgctaccctgcggtgtgtcctgagctcggtcgccgcaccggtaaagtggtgctacgggaacaacgtgctgcggcctggtgacaagtattctttgagacaagaaggggcaatgctcgaactggtggtacggaatctccgtcctcaagacagtgggaggtatagctgctccttcggagatcagaccacctcagccaccttgactgtgaccgcgctcccggctcagtttatcggaaaacttcggaacaaggaagcgaccgagggtgccactgctacactccggtgtgagctgtctaaagccgcaccagtggagtggaggaaagggagcgagactttgcgcgacggagatcgatactgtctgcggcaggacggcgcaatgtgcgagctgcagatccgcggactggccatggttgacgccgcagaatattcttgtgtgtgtggagaagaacgaacttctgctagtctcactatccgtccgatgcccgctcactttattggacgtctgcggcatcaggaaagcatcgagggagccaccgccacactcagatgcgagctctccaaggcagcccctgtggaatggaggaagggtcgtgaatctttgagggacggggatcgccacagtctgcgccaagacggggcagtttgtgaattacagatctgtggcctggctgtggctgacgccggtgagtactcctgcgtttgcggagaagaaagaacatccgcgactttgacagtgaaggctctgcccgctaagttcaccgagggcctgaggaacgaggaggccgtggaaggtgccactgcaatgctgtggtgtgaactgtcgaaagttgctccggttgaatggcgcaaagggccagagaatctaagagacggagataggtacatcttaagacaagagggcaccaggtgtgagttacaaatttgcggtttggcaatggctgacgctggcgaatatctctgtgtgtgtggccaggaacggacctctgccaccctcaccatccgcgctttgcccgctcggttcatcgaggacgtaaagaatcaagaagctcgtgaaggtgcaactgctgtacttcagtgcgagctgaattctgcggctccagtcgagtggaggaagggctctgaaaccctgcgcgacggcgacagatacagtctgcgccaggatggtacgaagtgcgagttgcaaatccgcggactcgctatggctgacacaggcgagtatagctgtgtctgcggacaagaaaggacctctgcaatgctgaccgtgcgcgcactaccgattaagtttaccgaggggctgaggaatgaggaggctacagaaggcgctaccgccgtgctgaggtgtgaactgagcaagatggcccctgtggagtggtggaagggtcacgagacactgcgtgacggcgatagacacagcctcagacaagatggtgcaaggtgtgagttacaaatacgaggcttggtggctgaggacgccggagagtacctctgtatgtgcggaaaagaaaggacctctgcaatgttgacagtgcgggcaatgccaagcaagtttatcgaaggcttacgcaatgaagaggccaccgaaggggacaccgcgactctgtggtgcgagctgagcaaagccgctcccgttgaatggcggaaggggcacgagacactgagggacggtgatcgacacagcttacgtcaggatggaagcagatgcgaattacaaatcaggggactggcagtggtggatgcaggagagtatagctgtgtgtgtggccaagagaggacaagcgccaccttgaccgtgcgggcactccctgccaggttcatcgaggacgtaaaaaatcaggaagctcgagagggcgcaactgccgttctccagtgcgagttgagtaaggctgccccagtggagtggagaaaaggctcagaaactctaagggggggagaccgctactctctgagacaggatgggaccagatgcgagctccaaatccacggcctgtccgtagcagacaccggagaatacagctgcgtctgtggtcaagagcgcacgtctgccacccttacggtgcgggctccacagccagtgttccgcgagccgctccaaagcctgcaagctgaggagggaagtactgcaacccttcaatgcgaactttcggagccaacagccacagtggtttggagtaaggggggtttacagctccaggcaaatggaagacgcgagccccgattgcaggggtgcaccgctgaactagtactccaagacttgcaacgcgaggacaccggcgagtatacgtgtacttgtggctcacaggccaccagcgccactctcacagtgacggctgcccctgtgcgtttccttcgggagctccaacaccaagaagtcgatgagggtggtacggcccacctgtgttgcgaactgtccagagccggtgcctcggttgagtggcggaagggcagcctgcagctgttcccgtgcgctaaatatcagatggtacaagatggcgcagcagccgaactattggtgcgcggtgtggagcaggaagatgcaggtgattacacatgcgacaccggacacacacagtctatggcctctttgtcagtgcgggttccgcgtcctaagttcaaaactcgcctgcaatccctggagcaggagacgggggatattgccaggctgtgttgccaactatccgacgccgagtctggcgcagtagtccaatggctaaaagagggggttgagctgcacgccggtcccaagtatgagatgcgctcacaaggtgctacgcgtgagctcctgatccatcaactggaagccaaggatactggggagtatgcttgtgtcaccggagggcagaagaccgccgcatccctgcgtgtgaccgaacctgaagtgaccatcgtgcgtggcctcgtagatgcggaagtgacagctgacgaggatgtggaattcagctgtgaggtgtccagggctggagctaccggcgtccagtggtgtctgcagggactgccccttcagtcgaatgaagtcacagaggtcgccgtccgcgacggtcggattcatactctgcgcctcaaaggcgtgactcctgaggacgctggaaccgtatcttttcatttgggaaatcatgccagcagcgcacagttgacagtgcgcgctcctgaagtgacaatcctggaacctctgcaggacgtgcaactatccgaaggccaggacgcttccttccagtgtagattgtctagagcatcggggcaggaggcaaggtgggctctgggtggcgttcctctgcaggccaatgaaatgaacgacatcaccgttgaacagggaactcttcatcttctgacccttcacaaggtcacacttgaggacgccggaaccgtctcgtttcacgtgggcacttgttcgagtgaggcccagcttaaggtcaccgctaaaaacacggttgtgcggggactcgaaaacgtggaggcactggaaggaggggaggcattgttcgaatgccagctatctcagccggaggtggccgcacacacgtggctgctcgacgatgagcctgtgcacacgtccgagaatgccgaagttgtcttctttgaaaacgggttgagacatctgctgcttcttaaaaatctgaggccccaggattcttgtcgggtcacattcttggcaggagacatggttacctccgcgtttctgactgtgaggggctggagactggagatattggagcccctgaagaatgccgcagttcgggctggcgctcaggcctgtttcacatgtacactttctgaggccgtaccagtgggcgaggccagttggtatatcaatggagctgccgtgcagcccgacgattccgactggacagtaaccgccgatgggtcacaccacgccctcctgctcaggagcgcccagccccaccacgccggagaggtgacatttgcatgccgtgatgctgtcgcctctgctagattgactgtattgggactgcccgatcctcctgaagacgctgaagtagtagccaggagctcacatactgttacacttagttgggccgctccaatgtcagatggaggcggaggtttgtgcggctaccgggttgaggttaaagaaggcgctactggacagtggagactctgccacgaactcgtcccaggcccagagtgtgtcgttgacggactggccccaggcgagacctataggttccgggtagcagctgtcggacccgttggggcaggcgagccagttcacctgcctcaaactgtgcgactggcagaacctcccaaaccagtgcctccacagccttcggcccctgagagccggcaggtggcggctggcgaggatgtctcactcgaactggaggtggtggctgaggctggcgaggttatctggcataaagggatggaaagaattcaacccggagggagattcgaagtggtgtcccaggggaggcagcagatgctggtaattaaagggttcactgcggaagaccagggggaatatcactgtgggcttgcccagggatcaatctgccctgcggctgccaccttccaggtcgccctttcacccgcaagtgtggacgaggcacctcagccctcccttccacccgaagccgctcaggagggcgacttgcacttactctgggaggcactggctcggaaacgaaggatgtcccgcgagccgaccctggacagcattagcgaacttcccgaggaggatggccgttcacagcggctacctcaggaggccgaagaggtcgctccggacttgagcgaaggatattccacagccgatgaactggctagaaccggcgatgcagacctatctcatacatcttcggatgatgaaagccgcgctggcacccccagtctggtgacatacttaaaaaaagccggaagaccgggaacaagccctttggcctccaaagttggcgctcctgcggctccttccgtcaagccacagcaacagcaggaacctctcgccgctgtgcgaccaccgttgggcgatctatcaaccaaggatctcggggacccctctatggataaggccgctgtgaagatacaggcagcctttaagggatacaaagttcggaaagagatgaagcaacaggagggcccaatgttcagccacacatttggcgatactgaggcacaggttggcgacgcccttcgcctggaatgcgtcgtggcaagcaaagcagacgtgcgggctcgctggctgaaagatggcgtcgagctgacagacggaaggcatcatcatatcgaccagctgggtgacgggacgtgctctctcctgattaccgggctggaccgtgccgatgctggatgctacacctgccaagtgtccaacaaatttggtcaggttacccattctgcatgtgtagtggtgtcggggagtgagagcgaagctgaatccagttctggtggcgagctggatgacgcattccgaagagcggcacgccgtttacaccgacttttccggactaagagtcctgcagaagtctctgacgaagaattgtttttgtcggcagacgaaggacccgcagagccagaggaacctgctgactggcagacgtatagagaagatgaacatttcatctgcatcagatttgaggctctcacagaagctagacaggcagtgacccgttttcaggaaatgtttgccacactgggcatcggggtggaaattaaactagtggaacaagggcctcgccgagttgagatgtgtatctctaaggagacacccgcaccagtggtaccaccggaacccctgccctcactgttgacaagcgatgcagctcccgtttttcttactgagctgcagaatcaggaggttcaagacggctaccctgtctcgtttgactgcgtggttacaggccaacctatgccctcagttcggtggtttaaggatggtaagttgctcgaggaagatgaccactacatgattaatgaggaccaacagggaggtcatcagctgattatcactgcggtggtgcctgctgatatgggtgtgtatcgctgccttgcagagaacagtatgggtgtcagctctaccaaagcggaactgagggttgatctgacgtcaaccgattatgatactgctgcagatgctaccgagagttcctcttatttcagtgcacagggatatctgagttctagagaacaagagggaacagaaagcaccaccgatgaaggccagctcccacaggtggtcgaggaactgcgcgacctgcaggtcgcgccaggtacccgcctggctaaattccagctgaaggttaaaggctacccagcgccacgcctatactggtttaaagacggccagccactgactgctagcgcccatatccgcatgacagataagaagattcttcacacccttgaaataattagcgtgactcgggaagactcaggtcagtatgccgcatatatttcaaacgctatgggagcagcatattcatctgcaagactgctggtcagaggcccagatgaacccgaagagaaacccgctagtgatgtgcatgaacagcttgtgccacccaggatgcttgagagatttaccccaaaaaaagtgaaaaaggggtcgtctatcaccttctctgtcaaagtagagggtcgacctgtgccaacggtgcattggctccgcgaggaggcggagcgaggagtgctgtggatcggtcccgatacacctggatataccgtcgcctcctccgcccagcaacacagcctcgtgctgttggatgtaggacggcagcatcagggaacttacacatgtattgccagcaatgccgctggccaggccctatgtagtgcctccttgcatgtgtctgggctaccaaaagtggaagagcaggagaaagttaaagaggccctgatttcaacctttctgcaagggacgactcaggccatctctgcacagggccttgaaacggcatccttcgccgacttgggtggtcagcgaaaagaggaaccgctggccgcaaaggaagcgctggggcacctgtcactggccgaggtagggactgaagagttcctgcagaaattgacctctcagataactgagatggttagcgccaaaatcacacaggccaagctccaagtgccgggtggggactccgatgaggactcaaaaacaccctcggctagccctcgtcacggcaggagtcgccctagtagctccatccaggagagtagcagcgagtccgaggacggcgacgccagaggagagatctttgacatctacgtggttacagctgattatctgcccctcggagcggagcaagatgccatcacgttacgcgaagggcagtatgtggaggtgctggatgcggcacatccactccggtggttggttagaacgaagccaacaaagtcctctccctcgaggcaagggtgggtgagcccagcttatctggaccgacggctgaagctgagcccagagtggggtgctgctgaggcccctgaatttccaggcgaagccgtgagcgaggatgagtataaggcccgactgtcgtctgttattcaggagcttctgtcctcagagcaggccttcgtcgaagagctgcagttcctccagagccaccatctgcagcatcttgaacggtgcccccatgttcccattgccgtcgcgggtcagaaggcagtgatcttcaggaacgtaagggacatcgggcgtttccatagcagttttcttcaggaactgcagcagtgtgatactgatgacgacgtggctatgtgcttcatcaaaaaccaggctgccttcgagcagtacctggagtttcttgtgggtcgagtgcaggccgagtccgtcgtggtgagcacagccatccaggagttttataagaagtacgctgaagaggctctactagccggagacccttctcaaccccctcccccaccactccagcactacttggaacagcccgtggagcgggtccagcgatatcaggccttactaaaggaactgatccggaataaagcgcgtaaccgccagaattgcgccctgttggagcaagcttatgccgtggtctcagcgttgccacaacgtgccgaaaacaaactgcatgtgtctttgatggaaaattaccctggaactcttcaagcacttggcgagcctattaggcaggggcattttattgtttgggaaggggcacccggtgccagaatgccatggaaggggcacaacagacacgtgtttctcttccgtaaccacctcgtgatctgcaaaccccgacgggattcaagaacagacaccgtgagttatgtgtttcggaacatgatgaagctgagttctattgacttgaatgaccaagtagagggcgatgacagagcattcgaagtgtggcaagagcgcgaggattccgttagaaagtaccttctccaggccagaacagccatcattaagagctcctgggttaaggaaatttgcggcattcagcaacgtcttgccctgcctgtatggcgccctcccgattttgaagaggagctggccgactgtaccgcagaactgggcgaaacagttaagctcgcctgtagggtcaccgggacccctaagccggtgatttcatggtataaggatggcaaagctgtgcaggttgaccctcatcatatactgatagaagacccggatggatcctgcgctctgatcctggatagtttgacgggggtcgacagtggtcaatatatgtgctttgctgcctccgctgccggaaattgcagtaccctcgggaagatcctcgtgcaggtgccgccaagatttgtgaacaaggtgcgggcttctcctttcgtggagggagaggacgcacaatttacatgtactattgagggggcaccctatcctcagatccgctggtataaggacggcgctctgctgaccactggcaacaagttccaaactttgtctgagccgcgtagcggcttactggtactggtgattagagccgcttcgaaagaggacctggggttgtacgaatgcgaacttgtgaatcgattgggaagcgcaagagctagcgcggagctccgtatacagtcacccatgctgcaggctcaagagcagtgccacagggaacagttagtggccgcagtcgaggttaccgaacaggagaccaaggtgcctaaaaagaccgtcatcatcgaagagaccatcaccacagtggttaagtcccccagggggcaacggaggagtccgtcaaaaagcccgtcacgtagtccatctaggtgtagcgctagcccattgaggcctggtcttctcgcacccgatcttctgtacctgccaggtgccggtcagccgaggaggccagaggccgaaccgggacagaaacctgttgttcctactctgtacgtaacagaggccgaagcccattcacccgctctgcccggactcagtggccctcagccaaagtgggtcgaggtcgaggagacaatcgaggtgagggttaagaaaatgggtcctcaaggcgtctctcccacgacagaggtgcctaggtcttcctccggacacctcttcacacttcccggtgccactcccggtggtgacccgaactctaataacagtaacaataagctgcttgcccaggaggcctgggcccagggtactgcaatggtgggcgtcagggaaccccttgtttttcgagtggacgcccgaggctccgtagactgggcggcatctggaatgggttccctggaggaagaaggaaccatggaggaggccggagaagaggaaggagaagatggagacgcctttgtgacagaggaatcccaggatacccactctctgggagatcgtgatcccaagatcttgacacataacgggcgaatgctcactctagctgacctagaggattacgttcctggcgaaggtgagacttttcattgcgggggtccgggtcctggggcaccggatgatccaccgtgcgaggtgtcagtcatccagagggaaatcggggagcccaccgttggccagcccgtcctgctatccgtgggacacgccttaggacccaggggccctctcggtttattcagacccgagcctaggggcgcaagtccaccaggcccacaagtgagaagccttgaaggaacgtcgtttctgctaagagaggctccggcacggccagtaggctcagcgccatggacacaatctttttgcaccaggatcaggcgcagtgccgactcgggccagagttcgttcacgactgagttatcaacgcagaccgtgaacttcgggacagtcggtgagaccgtaactctacacatatgccccgatagggacggtgatgaggctgctcagccctac

SEQ ID NO: 27661 - DNA, 1407 bp, synthetic construct
  source 1..1407: mol_type = other DNA; note = Synthetic coding sequence
atggcggcacccgacctttccacaaacctgcaggaagaagcaacttgtgccatctgcctggattactttactgacccagtgatgactgactgcgggcataacttctgccgcgagtgcatccgacggtgctggggccaacctgagggaccatacgcttgcccagagtgtcgcgagctgagtccgcagaggaacttaaggcccaacaggcccctggccaaaatggctgaaatggcccgacggttacatccgcctagccccgtgccccagggtgtgtgcccggcacaccgcgagcctttggcagctttttgtggtgacgagctgagactgctctgcgccgcatgcgagcggagcggggaacactgggctcaccgggtacgcccacttcaggatgccgcagaagatcttaaggccaagttagagaagagtctggaacacctgcgcaaacagatgcaggatgccttgctgttccaggcccaggccgatgagacctgcgttctttggcagaagatggtggaatcccaaaggcagaatgttctgggagagttcgagcggttgaggcgcctactagcagaagaagagcagcaattgctccagagattggaagaagaagagcttgaggtattgccaagattacgggagggtgccgctcacctgggccagcagtctgcccacctcgccgagctgatcgcggaactggaagggaggtgccagttacccgcactgggactcctgcaggacattaaggacgcattgcggagagtccaggatgtgaaactgcagcccccagaagtggtgcccatggaactgcgaactgtctgccgcgtccccggtctggtggaaacactgcgcaggttccggggtgacgtaactctggatccagacacagccaaccccgagctgatcctgagcgaagataggcgaagcgtacagcggggtgatctgcggcaggctttaccagatagccctgagagatttgacccaggtccctgtgtcctcgggcaggagcgctttacatcaggcaggcattactgggaagttgaagttggtgatcgtacctcttgggctctgggcgtgtgcagggagaacgttaacagaaaggagaaaggagagctgtctgctggcaacgggttctggatcctggtctttctaggatcatactataacagcagtgagcgagcactagcccctcttcgagatcctcctaggagggtggggatattcctcgactatgaagccggacacctgtcattttactccgcgacagacgggtctctgctttttattttccccgaaatccccttctccggcaccttacgaccactcttctcccccctgtcctctagtcccacaccaatgaccatttgcaggccaaagggtggcagcggcgacactctcgccccacaatag

SEQ ID NO: 27662 - DNA, 813 bp, synthetic construct
  source 1..813: mol_type = other DNA; note = Synthetic coding sequence
atgagccctggatctggggtgaaatctgaatatatgaagaggtaccaggaaccccgttgggaggaatatggaccttgttatagagaacttctgcactataggctgggccgacggctgctggagcaggcccatgcaccttggctgtgggatgattgggggccagccggatcttccgaggactctgcctcgagcgaatcttctggcgctggcggtcccgcacccagatgtgccccaccgtcgcctccaccaccagtggaacccgcaactcaagaagaggcagagcgtagagctcggggagccccagaggagcaggacgccgaggccggagacgcagaggccgaggatgccgaggatgcggctctgcccgctctacctgtaaaggatgtggaagacaaacctgaacaacagaccagaacccgggaaacagataaatctccaacgtccactgagcccagacagcagccaagcgctctgttcgccagggggaatcggaaggccgtgaagagccctcagcgctccagttctaagatcaaggaaaacaaacacccttttgccctgtacggctggggcgaaaagcaaaccgacactgggtcacaaaagacccacaacgtctgcgccagcgcgcctgtgcacgagatccatgaaagtgctctgcgggcaaagaaccgacggcaggtggagaagaggaagttagtggcgcaacggcagcgggcacatagtgtggacgtagaaaaaaataggaaaatgaaagcctcatcttcagagaatccctggatgacagagtacatgaggtgttatagcgctagggcatag

SEQ ID NO: 27663 - DNA, 2667 bp, synthetic construct
  source 1..2667: mol_type = other DNA; note = Synthetic coding sequence
atggacgaaagtgccttgctggatctattggaatgtcctgtttgcctggagcgtctggacgcaagcgctaaagttctgccctgtcagcatacattttgtaaacgctgtctgctgggaattgtgggatcccgaaatgagctccgttgtcccgaatgcaggaccctggtcgggagcggggtggaagagctgcctagcaatatcctgttggtgagactactggacggaattaagcagaggccatggaagcctggcccaggtggcggaagcggcaccaattgtacgaatgctctcaggtcacagtccagcaccgttgccaattgcagcagtaaagacctccagtcaagccagggaggacagcaaccgcgtgtccagtcatggagcccacctgtccggggaatcccgcagctgccatgtgctaaagccctgtacaattatgagggaaaggaacccggtgatctcaaattttcaaagggcgatatcatcatccttcgtaggcaggttgatgaaaattggtatcacggggaagtcaacggcattcacgggttttttcccactaacttcgtccagataattaagcctcttcctcagcctccacctcaatgtaaggccctgtacgattttgaagtgaaagataaagaagccgataaggactgtctgccatttgccaaagatgacgtcctgacagttatacgacgcgtggacgaaaattgggccgaagggatgctcgccgacaaaatcggaatctttccaatttcctacgtcgagtttaacagcgccgctaagcagttgattgagtgggataagccaccagtgccaggagtcgatgcgggtgaatgctcatccgctgctgcacagagttctaccgcccctaagcacagtgacaccaagaagaacacaaaaaaacggcacagcttcacgtccctgaccatggccaataaatctagccaggctagccagaatcgccattctatggaaataagtccaccagtcctcatttcttcctcgaatcctacagccgctgccagaattagtgagctgagtggcctgtcctgctcagccccttcacaggtgcacatctcaaccacgggtttgattgtcactcctccaccaagttcccccgtgacgaccggcccaagcttcacgttccccagcgacgtcccataccaagctgccctcggcaccctgaatccgccattgcccccacctccactgctggctgccaccgtgctggcttcgaccccaccaggagccaccgccgcagctgctgctgccggaatggggcctcgtcctatggctgggtcaacggatcagatcgcccatctgagacctcagaccaggccctctgtgtatgtggccatctacccatatacccccaggaaagaagatgaattggagctccggaaaggagagatgtttttggtcttcgagcggtgtcaggacgggtggttcaagggtaccagcatgcacacctctaaaatcggtgtatttcctggcaactacgtggcgcctgtcacccgtgccgtgacaaatgcaagccaggcaaaggtgccaatgagcaccgccggacagacttcgcgaggggtcacgatggtcagtccttccacagcaggcggaccggctcagaaactccagggtaatggcgtggccggttcccctagtgtagtgcctgccgctgtcgtttccgctgcccacattcagacatctccccaggcaaaggtcctactgcacatgacaggtcagatgactgtgaaccaagcccgaaatgcagtgcgcacagtagccgcacacaatcaagagcgcccaaccgcggcagttaccccaatccaagtgcaaaatgccgctggactttcccccgcaagcgtgggactcagtcatcattcactggccagtccgcagccagccccactgatgccaggatccgctacccacacagccgcaatctctattagcagggcgtctgcgcctttggcctgtgcagctgccgctcccctgacttctccttctatcaccagcgcatccctcgaagccgaaccttcaggacgcattgtaactgttctgccaggactgccgacttcacctgactccgcaagttcagcctgcggaaatagtagtgccacaaaaccggataaggattcaaagaaggaaaaaaaagggcttctgaaactgcttagtggagccagcaccaagcgaaaaccccgtgtcagtccacctgcatcccctacactggaagtggagttgggaagcgccgaacttccgctccaaggtgcagtcggacccgagcttccccctgggggtggtcatggtagagcagggagctgccctgtagacggcgacgggccagtgaccacagcggtggcgggtgctgcactggcacaggacgccttccaccgtaaagctagtagcctggactccgctgtgcctatcgccccaccacctcggcaggcctgcagtagcctgggtcccgttctcaatgaaagtcggccagtggtgtgcgaaaggcacagagttgtggtgtcatacccaccgcagagcgaagccgaactcgaacttaaagaaggggatatcgtgttcgtacacaagaaaagagaagacggctggttcaagggcacattgcaacggaacggcaaaaccggactcttccccggatcttttgtcgaaaacatttag

SEQ ID NO: 27664 - DNA, 570 bp, synthetic construct
  source 1..570: mol_type = other DNA; note = Synthetic coding sequence
atgccccagaccgtcattctgcccggaccagccccttggggcttccgcctgtcagggggtatcgatttcaatcaacccctggttataacccgcattacacccggatcaaaggccgcagcagccaatctctgtccaggagatgtaattttagcaatagatggtttcggcacagaatccatgacacacgccgatgcacaagacagaattaaagccgcagcgcaccagctctgcctgaaaattgatcgaggagagacacacttgtggtcaccacaagtatccgaggatggtaaggcccatccctttaaaattaacttagagtcggagccacaagagttcaagccaataggaactgctcataacagacgcgctcagcccttcgtggcagcagctaatattgacgataagcgtcaggtagtgtcggcctcctataattccccgatcggcctctattccacctccaatattcaggacgctctgcacggacaactgcggggacttataccctcaagtcctcagaagacaggaaccaccctgaacacatctattattttcggacctaatctgtcttag

SEQ ID NO: 27665 - DNA, 1095 bp, synthetic construct
  source 1..1095: mol_type = other DNA; note = Synthetic coding sequence
atgccccagaccgtgattcttccagggccagcgccatgggggtttcgactgagcggaggtattgacttcaatcagcccttggtgataacacggatcacaccaggatctaaggcagccgctgcgaatctgtgtcctggtgatgtgatcttggctatagatggatttggaactgaatccatgacacacgccgacgcccaggacaggatcaaggccgctgcacatcaactctgcctgaaaatcgataggggcgagacacacctgtggagcccacaagtctcagaagacggcaaggctcatcctttcaagattaaccttgaatcagaaccccaagacggaaattactttgaacacaagcacaacatcaggccaaagccattcgtgattcccggtcggtcctctgggtgctctacccccagcggaatcgattgcggaagtggcaggtccacgccgtcatccgtgagtactgtgagtactatttgtcctggcgatctaaaggtagctgccaaactggcgcctaacattccactagaaatggagctgccgggtgttaagatagtgcacgcccaattcaataccccgatgcagctgtacagcgacgataacatcatggaaaccctgcaggggcaggtaagtactgcgctgggggagacccccctgatgtccgagcctaccgcctccgtgccccctgaatcagacgtataccgcatgctccatgacaaccgaaacgaaccgacccaaccacgacagagtggctccttccgcgtgctgcagggcatggtggacgatgggagtgacgaccggcctgctgggactaggagtgtgcgagcccctgtgactaaagttcacggcggtagcggaggcgctcagaggatgccactctgcgataaatgcgggtctggtatcgtaggggcagtcgtgaaggcccgtgataagtataggcatcctgaatgttttgtgtgcgccgactgtaatttaaatctcaaacagaagggctacttcttcattgagggggaactgtactgcgagactcacgcacgagccaggacgaaaccacccgaaggatacgataccgtcacattgtatcccaaggcatag

SEQ ID NO: 27666 - DNA, 951 bp, synthetic construct
  source 1..951: mol_type = other DNA; note = Synthetic coding sequence
atgccccagaccgtgatcctcccagggcctgctccttggggctttcggcttagcgggggaatcgacttcaaccaacctctcgtgatcacacgcattacacccggaagcaaagccgctgccgcaaatttatgtcctggggacgtcatcctggctattgacggcttcggcaccgagagtatgacgcatgcagatgcccaagaccgaatcaaggctgcagcacaccagctatgtctaaagattgacaggggagagactcatctctggtcaccccaggtctcagaggatggcaaagctcatccgtttaagataaatctggagtcagagccgcaggaatttaagcctatagggacggctcacaacagacgagcccagcctttcgtggcagccgcaaacatcgacgacaagaggcaggtagtctccgcaagctataacagtccgatcggactttactcaacctctaacattcaggacgcactgcacggtcagttgcgcggtctgatcccgtcatcccctcagaacgaaccgacagcatcagtcccgcctgaaagtgatgtctatcgtatgctgcatgacaatcggaacgagccaacgcaaccaaggcagtccggttccttcagagtcctgcagggaatggtggacgatggctctgatgatagacccgctgggaccaggtcagtgagggcacccgtgacaaaagtacacgggggttcaggaggcgcacagaggatgccactgtgtgacaaatgcggcagcggcattgttggtgccgtggtgaaggcccgagataaatatcgtcatcccgaatgctttgtgtgtgccgactgcaacctgaatctcaagcagaagggttacttcttcatcgagggagagttatactgcgaaacccacgcacgagctagaaccaagcctccagagggatatgatacagttactctgtacccaaaagcctag

SEQ ID NO: 27667 - DNA, 3303 bp, synthetic construct
  source 1..3303: mol_type = other DNA; note = Synthetic coding sequence
atgagttattatcagagaccgttttctccttctgcgtacagcttaccggctagccttaatagcagcattgtaatgcaacacggtactagtctggattcaacagatacctatccgcaacacgcccagagtctggacggtacaacatccagctcaatacctctgtatagatcgtccgaagaagaaaagcgagtgactgttatcaaagccccacactaccccggaatcggcccagtagatgaatcaggtatccccacagctatcagaacgacggtcgataggcctaaggactggtataaaacaatgttcaaacagattcacatggttcataagcctgacgacgacactgacatgtacaacaccccctacacatataatgcagggctgtacaacccaccttatagcgcccagagccaccctgccgctaagacccagacttaccggccattgagcaaaagtcatagtgacaacagtcccaacgcctttaaagacgctagttcccctgttcctcccccacacgtgccaccacctgttcctcccctcaggcccagagaccgtagttccacagagaagcatgattgggatccaccagacagaaaggtcgacactaggaagttcagaagtgaacctcgttcgattttcgagtatgagcccggtaagtcttcaattctacagcatgagcgccctgcctctctgtaccagagcagtatcgacaggagtttagagcgccctatgtcgtccgcttcaatggctagcgactttagaaaacggagaaaatccgagcctgcagtcggtcctccgaggggtctcggtgaccagagtgctagcagaacctccccgggtcgcgtcgatctgccgggaagcagtacaacacttacaaagtcatttacgagcagcagcccatcaagtccctccagggctaagggtggggacgactctaagatctgtcccagtctgtgttcctacagtgggcttaacggtaatccatcttctgagctcgattactgttcaacctatagacagcatctggatgtgccacgcgattccccacgcgctatctctttcaaaaacggatggcagatggccaggcaaaacgcagagatctggtcctcaacagaagagacagtctctccgaaaataaagtcccgtagctgtgatgacctgctcaacgacgattgcgactcattccctgatccaaaagtgaagtctgaatccatgggaagcctgctttgcgaagaagattcaaaagagtcttgcccgatggcatggggcagtccctacgtcccagaggtacgcagcaatggtcgatctcggattagacaccgctcagccaggaatgcccctggtttccttaagatgtacaaaaagatgcatcgtatcaatcgtaaagacttgatgaacagcgaagttatctgctcggttaaatcaaggatactccagtatgagagcgaacagcagcataaagacttactccgtgcatggagccagtgcagtactgaggaagtgccacgcgacatggtgcctacgcgtatttccgaatttgagaagctgattcagaaatctaaaagtatgcccaacctgggagatgatatgctgagccccgtgacacttgagcctccacaaaatggactgtgtccaaaaaggcgtttcagcattgagtacttactggaggaggaaaatcagtctggcccaccagcccgaggacgtagggggtgccaaagtaacgccctggttccaatccatatcgaagtcacatctgatgagcagccacgcgcacacgtggagttctctgactcagatcaggacggcgtcgtatcagaccactccgattatattcacctggaagggtcctccttctgctctgagtctgactttgatcatttcagtttcactagttctgaatcattctatggatcaagccaccatcaccatcatcaccaccatcaccaccatagacacctgataagctcatgtaagggcagatgtcccgcatcttacacccggttcacgacaatgctgaaacatgaacgcgctcgacacgaaaacaccgaagaacccagaagacaggaaatggacccagggcttagcaaactagcttttctcgtgtcaccggtgcccttcagaagaaagaagaattcggccccaaaaaagcagacagagaaggctaaatgcaaagcttcagtttttgaagctctcgactcagctctgaaggatatctgcgatcaaataaaagccgagaaaaagcgaggcagtctgccagataattctatcctccacaggctcataagtgaactgctgcctgacgtgccagaaaggaattcctcgttgagggccctgcgacgttcccctctgcaccagcccctgcacccactccccccagacggcgctattcattgccctccctatcaaaacgactgtggcaggatgcctcgctcagcctctttccaagacgtagacacagctaatagctcatgtcaccatcaggaccgcggaggtgcgctgcaagacagagaaagccccagatcttatagttctaccctcacagatatggggaggtccgcacctagggagcgcaggggaaccccagagaaggaaaaactgccagctaaggctgtctatgacttcaaggcccagactagtaaagaactttcatttaagaagggtgatactgtgtatatattgcggaagatcgaccagaattggtacgaaggcgagcaccacgggagagttgggatatttcccatctcatacgtagagaagctgacaccacctgaaaaggctcagcccgctcggcctccccctccggctcagcctggtgagatcggcgaagcaattgccaagtacaacttcaatgctgacactaatgtggaattaagcctgagaaaaggagacagagtaatactcctgaaaagggttgatcagaactggtacgagggcaaaattccgggaaccaaccgccagggaatattccctgtgagctatgtggaggtcgtgaagaagaacaccaaaggcgctgaagactatcccgacccacccattcctcactcatacagttccgataggatacatagcttgtctagcaataagcctcagcgacctgtgttcacgcacgaaaacatccaggggggtggagaaccttttcaggccctgtacaactacacccctagaaatgaggatgagttggagcttcgcgaaagtgatgtaatcgatgtcatggagaagtgcgacgatggttggtttgtgggaaccagtaggagaactaagttcttcggtacattccccggtaactacgtgaagcgcctctag

SEQ ID NO: 27668 - DNA, 4389 bp, synthetic construct
  source 1..4389: mol_type = other DNA; note = Synthetic coding sequence
atgttcaggggtccgaagcccccaatcgcccctaagcccaggttgaccgcacctaatgagtggcgtgccagtgtgtatctgaatgatagcctgaacaaatgctctaacggtcggcttccttgtgtggacagaggtcttgacgagggacctcggtctattccaaagtgtagtgagtccgaaaccgacgaggactatatcgtcgttccgagggttccactccgcgaggatgagccaaaagacgagggatccgtgggcaataaagccttagtgtccccagagagctccgcagaagaagaggaggaaagagaagagggcggtgaggcatgtgggctagaaggcactggcgcaggtgaggattcggtggctcccgcagcaccgggtgccggtgccttgtccagagagggcgaagaagggacagatctggccctggaggacgaaggggaaggttgcgcagacgaaccaggcaccctagaacaagttagcagatctgaggaagaagaaaagttggttcagccacaccgggagtgcagtctagaagattcagggccatgggccggtgagggggtatttcagagtgaccttctcctacctcatatacacggcgaagatcaagagcctcccgataccccaggggaagccgaggaggacgatgaagaaggctgtgctagtactgatcccgcaggagctgatgagggctcaggccctgatagaccgaccgaggatatggggcaggatgctgaggatacatccgaggaaccaccggaaaaggaggaactcgctggagttcaggaagcggaaaccgctaccgactgtcccgaggtcctcgaggagggatgtgaagaagccactggcgtgaccggaggtgagcaggtggatctgtcagagcctcctgaccacgagaagaagactaatcaggaagtggcggcagcaacgcttgaggaccatgcacaggacgaatccgcagaagagtcttgccaaatcgtgcccttcgaaaacgattgcatggaggacttcgtgacaagcctcacaggatctccctatgagttttttcccactgaatcaaccagcttctgttctgaatcttgcagccctctgagcgaaagtgcgaagggactggagtcagagcaagccccaaagctggggctgagagccgaagaaaatcccatggtgggagcgctctgtggccagtgcggcagtctgcagggaggcgctgcagaaggacctgctgccccagacgtcgtcgtggtgttggaagaggaagctttagatgatgccctggcgaacccctacgtgatgggggtgggcctgcccggacaagcagcgccaggcgaaggcggtcaagcagcatcagatgccctgggtgggtacggcagcaaagaggaattaaactgtgaagctgagggcggacttgtgcccgcagatagaaaaaataccagcacccgagtgcgcccacattccgggaaggtcgcgggttacgtgccagaaacagtgccagaggaaacaggccctgaggcaggatccagcgccccaggaatagggggtgccgcagaagaggtgggaaagactctactgagcctcgagggaaagcccctggaagctagtagggccttacctgccaaacctagggccttcactctgtatcctcgatctttctcagtggaggggagggagatcccagtaagcgtgtatcaagaaccagaggggagcggacttgacgaccacaggattaagagaaaagaggataacttgtccctgtcctgtgtgatagggagcagtggcagtttcagccaaagaaaccaccttcctagctctgggaccagcaccccgtcctcgatggtggatatccccccaccctttgatctcgcctgcataacaaagaagccaataacgaagtccagcccatcactgctcatagaatccgactctcccgacaagtataagaaaaaaaagtctagctttaaaaggttcctggctctgaccttcaaaaagaagacagagaacaaattgcatgttgacgtgaacgtgtctagtagtcgttcttctagcgagtcttcctaccacgggccatctcggatcctggaggtggatcggcgttccctttctaacagccctcaacttaagagcaggacaggaaaactgcgggcttctgagtccccctcaagtctgatcttctatcgggacgggaaacgcaagggagtgcctttttctcggaccgtgtcgagagtggagtcctttgaggaccggagtcgcccacccttcctgccactcccccttacgaagcctagatctatttcatttcctagcgctgacacatccgattacgagaatatccctgcaatgaattccgactatgaaaacatccagataccccctagaaggcccgctagagcaggagccttcaccaaattgttcgaagaccagagtcgggctctgtcgacagctaacgaaaacgatggctatgtagacatgagcagcttcaatgctttcgaaagcaaacagcagtccgccgaccaagatgctgaaagcgcatatacggagccttacaaagtttgccctatttcgagcgccgcaccgaaggaggatctgactagcgatgaggaacaacggtctagtgaggaggaagacagcgcttcacgcgatccatccgtgacccacaaggtagaaggtcagagtcgggcactcgttattgcacaggaactgctctcatccgagaaggcatacgtggagatgttgcagcacctgaatcttgattttcatggtgccgtcatgcgagctctggacgacatggatcacgagggacgagatactctggccagagaggagctgcggcaaggcctttcggaattgccggctattcatgacctgcaccaggggatactcgaggagctggaggagcggctgtctaactgggaatcgcagcagaaagtggccgacgtgtttctagcccgagaacaaggctttgaccaccacgcgactcatatcttacagttcgatcgctatctggggcttttatccgagaactgccttcattcccccagactggccgctgccgtcagggagtttgagcagagtgtccagggcggttcccagactgccaagcatcgcctgctacgagtggtccagcgcctctttcagtatcaggtacttctgacggactacctgaataatctgtgccctgactcagcagagtacgacaacactcaaggtgcactgtctctaatctccaaagtcacggaccgtgcgaatgattccatggaacagggggagaatctgcagaaactcgttcacattgagcattcagtgcggggacaaggcgatcttttacagccagggagagagttcctcaaggagggaacactcatgaaggtcacaggaaaaaataggcgccctagacatctgttcctgatgaatgacgtcctgctgtacacatatcctcagaaagacggcaagtatagattgaaaaatactctggccgtggccaacatgaaagtgtcgcggcctgtcatggagaaagtgccatacgctctgaagatcgagacgtcagaatcttgcctaatgctgtccgcaagttcctgtgccgagagagatgagtggtacggctgcctcagtcgtgcgttgcccgaggactacaaagcacaggcactcgcagccttccaccactcagtcgaaatcagagaaagactgggggtgagcctgggggaacgaccgcctaccctggttcctgtgactcacgtgatgatgtgcatgaattgtggttgcgacttttcccttaccctgcgcaggcatcactgccacgcctgtggcaagatcgtgtgcagaaattgcagcaggaacaagtacccccttaagtatttgaaagatcgcatggcgaaagtgtgcgatggttgtttcggcgagctcaagaagcgcggtagggccgtgccgggactcatgcgcgaacgcccagtcagcatgtcattcccactttcttccccaagattttctggttccgccttctccagtgtctttcagtcgataaaccccagcacatttaaaaagcagaaaaaggtgcctagcgcgctcacagaggtggcagccagcggggagggcagcgccatttcaggatacctgtccaggtgcaaacgtggaaagagacactggaagaaactttggttcgtgatcaaggggaaagtgttatatacatacatggcttccgaggacaaagtagctctggagtctatgccactgctcggatttacaatcgcacctgagaaggaggaggggagctccgaagttggccctatctttcacctgtaccacaagaagacattattttattccttcaaggccgaagacacgaactcagctcagcgatggatagaagcaatggaggacgcctcagtcctgtag

SEQ ID NO: 27669 - DNA, 768 bp, synthetic construct
  source 1..768: mol_type = other DNA; note = Synthetic coding sequence
atggccagctccgacttggagcagttgtgtagtcatgtcaacgagaagatcggcaacatcaaaaaaacgctgtcccttcgaaactgtggccaggaacccaccctcaagacggtcctcaacaagataggcgatgagatcattgtgataaacgaattgctgaataagctggagctggaaatccaatatcaggagcagaccaataacagcctaaaggaactgtgcgagtcactcgaggaggattacaaggatatagagcaccttaaggagaatgtgccctcccaccttccccaggtgacggttacacagtcctgcgtgaaaggttcagatttggacccagaggagcccattaaggtcgaggagccggagccagttaagaagcctcccaaagagcagagatcaattaaagaaatgcccttcatcacttgcgacgagttcaatggtgtcccaagctacatgaagagccgcctaacctacaatcagattaatgatgtgatcaaagaaatcaacaaggcagtgatttccaaatataaaatcctgcatcagcccaagaagtctatgaatagcgtgacacgtaacttgtatcaccgtttcatcgacgaggagactaaagataccaagggccgttacttcatcgttgaagctgatattaaggagttcacaactctgaaagccgataaaaaattccatgtgctactgaatatactccgacactgcagaaggctgagtgaggtgcgcggtgggggtttgacaaggtatgtgataacctag

SEQ ID NO: 27670 - DNA, 627 bp, synthetic construct
  source 1..627: mol_type = other DNA; note = Synthetic coding sequence
atgtcagccggaggcgatttcggcaatcccttgaggaagtttaaacttgtgtttctgggcgaacagtccgttgggaaaacaagtctcatcacacgtttcatgtacgatagcttcgacaacacctatcaggccacaattggcatcgacttcttgtccaaaaccatgtacctggaggaccgcaccgttcgtctccagctttgggatactgcaggacaggagaggttcagatctctgatcccctcttatatcagagattccacagtagcagtagtggtttatgacattactaacctgaatagtttccagcaaacctctaaatggatcgatgacgtgaggactgagagggggagcgatgtgattataatgctggtggggaataaaaccgacctggccgataagaggcagatcaccatagaggagggagaacaaagggccaaggagctttccgtgatgttcattgaaacctcggcaaaaactggatacaatgtaaagcaattattccgccgagtggcatctgccctgccgggaatggagaatgtgcaggagaaatccaaagagggcatgatagatatcaagctggacaagccacaggagccgccagctagcgaagggggatgtagctgctag

SEQ ID NO: 27671 - DNA, 3168 bp, synthetic construct
  source 1..3168: mol_type = other DNA; note = Synthetic coding sequence
atgacagtagagcagaatgtgctgcagcaaagtgccgctcaaaaacatcagcagaccttcttaaatcagctgcgcgagattaccggtatcaatgatactcagatcttgcagcaggccctgaaggattccaacgggaatcttgaactggccgtggcttttctcactgccaaaaatgcgaagactccacaacaggaagagacaacatactaccagactgccctgccgggtaatgatcgatatatttctgttggaagccaggcggatactaacgtgatagatctaacaggcgacgataaggatgatctccagagagccatagccctgagcttggctgagtccaatagagcctttcgtgaaacaggcatcaccgacgaggagcaggcaatctccagggttctcgaggcctccattgctgaaaacaaggcgtgcctcaagcgcactcccaccgaggtctggcgggactcccgaaacccttacgaccgcaagcgccaagacaaggcccctgtaggacttaagaacgttggcaacacgtgttggttttcagccgtgattcagtccctgttcaacctgctggagttccgcaggctggtactgaattacaaacccccatctaacgcgcaggacctgccacgaaatcagaaagagcatcgtaacttaccttttatgagagagctcaggtatctattcgcactcctagtgggcaccaagcggaaatatgttgacccctctcgggcagtggaaattctcaaagacgcttttaaatcaaacgactcccagcagcaagatgttagcgagtttactcataaactgctcgactggctcgaagatgcctttcagatgaaagcagaggaagaaacggatgaggagaagccaaagaatcctatggtggagttattctacggacgcttcttggccgtgggagtgcttgaagggaagaaattcgaaaataccgagatgttcggccagtaccctttacaagtgaacggtttcaaagaccttcatgaatgtctggaggcggctatgatagagggagagatcgagtccttgcatagtgaaaatagcggcaagtccggtcaagaacactggtttaccgaattgccgcctgtattgactttcgagcttagccgcttcgaattcaaccaggcactgggtcggcctgagaaaattcataataagctcgaatttcctcaggtcctgtacctggatagatacatgcatcgtaatagagagatcacccgcatcaaacgcgaagagatcaagaggctaaaagattatctgactgtgctccagcagcgactcgaaaggtatctatcttatgggtcggggccaaagaggtttccgctggtcgacgtgctgcagtatgccctcgagtttgcaagcagcaagcccgtctgcacaagtccagtagacgacatcgatgcttctagcccgccatccggtagcatcccatcacagaccctcccctctaccacagagcagcagggtgctctcagttcggagctgcccagcaccagcccctcgagtgttgccgctatcagtagcagatccgtcatccataaacccttcacccaatcccggatacccccagatttaccaatgcatccggctccacgccacatcacagaggaggagctgtcggtgttagagagttgcctccacaggtggaggacagagatcgaaaacgacaccagagatctgcaggagtccatttcccgcatacacaggacgatagagctcatgtatagtgataagagtatgatccaagtgccctatcggcttcatgccgtccttgtgcacgagggacaggccaacgctggccactattgggcttacatttttgaccatcgggagtctcgctggatgaagtacaacgacattgcagtgactaagagttcttgggaagaactcgttcgagatagcttcggaggataccgtaatgcctccgcttactgcctgatgtacattaacgacaaggctcagtttctgatccaggaagaatttaacaaagagaccggtcagccgctggtcgggattgagacccttccacctgacctgcgcgacttcgtcgaagaggataaccagaggtttgagaaggagttggaggagtgggatgcgcagctggcccagaaagctcttcaggaaaagctgttagcttctcagaagcttagagaatccgagacatcagttactactgctcaggctgccggtgatccagagtacctggagcaaccctcccgatcagacttttcgaaacacttgaaggaggagaccattcagattatcacaaaggcctcacatgaacacgaggacaagtccccagaaaccgtgctgcagagcgccattaaattggaatatgcaaggctcgttaaactcgcccaggaggatactccccctgagacagactatcggctacatcacgtggtggtatacttcattcagaatcaagccccaaaaaagatcatcgagaagaccttactggagcagttcggcgaccggaatctaagttttgacgagcggtgtcacaacataatgaaggtcgcccaagctaagctggagatgatcaagccagaagaggtgaacctggaagagtatgaggagtggcaccaggattatagaaagtttcgggagacaactatgtatctgattattgggttagagaacttccagcgggaaagttacatagacagcctactgtttctaatttgtgcttaccagaataataaggagttgctgtccaaggggctctataggggacacgacgaggagttaatctcacactaccgccgtgaatgcctactgaaactgaacgagcaagccgctgagctttttgagtccggggaagacagggaggtcaacaacgggctgattattatgaatgagtttatcgtgcctttccttcccctactgctggtagatgaaatggaggaaaaagatatccttgccgtcgaagatatgcgtaatagatggtgtagttatttgggtcaggaaatggagccccacttacaagaaaaactgaccgatttcctcccaaaattgctggattgttccatggagatcaaatcgttccacgagcctcccaagttgccgagttacagcacacacgaactctgcgaaaggttcgcccgtattatgctctccctctctcggacacccgctgatgggcgatag

SEQ ID NO: 27672 - DNA, 3264 bp, synthetic construct
  source 1..3264: mol_type = other DNA; note = Synthetic coding sequence
atgactgtcgagcagaacgtcctacagcagtccgcggcacagaagcaccagcagaccttcctgaaccagctgcgggagattaccggaatcaacgacacacagattctacaacaggccctcaaggacagtaatggcaatcttgagttagccgtggcctttctgacggccaagaatgcaaagacgcctcaacaagaggagaccacctattaccagacggccctaccgggaaatgaccggtacatcagcgttgggagccaggcagacacgaatgtgattgacctgactggtgatgataaggatgatctgcagagagcaattgccttgagcctagccgagtcaaaccgggcttttagggaaactgggatcacagacgaggaacaagccatcagcagggtgctcgaagcctctatagccgagaacaaggcctgtctcaagagaaccccgactgaggtgtggcgcgacagccgcaacccgtatgacagaaaacggcaggacaaagccccagtcggactaaagaatgtgggcaatacatgctggtttagcgctgtgatccagtcattgttcaatttgctggaattccggcgtttagtgttgaattataaaccgccatccaacgctcaggacctcccaaggaaccagaaagaacataggaacttgccgttcatgcgtgaattgaggtatctgtttgcgttgttggtcgggacgaagagaaagtatgtcgacccctcccgagctgtcgagattctaaaagacgctttcaagagcaacgacagtcagcaacaggacgtctcggaattcacccacaagctgcttgattggttggaggatgccttccagatgaaggcggaagaggagacggacgaggagaagccaaagaacccaatggtggaactgttctacgggagatttcttgccgtaggggtactagagggtaaaaagtttgagaacactgaaatgtttggccagtacccactccaggtcaatgggtttaaggacttgcacgagtgtttagaggcagccatgatagaaggtgaaatcgaatctctacactccgaaaactctggcaaatctgggcaggaacactggtttacagaactaccaccagtcttaactttcgagctcagtcggttcgagttcaatcaggccctcggcaggccagaaaagatccacaacaagcttgaatttccccaggtgctctacctggaccgctatatgcaccgtaacagagaaatcacccgcattaaacgcgaagaaatcaagcggctgaaagattatctcaccgtgttgcagcagagattggagcgttacctgtcatatggtagcggccctaagcgtttcccgttagtggatgtcttgcagtatgctctggaattcgcatcctcaaagcctgtatgtacgtcccccgttgatgacatagacgccagctcaccgccaagtgggtccatcccatctcaaacactgcctagtactaccgaacagcagggcgcactgtcaagcgaattaccttccacatctccttcctctgtcgcagctatttcaagtcgtagcgtaattcataagccatttacccaatcccggattcctcctgacctacccatgcatcctgctcctcgccatatcactgaagaagagctgtcagtactcgaaagttgtctgcatcgatggcgcacagagattgaaaacgatacacgcgacctgcaggagtccatctcacggatccatcgcaccatcgagctcatgtattctgataaatccatgattcaggtaccctatcggctgcacgctgtattagtccacgaaggccaggctaatgcaggccactattgggcatacatttttgatcaccgtgaaagccgttggatgaaatacaatgatattgccgtcacaaagtcatcttgggaggagctcgtgagagattcctttgggggttatagaaacgcttctgcgtattgcctgatgtacataaacgacaaggcgcaatttctgattcaggaagagttcaataaggagactggccagccgctcgtgggtattgagacactccctcctgatctgagggacttcgtagaagaggacaatcagcgtttcgagaaagaactggaagagtgggatgcacaactcgctcaaaaagctctccaagagaagctgctggccagccagaagctgcgtgaatctgagaccagtgttacaacagctcaggccgctggggacccggagtatctcgagcagccctctcgatccgacttttctaaacacctgaaagaggaaactattcagatcataaccaaggcctctcacgagcatgaggataagagccccgaaactgtgctgcagagcatcatgatgactccaaacatgcagggaatcatcatggccatcggtaagtccagaagcgtttacgatcggtgtggacccgaagctggttttttcaaggctattaagttggaatacgccaggctggtgaaacttgctcaagaagacacgcccccagagacagactatcgactgcaccacgtcgtcgtgtactttatccaaaaccaggctccgaaaaagataatcgagaagaccctgttggagcaattcggagaccgaaatctatcattcgacgagaggtgtcataatattatgaaggttgcccaagcaaagctggaaatgatcaaaccggaagaggtcaatcttgaggagtacgaggaatggcatcaagactaccgaaagtttcgggaaacaacgatgtatctgatcattggcctcgaaaactttcaaagagaatcatatatcgatagtctcctgttcctcatctgtgcatatcagaacaataaagaactgttaagcaagggtctgtaccgcggacacgatgaggaactcattagccattatagacgggagtgcctgctgaagctgaacgaacaggcagccgaactcttcgagagcggagaggatagggaagtgaataacggcctgatcattatgaatgagtttattgtaccttttctgcccttgttgttggtcgatgaaatggaagaaaaagatatattagccgtggaggatatgagaaacaggtggtgctcctacctgggacaggagatggagcctcacctacaggagaagctaacagattttctaccaaagcttctggactgcagtatggaaatcaagtcttttcatgaaccacccaagctgccctcctattcaactcacgagttgtgcgagagattcgccaggataatgctatctctctcgcgaaccccagcagacggcaggtag

SEQ ID NO: 27673 - DNA, 2559 bp, synthetic construct
  source 1..2559: mol_type = other DNA; note = Synthetic coding sequence
atgtcctctgtcagtcccattcaaatacctagtcgcctgcccctgctcctgacccacgaaggcgttctcctacccggaagcacaatgcgtaccagcgtcgacagcgcacgcaacctgcaactggtgagaagccggctgttgaagggtaccagcctgcagtccactattctcggtgtaattccaaataccccagatcccgcatcggatgcccaggacctgccgccactccacagaatcggcacagccgctctagccgtgcaagtagtcggatccaactggcccaaaccccactatactctactcattacaggactatgtcgcttccagattgtccaggttctcaaagagaaaccgtaccctattgcagaagtggagcagctcgacagactcgaagagttccctaacacctgtaagatgcgtgaagaactgggggagttatcagagcagttttacaagtatgctgtgcagctggtggagatgttggacatgtcagtcccggcagtggccaagcttcgtaggttgttggacagtctccccagggaggcccttccagacatcctgacttctattatccggacctccaataaagagaagctgcagattctagatgcagttagcctggaagaacgctttaagatgaccatcccactactggtgcgtcagatcgagggactcaagttgctgcagaaaacccgcaagcccaagcaggatgatgataagagagtcatcgccatcaggcccattcgtcgtataacacatatctcaggaaccctggaggacgaggatgaagacgaggacaacgacgatattgtcatgctcgaaaagaagatccggactagctcaatgcccgaacaggctcataaagtttgcgtcaaggagattaagagactcaagaaaatgccccagtccatgcctgagtacgcgctcacccgaaactatttggaactaatggtggaactcccctggaacaagtccactaccgatagattggacattcgagcagctaggattcttctcgataacgatcattacgctatggagaagctgaagaaacgcgtgctcgaatatctggccgtacggcagctgaagaacaatctaaaagggccaatcctgtgtttcgtcggccctccaggagtcggtaaaactagcgtcggccgatccgtagccaagactctgggacgggagttccaccgcattgccctcggcggagtttgcgaccagagtgacatcaggggtcatagacggacgtacgtgggaagcatgcccggacggataatcaatggcctaaagactgtgggtgtcaacaatccagttttcctcctcgacgaggtcgataagctcggcaaaagcctgcaaggggaccctgctgcggctcttttagaggttctggaccccgaacaaaatcacaatttcacggaccattacctgaacgtagccttcgatctctcacaggtcctgttcatcgctaccgctaacacaacagccaccatcccagctgccctacttgatagaatggagatcatccaggttcccggatacacccaggaggaaaaaatcgagatagcgcaccgccacctcatacctaaacagctcgagcaacatggactgacccctcagcaaatacaaatccctcaggtcactactctagacataataaccagatatacacgagaagccggtgtccgttccctggacagaaagctgggggcaatctgtcgagccgtggcagttaaggtggctgagggccaacataaggaggcaaaactagaccggtccgatgttactgaaagggagggatgcagagagcacatcctggaagacgaaaaacctgaatccatttctgacacaacagatttagccctcccacccgagatgcccatcctgattgacttccatgcgcttaaagatatccttggcccacctatgtacgaaatggaagtatcccagcgcctgtcacagcctggcgtggccatcggccttgcttggacccccctgggcggagagataatgtttgtagaagcctctcgcatggacggggaggggcagctgactttgacaggtcagttaggtgacgtcatgaaagaatccgcgcacctagccatttcctggttacggtcaaacgcaaagaaatatcaactgacaaatgcattcggctcattcgacctcctcgataacacagacatacacttgcattttccagctggtgccgtgaccaaagacggtccctctgccggagtgactattgttacatgcttggcctccctcttttctggccgactggtgcggtccgatgtcgctatgacaggagagataacacttcggggactggtgctgcccgtggggggaattaaagacaaagtgctcgccgctcacagggccggtttgaagcaggtgattatccctcggaggaacgaaaaggacttagaaggaataccagggaatgtccggcaggacctgagtttcgtaaccgccagctgtctggacgaagttctgaacgccgcattcgacggcggattcactgtaaagaccagaccaggactactcaattcaaaattgtag

SEQ ID NO: 27674 - DNA, 390 bp, synthetic construct
  source 1..390: mol_type = other DNA; note = Synthetic coding sequence
atggctgatgggggagggggagggggtacaggcgctgtcggtgggggaggcacaagccaggccagtgctggtgcagcaaccggcgcaacaggcgcttctggagggggtgggcctatcaacccagcttctctgccccctggggacccgcagctgattgccctgatcgtggaacagctgaaaagtcgcggattgttcgactcgttccgcagggactgtctcgctgacgtcgatacgaaaccagcataccagaatcttagacagaaggtggataacttcgtcagtacacacctggacaagcaggaatggaacccgaccatgaataaaaaccaactgcggaacggtctgaggcagtctgtcgttcagatacgccaaactccctttgaatcatag

SEQ ID NO: 27675 - DNA, 1425 bp, synthetic construct
  source 1..1425: mol_type = other DNA; note = Synthetic coding sequence
atggatgaggctggcagcagcgcctccggcggtgggtttcgccctggcgtggactccctagacgaaccccctaatagccgaatatttctcgttatttccaagtacacaccggagtccgtattgcgagaacgtttttctccgttcggggacattcaggatatctgggttgtccgagataagcacacaaaggagtcaaaaggtatcgcctttgtcaagttcgctaggtcgtctcaggcctgtcgcgcaatggaagagatgcacggacaatgtttgggtccaaacgacacaaagcctattaaggtctttattgctcagtccaggagttctggtagccaccgcgacgtagaggacgaagagctcactaggatattcgtgatgatcccaaagagttatactgaagaggacctgagagagaagttcaaggtctacggagacatagaatattgcagtattatcaagaataaagtcaccggcgagtccaagggactcggctacgttagatacctgaagccctcacaggctgcccaggccatagagaactgtgacaggagctttagggcaattctggcagaacctaaaaacaaggcctccgagagctccgagcaggattactacagcaatatgcgccaggaggctctgggccacgagccgagagtgaatatgttcccgttcgaacagcaatccgagttttcttccttcgacaaaaacgactccagagggcaagaggcgatttccaagcgcctcagcgtggtaagcagggttccgttcaccgaagagcagctgttttcaattttcgacatagtgcccggtcttgaatactgtgaggtgcagcgggacccgtattctaattatgggcatggtgtggtccagtactttaatgtggccagcgcaatttatgccaaatacaagctgcacgggtttcagtatccgcctggaaaccgcatcggggttagctttattgatgatggctccaacgccactgacctactccggaagatggccacgcagatggtggccgcacagctcgcatccatggtatggaacaatccatctcaacaacagttcatgcagtttggaggaagctctggcagccaactgcctcaaattcagactgacgtggtcttacccagttgcaaaaaaaaagcgccagctgagacgccggttaaggagagactctttatcgtcttcaatccacatcctctgcccttagacgttcttgaggacattttttgtcgatttggaaacctgatcgaagtgtaccttgtgtcaggtaaaaacgtggggtacgcaaaatacgctgatcgaatttcggcaaatgacgcaatcgctaccctacacgggaaaatcctaaatggagtcagactcaaagtcatgcttgcagatagcccgagagaggaaagtaacaaacgccagcggacttactag

SEQ ID NO: 27676 - DNA, 1938 bp, synthetic construct
  source 1..1938: mol_type = other DNA; note = Synthetic coding sequence
atgaggcccagaaaggcattcctcctgctcctgttgcttggactcgtgcagctcctagccgttgccggtgccgagggccctgacgaagattcctccaatcgggagaacgctatcgaggatgaagaagaggaggaagaagaggacgatgatgaggaggaagacgacctggaggtgaaagaggagaatggagtgctcgtgctgaacgacgccaatttcgacaactttgtagctgacaaagacacagtgctcctcgagttctatgctccgtggtgcggtcattgcaaacagttcgctcccgagtacgagaagatcgctaatattctcaaggataaggatccacccatccctgttgcgaagattgatgctacatcagccagcgtgttggcatctaggtttgatgtttccgggtatccaacaattaagatcctcaagaaagggcaagccgttgactatgagggcagccggacccaggaggagatcgtcgcaaaagtccgcgaagtgtctcagccagattggacacccccacccgaagtcactctggtgctcactaaagagaattttgatgaggtcgtgaacgacgccgacatcatcctcgtggaattctatgccccttggtgcgggcactgcaagaaactggcgcctgaatacgaaaaggccgctaaggagctctctaagagatccccgccaattcctctcgccaaagttgatgccactgcagagaccgacctagccaagcgttttgacgtctcaggataccccaccctgaagatcttcaggaaaggacgcccttacgattataatggcccacgagaaaagtatggcatcgtggactatatgatcgagcagtccggcccaccctccaaggaaatcctcacactgaaacaggttcaggaatttttaaaggatggtgatgatgtgatcattattggcgtgttcaagggcgagtcagatccagcgtaccaacagtaccaggatgctgccaataatctccgcgaggattataagttccatcacaccttttccactgagatcgccaaatttttaaaagtctcccaaggacagctggttgtgatgcagcctgagaaatttcagagtaagtacgaacccaggtcccatatgatggatgtgcagggtagtacgcaggacagcgcgattaaggactttgttctcaaatatgccctaccactggtggggcatcggaaggtgagcaacgacgccaagagatatacaaggcgcccactggtggtggtgtactatagcgttgatttctccttcgattatcgtgccgcaacccagttttggcgctcaaaagtgctggaggtcgctaaagatttcccagagtatacctttgcaattgctgacgaagaagactacgctggcgaggtgaaagatctgggcctttctgagtctggggaagacgtgaacgccgctatcttagacgagtctggaaagaaattcgctatggaacccgaggagttcgactccgacactctccgcgaatttgttacagcttttaagaagggtaaattgaaacccgttatcaagtctcagcccgtgccaaagaacaataaagggccagtcaaggtggtggtgggcaagaccttcgattctattgtgatggaccctaagaaggatgtacttatcgagttctacgccccttggtgcggccattgcaagcaactcgagccagtgtataactccctggccaagaagtacaagggccagaaggggttggtgatcgccaagatggacgctaccgctaatgacgtgccctcagacagatacaaagtagagggtttcccaacgatatatttcgcgccatcaggggacaagaagaaccccgtaaaattcgaagggggtgatagagatctcgaacatttgagtaagtttatagaagagcatgccaccaagctcagtcgaaccaaagaagagctctag

SEQ ID NO: 27677 - DNA, 1338 bp, synthetic construct
  source 1..1338: mol_type = other DNA; note = Synthetic coding sequence
atgtaccctaacccattaatttactgcacatgctgggatccatggaatcttgggccaaggaaattgatcaagactccacaactgccgcgtaagaactcaacagggagcagcaaactcacaccgctggtgccggcacccaagaaccacaactacctgcagcccacaaaaccggttgtgagcccaaaaatgaagattcactctgcccgacaagaagagactaacaagagcttttacgaagtgatcaatgtttcccctgggtaccaactggtgagaaatcgtgaacaaatatctgtgaccctcggcgacgaaatgttcgatagaaagaaaaggtgggaatccgaaatccctgacaagggacgcttctctcggaccaacatcatatccgatcttgaagaacagatatctgagcttacagcaatcattgaacagatgaacagagaccatcaatctgcacaaaaactgttatctagtgaaatggacctgaggtgtgccgaaatgaagcagaactttgagaataaaaaccgggagctgaaagaggcacacgaggcagaactctcagaattagaaaataattataaagccgctctgaaggcagagaagctggccgcacaggaaaagctcgaggagatgggcaaagaatacaaatatctgaaaaatatgtttaggacgtaccaagactcgatctatgacgaaatggaggagaagtggtccaaacagaaagcaaagtggaagaaggacgaaaagtttgaaagagagaacatcctattgcagcaaaagaagaagatgacaaagaagttcgagatggaaagcggcgaagaagataaaaaaatcaacgaaagctgctcagctgtattcgagaattttattcaggagaaagaagaactgttgaaacagcatcagtccgacaccctccagttggaagagctgcgcaagacaaaagaggtaccttggaggcgcgaccagatcaaccgccactggcacgatgtgctgcaacagctgctgctgatgcaagtgatgcaggaagagttgcatgcccaggctctaatactcgaaagtttgaatacgaacctgtactacacccagctcgagctgcagaaggagaaggcaatcgtggggaatctcgagaagatgctacagacgaagttcgcggaaactgaggagaagtataaacatactattcagatcctgaccgaggagaacatccacctcaaacagaagattatcagcaaaaacgaggagatttgtgagggttgttctggccgattggctagcatcaccgtgtctaaggacgactcagatactgtccaagacggttctaagaaaggacaggaaagttag

SEQ ID NO: 27678 - DNA, 1872 bp, synthetic construct
  source 1..1872: mol_type = other DNA; note = Synthetic coding sequence
atggagcctccccaagaaaccaatcggccttttagcacgctggacaaccggagtggacaggtgcaagtgctgagcgccacccccctgctccagaggaacccttattccagcccggacattatgcatataaaggggagcgaagcctctagtgtgccctatgccctgaaccaggggaccactgccctgccgaagaataaaaaccaggaaggaaccggacaccggctgctaaacatgctcagaaagacccttaaggaatccgattcagaagaactggagatcacccaggaaacccccaacctcgtccctttcggggatgtcgttggttgcctggggatacatattaagaattgtagacatttcatgccgaagatctctttacagcactatgctaatctgttcattagaatttcaattaataaagccgtcaaatgcacaaaaatgtgctctctgctatctaaaaacgatgaaaaaaatactgttataaagttcgacgaggtgaagtacttcagcgttcaggtgcctcgcaggtatgacgataagcgaaataatatcctactagagctgatccagtacgataatagggaaaaacgagcgttcctgctgggtagtgtgcagatccatctgtacgaagtaatacagaagggttgtttcatcgaggaagtgcaggtcctgcacggaaacatctttgtatgcaggctcgaggtcgagtttatgttcagttacgggaattttggatacgggtttagccaccagctaaaacccctgcagaaaattacagagccctcaatgtttatgaatctggcccctccccctgagcgcactgacccagtcaccaaagtcataacgccgcagacagtggaatatcccgctttcctatccccagacctcaatgtcaccgtcggaacccctgcagtgcagtcctccaaccagccaagtgtggtcaggctggaaaagctgcagcagcagcctagggagaggctggagaaaatgaagaaagagtatcggaacctcaacacatggattgataaagctaactacttggaatcaattttaatgccgaaactcgagcataaagacagcgaagagactaacatcgacgaagcctctgagaatactaaatcgaaccatcccgaggaggaactagagaatattgtcggggtggacataccgctcgttaatgaagaagccgagactaccgccaatgagctgctcgacaacgatagtgaaaagggactgactataccgacactgaaccagtccgaccaggataatagcacagccgatgccagcaaaaacgatgagtccacaccatccccgacggaggtgcacagtctgtgtaccattagtaaccaagagactatcaaagcagggagaattcctccgctaggagaacgtcagagcgagagtatgcccgaccgaaagatgaaaaacgtcttcttccccctcgaggttaagctaaaagacaactatccctccatcctcaaagcagactcttctttgtctgaggttgccttctccccaaaggagtataattctcctagcttccggcctgagtacatcgaattcaaaccgaagttccaggactgttccgacaagttcgaagacctccatgatatgactagttttacccatctgaaaaaagtcaaaagccggagcaggctgttgggtaagtcgtccgacgatatccacaatcacgctaggcacagcgctcgaccatacaccgccccagaagtgaacaaacagagggagtcctacagtgggaagtttacctccagacggatggtgagcagcggcctggttcacataaacgacaaaacctccgactacgagatgcacaaaatgcgacctaagaaaataaaacggggatactag

SEQ ID NO: 27679 - DNA, 3594 bp, synthetic construct
  source 1..3594: mol_type = other DNA; note = Synthetic coding sequence
atgcatattaaaagtattatccttgagggattcaaatcatatgcacagagaactgaggtcaatggattcgaccccctcttcaatgccattacgggcctgaacggcagcggtaagtctaacattctggacagtatttgtttcttactgggaatctccaacctgtcacaggtgcgtgcgtcaaatctgcaggatctcgtgtataagaatgggcaggctggcatcaccaaggccagcgtcagcattaccttcgataattctgataaaaaacagtcaccactggggtttgaggtgcacgatgaaattacagttacgcgccaagtggttatcggtggaaggaataaatatctgatcaatggggtaaatgccaataatactcgcgtgcaggaccttttctgctcggtgggcctgaacgtcaacaatcctcactttctgattatgcaaggaagaatcactaaagtgctaaatatgaagcccccagagatcctgtcgatgatcgaggaagcagcaggcaccaggatgtacgaatataaaaagatcgcggcacaaaaaactattgagaagaaggaagccaagcttaaggagataaaaaccattctcgaagaagagatcacccctaccatccagaagctcaaggaagaacgctctagttacctggagtaccagaaagtgatgagagaaattgaacacctttctcggctgtacattgcctatcagtttctgctagccgaagacactaaggtacggtcagcagaggagttgaaggagatgcaagataaggtgatcaagctgcaggaggagctctctgagaacgataaaaagatcaaggctctcaaccatgagattgaagagcttgaaaaacgcaaagacaaagaaactggtggcatcctgcgctctctggaggacgccctagccgaggctcagcgcgtcaatacaaaatcccagtcggcattcgacctcaagaagaaaaatctggcatgcgaagagagcaagcggaaggagctggaaaagaacatggtggaagattcaaagacattggccgcaaaagaaaaagaagtgaagaagattactgacggcctgcacgccctacaggaagcttcgaacaaggacgccgaagctctggctgcggcacagcagcactttaacgccgtcagcgcaggcctgtcctcaaatgaagacggtgcggaggccacactagcaggccagatgatggcctgcaagaacgatatttccaaagcccagaccgaggccaagcaagctcagatgaaactgaagcatgcccaacaggagctcaaaaataagcaggcggaagtcaaaaagatggattcaggctacaggaaagaccaggaagcacttgaggccgtgaagcgattaaaagagaagctggaggccgaaatgaagaagctgaactatgaggaaaacaaggaggagtctctgctggaaaagcggagacaactatctcgcgacatcgggcgactgaaagagacgtacgaggccctcttagcccgatttccgaacctgaggtttgcatataaagaccctgagaaaaactggaacaggaattgtgtcaagggcttggtcgcatcactgatatcggtcaaggacaccagtgccacaaccgcgctggaactggtcgccggagaacgtctgtataacgtggtggtcgacacggaagtgacaggaaagaaattactggaacggggtgagctgaaaagaagatacactatcatcccgctaaacaaaatttccgccagatgcattgctccagagaccctgagagttgcccaaaacttggtcggcccagataatgttcatgtggccctctctctggttgagtacaaaccagagttgcaaaaagcaatggaatttgtctttggcaccacattcgtatgcgataacatggacaatgccaaaaaggtcgcttttgacaaaagaattatgacacgcaccgtgaccttggggggagacgtatttgatccccatgggacactctcggggggagccagaagtcaggcagcctccatcctgactaagtttcaggaattgaaggatgtgcaggatgagctgcggattaaggaaaacgaactgcgtgcgcttgaagaagagctcgcagggctcaagaatacggcagaaaagtatcgccaactgaagcagcaatgggagatgaagaccgaagaggcagatttgctccaaacgaaactgcagcagtccagttaccataagcagcaggaagaactcgatgccctcaaaaagacaatcgaggagagtgaggagaccttaaagaataccaaagagattcaaaggaaggcagaggagaagtatgaggttctggagaacaagatgaagaacgccgaggcagaacgggaacgcgaactaaaggatgcacagaaaaagctcgattgcgctaagacaaaggcagatgcctccagcaaaaagatgaaagagaagcagcaagaagttgaagcaataacgctcgagctggaggagcttaagagagaacacacgagctacaagcagcagctggaggccgttaatgaagctatcaaatcatacgaaagccagatcgaagtgatggccgctgaggtagccaagaacaaagagagtgtcaacaaagcacaggaagaagtgaccaagcaaaaagaggtgattacggcccaggataccgtgatcaaggccaaatacgcggaggtggcaaaacacaaggagcagaataatgacagccaactcaagatcaaggagcttgaccataacatttctaagcacaaacgtgaggcagaggatggtgccgctaaggtgagtaagatgcttaaagactacgattggatcaatgccgaaaggcacctatttggccagccaaatagtgcatacgacttcaagaccaataacccgaaagaggctggccagcgtctgcaaaagctgcaggagatgaaagaaaaactcggacggaacgtgaatatgcgggctatgaacgttctaaccgaagccgaggagaggtacaatgatcttatgaagaaaaagcggatcgtggagaacgacaaaagtaaaatccttaccaccattgaggatcttgaccagaaaaagaatcaagctttgaacattgcttggcagaaagtgaataaggattttgggagcattttcagcacccttcttcccggtgcaaacgctatgttggctcccccagaggggcagaccgtgttggatggactggagtttaaggtggccctgggaaatacttggaaagaaaatctcactgaactctccgggggacagagaagcctggttgctctctctctcatactgagtatgctgctcttcaaacctgcccctatttacattctagacgaggtggatgccgcactggatttatcgcacactcagaatattgggcagatgctccgcacacatttcactcactcacagttcatagtcgtcagtctgaaggagggaatgttcaacaatgccaacgtcctatttaagacgaagttcgtcgacggggtgtcaactgtggctcgcttcactcagtgtcaaaatggcaagatatccaaggaggcaaagagtaaggccaagccgcctaagggtgcacatgtcgaggtgtag

SEQ ID NO: 27680 - DNA, 1080 bp, synthetic construct
  source 1..1080: mol_type = other DNA; note = Synthetic coding sequence
atgcggaccgctgatcgcgaggcccgacccggtctaccaagccttctgctcctcttgctagctggtgccggattgagtgccgcaagcccgcctgcagctccacgatttaacgtgtccttggattctgtgcctgaactgcggtggctgccagtgctccgccattatgacctagatctggttagggcagccatggcacaggtgatcggcgatcgggtacccaagtgggtccacgtcttgatcggtaaggtggtgctcgaacttgaaaggttcttaccccagccgttcacaggtgagattaggggcatgtgcgactttatgaatctcagcctcgcagactgcctgctggtgaacctcgcttatgaaagttcggtgttttgtacttccatcgttgcccaagactcgcgagggcacatctatcacgggcgaaacttagactatccgttcggcaatgtgctgcgaaagttgacagtggacgtccagttcctgaagaatggccaaatcgcctttactggaaccacattcattggatatgttggcctctggactgggcagtctccacacaaatttaccgtctctggggacgagagggataagggatggtggtgggaaaacgctattgcagcactgtttcgccgtcatattcccgtctcctggctcatcagagctactctctcggagtctgagaacttcgaggcggctgtggggaaactcgccaagacccctttgatagctgacgtgtactacattgtgggaggcacgagccccagggagggagttgtgattacacggaacagagacggacctgcagatatttggccattagaccctctgaacggggcttggtttagagttgaaacaaattatgatcactggaagcccgctccgaaagaagacgataggcgcacctctgcaattaaggccctaaacgccactggtcaagcaaacctctcgctggaggctctgttccagatcttaagcgtggtccccgtctacaataatttcaccatttataccactgttatgtctgccggttcaccagacaagtatatgaccaggatccgaaatccttcacggaaatag

SEQ ID NO: 27681 - DNA, 1647 bp, synthetic construct
  source 1..1647: mol_type = other DNA; note = Synthetic coding sequence
atggccctccacgttcccaaggccccaggattcgcacagatgctcaaagaaggagcaaagcactttagcggtttggaagaggccgtttaccgcaacattcaggcctgtaaagaattagctcagacaactcgcactgcctatggaccaaatggaatgaataagatggttataaaccatttggaaaaactttttgtaactaatgacgccgcaaccatactgagggagcttgaggtgcagcaccctgcagccaaaatgatcgtgatggcctcccatatgcaggagcaggaagttggcgacggcaccaattttgttctcgtgttcgccggagcgctgttggagcttgccgaggagctgctacggattggactttccgtgtccgaggtgattgaaggttacgagatagcttgtcggaaagcccacgaaatcctccctaacctagtttgctgttcggctaagaatctccgcgatattgatgaggtgagctcgctgcttaggacttcgattatgagtaaacagtatggaaacgaagtattcctcgctaaacttatagcccaggcctgcgtgtctatcttccccgattcggggcactttaatgtggacaacatacgagtctgcaagatcttggggagtggaatatcctcttccagtgtcttacatggcatggtttttaagaaggagaccgaaggagacgtcacttccgtgaaggatgcaaaaattgccgtatatagttgtcctttcgacggcatgatcaccgagaccaaaggaactgttctcattaaaaccgcagaagagcttatgaacttctctaagggggaggaaaacttaatggatgcgcaagtgaaggctatcgctgatactggagccaacgttgtcgttactggtggtaaagttgcagatatggctctccattacgcaaacaagtataatattatgctcgtgcgactcaactcaaaatgggatcttcgacgtttgtgcaagacggtgggcgcaacagccttacctcgcctgactcctcctgtgctcgaagaaatgggacactgtgactcagtgtatctctcagaggttggcgatacacaggtcgtggtgttcaagcacgagaaggaggatggcgcaatctcgaccattgtgctgcgaggaagcaccgataacttgatggatgacatcgaacgggcagtagatgacggtgtgaataccttcaaggtactcacacgagacaagcgcctagtcccgggaggaggtgccaccgaaatagagttggcgaagcagatcacctcctacggtgagacctgcccaggactggaacagtacgctattaagaaattcgctgaggcctttgaggcaattccacgcgctcttgctgaaaactccggggtcaaagccaatgaggttatttccaagctttatgctgtgcaccaagagggaaacaaaaatgtcggcttggacatagaagcagaagtgccagccgtgaaggacatgctcgaagcgggaatcctggacacctacctgggcaaatactgggccatcaaactcgccaccaacgcagccgtgactgttctccgcgtcgaccagattatcatggccaagcctgccggaggcccaaaaccaccatcaggcaagaaggactgggacgacgatcagaatgattag

SEQ ID NO: 27682 - DNA, 690 bp, synthetic construct
  source 1..690: mol_type = other DNA; note = Synthetic coding sequence
atgaacatccgaaatgcccagccagatgacctaatgaacatgcagcactgtaatctgttatgcctccccgaaaattatcagatgaagtattatctctaccatggactatcctggccacagctgagctacatcgcggaagatgaggacggaaagatcgttgggtatgtgctggctaagatggaggaagaacctgacgatgtgccccatgggcatattacatccctcgctgtgaagagatctcatagaagattgggcttagcccagaaacttatggatcaagccagtcgagcaatgattgagaattttaatgccaagtatgtcagtcttcacgtgagaaagtcaaaccgcccagccctgcacctctattccaacaccctgaacttccaaataagtgaggtggagccaaagtattatgcagatggggaagatgcttacgccatgaagagagatctgagccaaatggccgacgagcttagaaggcaaatggaccttaagaaggggggatacgtggtgctgggatcgcgcgaaaatcaggaaacgcaaggctctacgttgtccgacagcgaggaggcttgtcagcaaaagaaccccgctacagaagagtccgggtccgacagtaaggaacctaaagagtccgttgagtccaccaatgtgcaggactccagcgaaagctcagactccacgagctag

SEQ ID NO: 27683 - DNA, 1374 bp, synthetic construct
  source 1..1374: mol_type = other DNA; note = Synthetic coding sequence
atgagtgcccttaggcgcagcgggtacggcccttccgacggtccttcttacgggcgttattatggccctggtggcggtgacgtgcctgtgcacccacccccacctttgtatcctctccggccagagcctccccagcctcccattagctggagggtccggggagggggtcccgcagaaaccacctggctcggcgaaggaggtggcggagacggctattatccatccgggggtgcatggccagagcctggacgcgctggcggaagtcaccaggagcagcccccttacccctcctacaactccaattactggaacagtactgcaaggagtcgtgccccatatccgtcaacttaccctgtccgtcccgagctacagggccagagccttaatagttacactaacggggcatacgggccaacctaccccccagggccaggcgctaacacggcttcctacagcggggcatactacgctcccggatacacccagacatcttactccaccgaggttccaagtacttacagatcatccggaaattctccgacaccagtgagtcgttggatctatccacagcaggactgtcaaactgaagctcctccactgcggggacaggttcctggctatcccccttcccagaacccaggaatgacattgccacattacccatacggggacggcaacaggagtgtaccccagagcggacccaccgtacgccctcaagaggacgcttgggcctcccctggcgcttatggaatgggcggaaggtacccttggccaagtagcgccccatctgcgcctcccggaaacctctatatgactgaatccacctccccctggccttcaagtggaagcccacagagccccccaagcccacctgtacagcagcctaaagacagcagctacccatattcacagtccgatcagagcatgaacagacacaacttcccttgctcagttcaccagtacgagtcctccgggactgttaataatgatgattccgacctgctggattctcaggtacaatactctgcagaacctcaactgtatggaaacgcaacttcagatcatcctaacaatcaggatcagtcatcctcgcttccggaggagtgcgtcccgtccgatgaaagcacaccccctagcatcaaaaagattattcatgtgttggaaaaagtgcaatatctcgagcaggaagtggaggaatttgttggcaagaaaaccgacaaagcttactggttgttggaggaaatgctgactaaagagctcctggaactggacagcgttgagacaggtggccaggactccgttcggcaggccagaaaagaggccgtctgtaaaatccaagccatcctcgaaaaactcgaaaagaaggggctatag

SEQ ID NO: 27684 - DNA, 3201 bp, synthetic construct
  source 1..3201: mol_type = other DNA; note = Synthetic coding sequence
atgcagagtacagacctcggcaataaggagagcgggaaaatctggcaccggaagccatccccggctacgagagatggaattatagtcaacattattcataacacatctgactatcacccgaaggttttgcgctttctgaacgtagcctttgacgggacaggagattgcctcatcgctggggatcaccagggaaatatttatgtcttcgatcttcatggcaatagattcaatctggtgcaacgcactgcccaagcctgtacagccctggctttcaacctgcgaaggaagtcagagtttctcgttgctctggctgattatagcattaaatgtttcgatacagtgactaaggaattagtttcttggatgcggggacacgaatcgtcggtgttctcgatatctgtccatgcgagtgggaaatacgctataactaccagctccgacacggcgcaactctgggatcttgacacgttccaacggaagcgtaaactcaacatccgccagtcggtgggaatacagaaggtgtttttcctgccacttagcaacactattctgtcctgtttcaaggacaacagcatattcgcctgggagtgcgataccctgttctgcaaataccagctgcccgcacctcccgaaagctctagcatcctgtataaggtctttgccgtgacacgggacggacggattctggctgccggaggaaaaagcaatcatctccatctgtggtgtttggaggctagacaacttttccgtatcatccagatgcctacaaaagttagggccataaggcacctggagttcctcccagattcctttgacgccggatctaatcaggtcctgggcgtgctgtcgcaggatggaattatgcgcttcattaatatgcagacgtgtaaactgttgttcgagatcggttctttggatgagggtatctcttccagtgccatatcacctcatggtcgctacatcgctagcattatggagaacggctccttgaacatctattctgttcaggctctgacccaagagattaataaacccccacccccactggtcaaggttatagaggacctacctaagaataaactatccagcagcgaccttaagatgaaagtgactagcgggcgagtgcagcagccagcaaagtctagggagtctaagatgcaaacaagaatcctcaagcaggacctgactggagattttgagagtaaaaagaatgagctgcctgacggactgaataaaaagcgtctgcagatactgctaaaaggttacggagaatatccaactaagtacagaatgtttatctggcgcagtcttctacagctccccgaaaaccacacagccttttcaaccttgatcgataagggtacccacgtcgcctttttgaaccttcaaaagaagtaccctattaagagtagaaagcttcttagagtactgcaacggacactgagcgccttggctcactggtccgtgattttttctgacactccttatctgcccctgttagcattcccgttcgtaaagctatttcagaacaatcagctgatttgtttcgaggtgattgcgacactgattattaactggtgccagcattggttcgagtactttccaaatcctcccatcaacatcctctctatgattgagaatgtactcgcttttcatgacaaggagttgctgcagcactttatcgaccatgacatcactagtcaactgtacgcctggccacttctggaaacagtctttagcgaagtgctaacaagagaggagtggttgaagctgttcgacaatatcttttcaaaccacccatccttcctgctaatgaccgttgtggcttacaatatttgctcacggacacccctactgtcctgcaatttgaaagacgattttgagttctttttccaccaccggaataaccttgatatcaacgtggtgataaggcaggtttatcacctcatggaaactacccctaccgatatccacccagacagcatgctcaacgtgttcgtggccctcaccaagggccagtacccagtgttcaaccagtacccgaaattcatcgtcgactaccagacacaggaaagagagcggatcagaaatgacgaactcgactatttgagagagcggcagacagtggaggacatgcaggccaaagtggatcagcaacgcgttgaggacgaggcttggtaccagaaacaagagttactgcgcaaggccgaggaaacaaggcgggagatgttgttacaggaagaggaaaaaatgattcagcagcggcaacggctggcagccgtgaagcgggagcttaaagtgaaggaaatgcacttacaggatgccgctagacggaggtttttaaagctgcagcaggatcagcaggagatggaattgcgtcgcttagacgatgaaatcgggagaaaagtgtatatgagagaccgcgagatcgctgccacagcccgtgacctggagatgagacagctcgagttagagtcccagaagaggctgtacgagaagaatcttaccgagaaccaggaggcactcgcaaaagagatgagagctgacgccgacgcctaccgacgcaaagtcgatctcgaagagcacatgtttcacaaactgattgaggcaggagagacccagagtcagaagacgcagaaggtgattaaggagaacttagccaaggcagagcaggcctgtctgaatactgattggcagatccagagcttgcacaagcagaagtgtgacgatctacagagaaacaagtgctaccaagaggtggccaagctgctccgggagaatagaagaaaggagattgaaataattaacgcaatggtagaggaggaggcaaaaaagtggaaagaagcagagggaaaggagttccgactgaggtcagccaagaaggcatcagccctcagcgacgccagtcggaaatggtttcttaaacaggagatcaatgccgctgtcgaacatgcagaaaacccatgccacaaggaagaaccacgctttcaaaacgagcaggacagttcttgtctgcccagaaccagccagcttaatgattcgagtgaaatggacccgtcgactcagatttcactcaataggagagccgtcgaatgggacaccacaggccaaaatctgataaagaaggtgcgtaatctgcgacaacgactgaccgccagggcccgacacagatgtcagaccccacacttacttgctgcctag

SEQ ID NO: 27685 - DNA, 618 bp, synthetic construct
  source 1..618: mol_type = other DNA; note = Synthetic coding sequence
atggagggcaacgggcctgcagccgtacactatcagcccgctagcccccctcgcgacgcatgtgtttactcatcatgttattgcgaagagaatatctggaagctctgtgaatatatcaaaaatcacgaccaataccccctggaagaatgttacgccgttttcatctccaacgagcggaagatgattcctatctggaaacagcaggcaagacctggcgatggcccagtgatttgggattaccatgttgtcttgctgcatgttagctcgggtggccagaattttatctacgacttagatacagttctgccgtttccctgcctgtttgacacttacgtggaggatgcctttaagagcgacgacgatatccaccctcagtttcggcgaaagtttcgggtgataagagctgactcatatttaaaaaattttgcctctgatcgttctcacatgaaggactcctccggtaactggcgtgagccgcctccaccctacccctgtatcgagacaggcgactccaagatgaatctcaacgacttcatttctatggaccccaaagtcggctggggggctgtttacactctttcagagtttacccataggttcggatccaaaaattgctag

SEQ ID NO: 27686 - DNA, 1974 bp, synthetic construct
  source 1..1974: mol_type = other DNA; note = Synthetic coding sequence
atgtctcaggtgctgttccaccaactggttcccctgcaggtgaaatgtaaggactgcgaagaacgaagggtgagcattcgtatgagcatcgagcttcagtctgtttccaatcccgtgcatagaaaagatctagtcatccggctcacagacgacactgacccttttttcctgtacaacctggtgattagtgaggaggacttccagtcgctgaaattccagcagggcctgttggtcgacttcctcgctttcccgcagaaattcattgacctgctacagcagtgtacacaagagcacgccaaggagattcccagattcttattgcagttggtgagtccggcagccatcctggacaattccccggcatttctgaatgtagtcgagaccaatcctttcaagcacctgactcacctttccctgaaattgctgcctggcaacgacgtcgaaatcaagaagttcctggcagggtgcttgaaatgtagcaaggaggaaaaattgtcactgatgcagtctttggatgacgctactaagcagttagacttcactcgcaaaactctggctgaaaagaagcaggaactcgacaagttaagaaatgaatgggcaagccatactgctgccctgaccaataaacacagccaggagctcaccaatgaaaaggagaaggctctgcaagcccaggtgcagtatcaacagcaacacgagcaacagaaaaaggacctagaaatcctacaccagcaaaacattcaccagttgcagaaccggctttcggaactggaggccgctaataaggatctgacagaacgtaagtacaaaggcgactcgactattagggagctgaaagcaaagctttctggtgtggaagaggaactgcagcgtaccaagcaggaggtgttgtctctgcggagggagaattccacactagatgtagaatgtcacgagaaggaaaagcatgttaaccaactccagacaaaggtcgcagtccttgagcaggaaattaaagacaaggaccagctggttctaagaaccaaagaggcattcgacactatccaagaacagaaagttgtgctggaagaaaatggtgaaaaaaatcaggtgcagctaggcaagctggaagctacaatcaaatctctcagcgcagagttattgaaagctaacgaaattatcaagaaactccaaggcgatttgaagactttgatgggtaagctgaaattgaaaaatactgtgaccatccagcaagaaaagctactggctgagaaggaagaaaagttgcagaaagaacaaaaggaacttcaggacgttggacagtctctaagaatcaaggaacaagaagtttgcaaattgcaggaacagctggaagccaccgtcaagaaactggaggaatccaaacaactgttaaagaataacgagaagctgatcacatggctgaacaaggagctgaatgagaaccagctggtgaggaagcaggatgttctcgggcctagtactacccccccagctcattcttcatccaatacaatccgcagcggcatttctcccaatctaaacgtggtcgacgggagattaacctaccctacctgcggcatcggttaccccgtgtcgtccgcattcgctttccaaaatacattcccccattccatttccgccaaaaacaccagtcaccccggaagtggcactaaggtccaattcaacttgcagtttaccaagcctaacgcgtcgctcggcgatgtccagagcggggcaacaattagcatgccttgttcaacagataaagagaatggcgaaaatgtaggtttagagtctaagtacttaaaaaaacgcgaagattccatccctctaagaggactatcacagaatctgttcagtaattccgaccaccagagagacggaacccttggcgctctgcacacaagctccaagcctaccgccctgccttcagcctcaagcgcttacttcccagggcaactacccaacagctag

SEQ ID NO: 27687 - DNA, 237 bp, synthetic construct
  source 1..237: mol_type = other DNA; note = Synthetic coding sequence
atgcggtttatgatgatgagagccgaaaattttttcatactgcgcaggaaacccgtcgaggggtatgacatcagcttcctgatcactaactttcacacagagcaaatgtacaagcataaattggttgattttgtcatccattttatggaagagattgacaaggagataagtgaaatgaagctgtccgtcaacgccagagcaagaatagtggctgaagagttcctgaaaaatttttag

SEQ ID NO: 27688 - DNA, 933 bp, synthetic construct
  source 1..933: mol_type = other DNA; note = Synthetic coding sequence
atgcccctgctggtggaggggagacgcgtgagactgccccagtctgcaggagatctggttcgcgcacatccccctctcgaagagcgggcaagactgctgagagggcaatctgtccagcaggttggtccccagggactgctctacgttcagcaaagagaactggcagtgactagcccaaaggacggcagcattagcatcctgggtagcgacgatgccactacgtgccacatcgtggtcctccgccacactgggaatggagctacctgccttacacactgcgacggcactgatactaaagccgaggtgcctcttataatgaactcaatcaagtcattctctgatcatgcccaatgcgggagactggaggtccacctggtgggcggattctctgacgataggcaactaagtcagaagcttacccatcagctactgtcagagttcgatcgccaggaagatgacattcatctggtgacactgtgtgtgacagaactcaatgaccgtgaggaaaatgaaaatcattttcctgtgatctacggtattgctgtcaacattaagaccgccgaaatttacagggcaagctttcaggatagaggaccagaagaacaactcagggctgcacgtactctcgctggcggacccatgatctccatatatgacgccgaaacagagcagcttcgaataggtccatatagttggacacctttcccgcatgtggatttttggttacaccaggacgacaaacagatcctggagaacctttcaacttctccactagctgaacccccacattttgtggaacatattcgcagtaccctgatgtttttaaaaaagcacccctcgccagcccacacccttttctctggcaataaggccctgctgtacaagaaaaatgaagatgggttatgggagaaaatttctagccctggcagttag

SEQ ID NO: 27689 - DNA, 924 bp, synthetic construct
  source 1..924: mol_type = other DNA; note = Synthetic coding sequence
atgacagagactacaaagactcacgtgatcctcctggcttgtgggtccttcaacccaataactaagggccacattcagatgtttgagcgcgctagggattacctccacaaaaccggccgttttatcgttatcggtggcatcgtcagccccgtgcacgactcatatgggaaacagggccttgtgtcatccaggcataggctaatcatgtgccagctcgcagtccagaactcagactggatccgcgtcgacccttgggaatgttatcaggatacctggcagaccacttgctctgtactggagcatcacagagatcttatgaaaagggttactggctgtatcctgtccaatgtgaacacccccagtatgactcctgtgatcggacagccacagaacgaaactccacagcccatctaccagaacagcaacgtggctactaagcctactgctgctaagatcctgggaaaagttggtgaaagcctctcccggatttgctgtgtcagaccaccggtcgaacggttcacattcgttgatgaaaatgccaatctagggactgtgatgaggtatgaggaaatcgaactgaggatcctgctactgtgcgggagtgatctgctggaatctttctgcattccaggtttatggaacgaagcagatatggaggtgatcgttggcgactttggtattgtcgtggtgccccgagatgccgcagacaccgaccgaatcatgaaccactcttcaattctgagaaaatacaagaacaacataatggtagtgaaagacgacattaatcaccccatgtctgtcgtatcctcaaccaagtcccggctagcattgcagcacggcgacggtcacgtggtcgactatctgtctcagccagttatagattacattttgaaatctcaattatacataaacgcctctgggtag

SEQ ID NO: 27690 - DNA, 1476 bp, synthetic construct
  source 1..1476: mol_type = other DNA; note = Synthetic coding sequence
atggaagaaggaaaaatggacgagaatgagtgggggtaccatggcgagggaaacaaaagtctagtcgtagcacacgcgcagagatgtgtcgtcttgcgattcctgaaattcccaccgaacaggaagaagacctcggaggagattttccagcatctgcagaatatagtggacttcggcaaaaatgtgatgaaagaattccttggagagaattacgtgcattacggggaagtcgttcagctccctcttgagtttgtaaaacagctgtgcttgaagatccaatcagagaggcccgagagtaggtgtgacaaagacctggatacactgtctggctacgcgatgtgcctccccaacttgactcggctgcaaacctaccgcttcgccgagcacaggcctatactgtgcgtggagatcaaaccaaagtgtggcttcatcccattttcctccgatgtgacccacgagatgaagcacaaagtatgccgctactgtatgcaccaacatcttaaagttgcaacaggaaaatggaagcagatcagcaaatattgccccttggatctctattcaggaaataagcagaggatgcatttcgcccttaagagtctgctgcaggaagcccaaaacaacttaaaaatattcaaaaatggagagctcatctacgggtgtaaggatgctaggagccctgtggctgactggtccgagcttgcccatcatctaaaacccttctttttcccctctaatggactagcctctggccctcattgtactagagcggtcatccgggaattagtgcatgttattaccagagtgctgctgagcggaagtgataaaggacgcgctgggacccttagccccggtctgggaccacagggcccacgcgtgtgcgaagcctccccattcagcaggagcctccgttgtcagggaaaaaatacccctgagcgaagcggactccccaaggggtgcctgctgtataaaaccctccaagtgcagatgctcgacttgcttgatattgaaggcctctaccccctctataatcgtgtcgaacggtacctcgaagagttccctgaggagaggaagactctgcagattgatgggccttatgatgaagcattctaccagaaactgttagacctgagcactgaggacgacggcacagtggccttcgctttaactaaggtccagcagtaccgggtggccatgacagctaaggactgctctattatgattgctctgagcccatgtctgcaagacgcgagctccgaccagagaccggtggtgcccagctctcggtctcgctttgcttttagcgtgagtgtgctggacctggatctcaagccatatgagtctatcccccaccagtataagctggacggaaagatcgtaaactattacagcaagacggtccgagctaaggataatgccgttatgtccacccgcttcaaggaatctgaagattgcaccctcgttctacacaaagtgtag

SEQ ID NO: 27691 - DNA, 2640 bp, synthetic construct
  source 1..2640: mol_type = other DNA; note = Synthetic coding sequence
atgatgttttatagactgctttccatcgttggcagacaaagagcttccccagggtggcaaaattggagttccgctcgcaacagcacttccgccgcagaggcccgaagcatggccctccctacacaggcgcaagtggtcatctgcggtggcggtattactgggacctccgtcgcctatcatttgagtaagatggggtggaaagatatagtgcttctggagcagggcagactggccgctggttctacccgattctgtgcaggcatcctgagcacagctagacatttaaccattgagcagaagatggcagattactctaacaagctttattatcagcttgagcaggaaaccggaattcagactggctataccagaacagggtctatctttctagcgcagacccaagataggctgatctctctgaagagaataaatgctggactgaatgtgatcggaatccctagtgagattatttcacctaaaaaggtggcagagctccaccacctccttaatgttcacgatctggtgggcgctatgcatgttccagaggacgcagtcgtgagcagcgccgacgtggccctggcgttagcttctgcagccagccagaacggtgtgcaaatctacgacaggactagcgtcttgcacgtgatggtgaaaaaaggacaggttacaggggtggagaccgacaagggacagattgagtgtcaatactttgtgaactgtgccggtcagtgggcttacgaacttggcttatctaacgaggaacccgtgagcattccactccatgcttgcgaacacttttatcttctgacgagacccctggaaaccccactgcagagctccacacccactatcgtggatgcagacgggcgtatatacattcggaattggcaaggcggaattctttcaggcggattcgaaaagaatcctaagcccatttttaccgagggcaaaaaccaactggaaattcagaacctgcaggaagattgggaccattttgagccccttctgagtagcttactgagaaggatgccagagttagagactctggaaatcatgaaacttgtgaattgccccgagacctttacacctgacatgagatgcataatgggcgagtctccggcagtgcagggatacttcgtgctggcgggtatgaactcagcgggtctgtctttcggcggtggcgctgggaaatacctagccgagtggatggtccacggctatccaagtgaaaatgtttgggagcttgacctgaaaaggtttggtgcactgcagagcagccggaccttcttgaggcatcgcgtaatggaggtcatgcctctgatgtatgatctcaaggtgccgagatgggacttccagaccggcagacagttacgcaccagtcctctgtatgataggttagatgcgcagggcgctcggtggatggaaaaacacggttttgagagaccaaaatacttcgtccctcccgacaaagatctcttagcgttggaacaaagtaaaacattttacaaaccagattggttcgatatcgtggagtccgaggtgaagtgttgcaaggaagctgtatgcgtcattgacatgagctcatttacaaaatttgaaataacctcaactggcgatcaagcccttgaagtgttgcagtatctcttttccaacgatttagacgttcccgtcggtcacattgtgcacacaggaatgttgaatgaaggcggtggctatgaaaacgattgtagtatcgcaagactgaataagaggagtttcttcatgatatcgcctactgatcagcaggtgcactgttgggcatggctgaagaagcacatgcccaaagacagtaatctactcctggaagacgtgacctggaaatacacagcgttaaacctgatcgggccaagggccgtcgatgtcctgtctgagctaagttatgccccaatgacccctgaccattttccctccctgttctgtaaagaaatgtccgtgggctacgccaatggaatccgcgttatgagcatgacccacactggggaacccggttttatgttgtatattcccattgaatacgctttgcatgtctataatgaggttatgtcagttggccagaagtacggcatccgcaatgccggttattatgccctgagatcactacgaatcgagaaattcttcgctttttggggccaggacattaacaatctgactactcctcttgagtgcgggagggagagtagggttaagcttgagaaaggtatggattttattgggcgagatgcgctgctgcagcagaagcagaacggggtctataagcggctcacaatgttcattctcgatgatcacgactcagatttagacctgtggccctggtggggtgaacctatttaccggaatggacagtatgtgggcaaaacaacttcaagcgcatatagttattcactggagcgccacgtgtgcttgggcttcgtgcacaattttagcgaggatacgggcgaggagcaggtggtgacggctgatttcattaatcgcggagagtatgagatcgacattgcagggtaccgcttccaggccaaagccaagctgtacccggtagcctctttgtttactcagaaacgaagaaaggacgacatggaattgtccgacctgcatggcaaatag

SEQ ID NO: 27692 - DNA, 1440 bp, synthetic construct
  source 1..1440: mol_type = other DNA; note = Synthetic coding sequence
atggccacagactcatgggcgttggccgtggatgagcaggaggcagcggcagaatctctgagcaacctacacctgaaagaggaaaagatcaaaccagacactaatggcgctgtggtgaagactaatgcaaacgccgaaaaaaccgacgaggaagaaaaagaggacagagcagctcagtctctcctgaacaagttaatccgatctaatttggtggacaacacaaaccaggtggaggtactgcagagagatccgaacagtccactctactctgtgaagagttttgaagaactccggctcaaaccccagcttctgcaaggagtgtacgccatgggcttcaaccggccttcaaagatccaggaaaacgctctgccactgatgttggccgagccccctcagaacctgatcgcccagtcacagtctggtaccggcaagaccgccgcattcgttctcgccatgttgagtcaggtggagccagcgaataagtacccccagtgcctttgtctttcccctacatatgagctggctttgcagacaggtaaagttatcgagcagatgggcaaattttaccctgaactcaaactcgcatacgccgtgcgaggaaacaagcttgaaagggggcagaaaatctctgaacagatagtgattgggactcctggcacagttttggactggtgctccaagttgaagtttatcgacccaaagaagatcaaggtcttcgttctggacgaagctgacgtcatgatcgcgacccagggccatcaagatcagtccatccggattcagagaatgctccccaggaattgccagatgctcctgttcagcgctacatttgaagactctgtgtggaaattcgcccagaaggtcgtgcctgaccccaacgtgatcaaacttaaaagggaggaagagacgctcgacaccattaaacaatattacgtactctgttcctctagggatgagaagtttcaggcgctttgtaatttgtacggtgccatcactatagcccaggcaatgatcttttgtcatactcgaaagacagcatcttggttggccgctgaactatctaaggaaggacaccaagttgcgctattaagcggcgagatgatggtggaacagagggccgcagtgatcgaacgtttccgggagggcaaagaaaaggtgctggttaccacaaacgtgtgcgctcgaggcatcgacgtcgaacaggtgtcggtcgtaattaattttgaccttcctgtggacaaggatggtaacccagataatgaaacttatctccatcggatcggaaggactggcaggttcggcaaacggggactggccgtaaatatggtggattcaaaacatagtatgaacatcctgaataggattcaggaacacttcaataagaaaattgagcggcttgacacagatgacctggacgagatagaaaaaatcgctaactag

SEQ ID NO: 27693 - DNA, 3255 bp, synthetic construct
  source 1..3255: mol_type = other DNA; note = Synthetic coding sequence
atggagcaacccaagggggtggactggaccgtgatcattctcacctgtcagtacaaggattccgtccaggtgttccagcgagaactggaggtgcgccaaaagagagaacagatacccgcaggtacattgcttctagctgtggaggaccctgagaaacgtgtcggcagcggtggcgctaccctgaatgcgctccttgtggccgcagagcacctcagtgcacgcgctgggttcaccgtggtgacatccgacgtgctccattcagcttggatactgatcctacacatgggcagggactttccctttgacgactgcggacgagcatttacctgtcttcctgtcgaaaatcctgaagccccagtggaggcgctggtgtgcaatctcgactgcctgcttgacatcatgacatacaggctgggcccaggctcccctccgggtgtgtgggtttgcagtactgacatgctactttctgtcccagctaatccaggcatttcatgggacagcttcagaggtgcaagggtcatcgccctcccaggcagtcccgcatacgcacaaaaccacggtgtgtacctgaccgacccacaaggactcgtgctagacatctactaccaaggcacagaagcggagattcagaggtgtgtgcggccagacggccgtgtccctctggtgtcaggtgtcgtctttttttctgtggagacagccgaacggctcctcgcaacgcatgtctccccacccctggacgcatgtacctacttggggctggacagcggtgctcggcctgtgcagctatcgttattctttgatattcttcactgtatggctgaaaatgtgacgcgggaagacttcctggtgggacggcctcctgagcttgggcagggcgacgctgatgttgccggatatctgcagtctgctagggcgcagttgtggagagagctgagggaccagccccttacaatggcctatgtctcatcaggaagctactcgtacatgactagcagtgcctcagagtttctcctatccttgacactgccaggtgcaccaggcgcacagatcgtgcattctcaggtggaggagcagcagttgctagccgcaggctccagcgttgtttcatgccttcttgagggccctgtacagcttggacccggttccgtccttcaacactgtcacctgcagggtccaattcacatcggagccggatgtcttgtgactggtctggataccgctcactcaaaagcactgcacgggagggaactgcgggacctggtgttacaggggcaccatacccgattacacgggagccccggtcacgctttcacactcgtcgggcgattggattcatgggagcgtcaaggcgctgggacctacttgaatgtgccttggagtgagttttttaagcgtaccggggtgcgagcctgggatttgtgggatcctgagacattgcctgcagagtattgcctgccatccgcgcgtctgtttccggtgctgcacccgagtcgggagctaggtcctcaggatttactctggatgcttgaccaccaagaggatggcggagaagctcttagggcatggcgcgcatcgtggaggcttagctgggaacagttacagccatgtttggacagagccgctaccctggcaagccgaagggaccttttcttcaggcaggccctgcacaaggccaggcacgtgctcgaagccaggcaggatctttctctccgccctctgatctgggcagccgttagggaaggatgtcctggcccactgctcgccacacttgaccaggtagctgccggtgcaggagaccccggtgtcgcagctcgagccctcgcctgtgtcgctgacgtgctgggctgtatggccgaaggtcgcggaggtctgaggagtgggcctgcagccaacccagaatggatgcgacccttttcgtatttggaatgtggagacttagcagctggtgtggaagctctcgcacaggaacgggacaagtggctgtccagacccgctcttctggtgcgcgctgccaggcattacgagggggcaggtcagatattgattaggcaggcagtgatgtccgcacagcactttgttagcactgagcaggtcgagctacctggcccagggcagtgggtggttgctgaatgcccagcaagagtagatttctctgggggatggagcgacaccccgcctctggcttatgagctcggcggagcggtcttggggctggctgttcgcgtggatggaaggcggcctatcggggcaagagccaggagaatccccgagccagaactgtggctggccgttgggcctaggcaagacgaaatgactgtgaaaatcgtctgtaggtgcctcgccgatttaagagactattgccagccccacgcacccggagccttgttgaaggcggctttcatctgtgcaggcatcgtccacgtgcattctgaactgcagttgagtgaacagctactgcgcacgtttgggggtggcttcgagctgcacacgtggagcgagctccctcacggctcaggcctgggaacgtcgtcaatcctcgcaggaaccgcccttgccgcattacagcgcgcagctgggagagttgttggcaccgaggcactcatccacgcggtgctgcacctcgaacaggtgctgaccactgggggaggctggcaggatcaggtcgggggactgatgcctggaatcaaggtgggacgatctagagcacagctccccctgaaggtggaggtggaagaggtgacagtgccggaagggttcgtgcaaaagttaaacgatcatctactgctcgtatatacgggcaaaactcgccttgcgagaaacttgctgcaggatgtgctgaggtcgtggtacgcccgtctgccagccgtggttcaaaatgcgcattcgctggttcggcagactgaagagtgcgcagaagggttccggcagggctcacttcccctgctcggccagtgtctgacgtcctattgggaacagaaaaagttgatggcaccgggttgcgaaccgcttacggtgcgccgtatgatggatgtacttgctccccacgtgcacggacagtctctagccggagccggaggagggggattcttgtatctgctcacgaaagagcctcagcaaaaagaggcattagaggccgtcctcgccaagacagaggggttgggcaactatagcatacacctggtggaagtcgatacgcagggcctttcgcttaagttgctcggcactgaagcttccacctgttgtccctttccctag

SEQ ID NO: 27694 - DNA, 2139 bp, synthetic construct
  source 1..2139: mol_type = other DNA; note = Synthetic coding sequence
atgcagccagggtccgctcccccacccggacgcatggacccgtcagctcctcagccgagagccgagacatccggcaaagatatctggcaccctggcgagaggtgcctcgctccaagcccagataacggaaaactgtgcgaagccagtataaagagcataacagtggatgagaatgggaagagctttgctgtggtactctatgctgactttcaggagaggaagattcccctcaagcaactgcaagaagtcaaatttgtcaaggattgtcctcggaaccttatcttcgacgacgaggacctggagaagccttatttccctaaccgtaaattcccctcatcaagcgtggcttttaaattgtccgataacggagactccattccatatactatcaacagatacttgcgggattaccaacgcgagggaactagattcctgtacggtcattatatccacggaggcggttgtatcttaggtgacgacatgggcttgggtaagactgtgcaggtgataagcttcctagcagcagtgctacataaaaaagggacgcgcgaggatattgagaataacatgcctgaattcttgctgagatcaatgaaaaaggagcccctctcctccacagcaaaaaagatgtttttgatcgtggccccactgtcagtcttgtataattggaaggacgaacttgacacatggggatacttccgcgtcaccgtgttgcacggtaacagaaaagacaacgaactgatacgtgtgaagcagcgaaagtgcgaaatcgctttgacaacatatgagactcttaggctctgtttggacgagctgaatagcctggaatggtcagcagttatcgtcgatgaggctcaccgtatcaaaaatccaaaggcacgcgtaacagaggtgatgaaggcactgaaatgtaacgtccgtataggactcaccggcacgattctgcagaacaacatgaaagagctgtggtgcgtcatggattgggcagtgccaggcctgctcgggtccggtacatactttaaaaaacagttttcggatcctgtcgagcacggccagcgccataccgctacaaagagagaactggctactggcagaaaagctatgcaaagactcgctaagaaaatgagtgggtggtttctaaggcgtacgaaaacgctcatcaaggatcaactgcctaaaaaggaggaccggatggtttattgctcgttgaccgatttccagaaagctgtgtaccagactgtgttggagactgaagacgtaactctgatcctgcaatcatccgagccctgcacctgcagaagtgggcagaagcggagaaattgctgctacaaaaccaattctcatggggagaccgtcaagacactgtatttgagttatttaactgtgctccaaaaagttgcaaaccatgtggctctcctgcaggcagcgtccacatcaaagcagcaagaaacactgattaagagaatctgtgaccaagtcttctcccggtttccggactttgttcagaagagtaaagacgccgcttttgaaactctctctgatcctaagtattcaggtaaaatgaaagtgctgcaacaacttttgaatcactgcagaaagaacagggataaggtgctgctgttctccttttccactaagctcctggacgtgttgcagcagtattgtatggctagcgggctggactatcgccgactggatgggagtacaaaaagcgaagaacggctgaagattgtaaaggagttcaattctactcaggatgttaacatctgtctcgtgagcaccatggccggtggcctcgggctgaatttcgtgggtgcaaacgttgtggttctgtttgatccaacctggaatccagcgaacgacttgcaggccattgatagagcctacagaatcggacagtgtcgggacgtgaaggttctgcgcttaatcagcctggggaccgttgaagagattatgtacctgcgacaaatatataaacaacaactgcactgtgtcgtcgtcgggtcagagaacgctaaaagatactttgaggctgtgcaaggcagcaaggagcatcagggtgaactctttggcatccataaccttttcaaattccgatcccaggggtcttgcctgactaaggatatacttgaggtgtag

SEQ ID NO: 27695 - DNA, 1212 bp, synthetic construct
  source 1..1212: mol_type = other DNA; note = Synthetic coding sequence
atgaaacagcgcaagggccaggggagcggagggtcacgcggacgaaagaagagaggtctcagcgatatatccccgtcaaccagcctgcctccactcgttgaggggcagctcagatgttttctcaaactgaccgtaaaccgcgtcatctggaaaattgcaaaaccaccaacctgcgtgctcgtgagagtcagatggtggggagaaacctccgatggcaccctgttctgcccaagagatgccttacagactgaacccaaggctgtgcggaccaccaccaggtacgccattagatgcgggcctaagcagttcacatcttacttgaccgacatggcagtgctcgtgctagaggtcattactaagcttgatggtctgcccatcggaagggtgcagatcaacgggctggcacagctaagccccactcatcaaatcaatggtttcttcacaatcgtctctagcacttccaagaaactgggggaactgcaggtgtccctggccctggagccattgagtgagacgtacgacagttatcatcctctgcccaccactgatatgactgaaaacgtactgctttcgaagcaggggtttagggagaacacagagccatcctcaacccagttccaagtgccaagtcgcccacgggatattcatactattaagattgatggcaaagagttggcggcaaactcgtctcgctcgactacaccaaggggtaaagatcatgtttgttttgccgagaatcctgatacaataaaagatagttctttcgggctgcagcacagtctcaacagcggacaaagcctcgagtcggtaacattgaaagggcgtgcccctcggaaacagatgagtctcctgaactcttctgaattccaaccacagatccgcaccgtagccaaatcccactcagattcatgcatcctctcaagtaataacctgcccactaaagatttgttgagcgcccttcttgaacagggtaacaagctccgaaatgccatggtcatcagcgctatgaaatcttcacccgagacctcaatgctcctggaccaagtccatccacttctgatgaaaattttgctagaacaccagcatagaagtgagcctttcctgggaatcggtctgaagactactcttaaaatcactagctccctgcaacttcggattcacttcggcgacatgacacaaaagctgataccggaattgtacagttgctattag

SEQ ID NO: 27696 - DNA, 3663 bp, synthetic construct
  source 1..3663: mol_type = other DNA; note = Synthetic coding sequence
atgggcaaaaagcagaaaaataaaagcgaggacagcaccaaagacgacattgatcttgatgccttagctgcggaaatcgagggcgctggcgctgctaaagaacaagagcctcagaagagcaagggaaagaagaagaaggaaaagaagaaacaggactttgatgaggacgatattctgaaggagctcgaagagctgagtcttgaagcacaggggatcaaagccgatagggagacagtagctgtcaaaccaactgagaacaacgaggaggaattcacatccaaagacaagaagaaaaaaggacagaagggcaaaaagcaaagtttcgatgacaatgacagcgaagaactcgaggacaaggactctaagtccaaaaaaacagccaaacccaaggtagagatgtactccgggagcgacgacgacgatgactttaataagttgccaaagaaggcaaagggtaaagcacagaaatccaataagaagtgggatggttctgaagaggatgaggacaactccaagaagatcaaggagcgttcacgaatcaactcaagtggggagagcggggacgagtcagacgaatttctgcagagtcgcaagggacagaaaaagaaccaaaagaacaaacctggccctaacatcgaatccggcaacgaggacgacgacgcatcattcaagattaagacagtggctcagaagaaagctgagaaaaaggagcgcgagaggaaaaaacgggatgaagaaaaagccaagctgcgcaaactgaaagagaaagaggagttggagacagggaagaaagaccagagcaaacagaaagagtcccagaggaagttcgaggaagagaccgtcaaatccaaggtgaccgtggataccggcgtaatacctgctagtgaagaaaaagcagaaacaccgactgccgctgaggacgataatgagggcgataagaaaaagaaggacaagaaaaaaaagaaaggtgaaaaggaagaaaaagaaaaagaaaagaagaagggccctagtaaggctacagtgaaggccatgcaggaagctctcgcgaaactgaaggaggaggaagagaggcagaagagggaagaggaggagaggattaaaaggctggaagagctggaagcaaaacgcaaagaagaagaacgcctcgaacaggagaagcgtgaaagaaaaaaacagaaggagaaggaacgcaaagagcgtttgaagaaggagggcaagctacttaccaaaagccagagggaagcgagagccagggcagaggccactcttaagcttttgcaggcgcaaggagttgaggttccaagcaaagacagccttcctaaaaaaagacccatctatgaggacaaaaaaagaaaaaagatccctcagcaactcgaaagcaaagaagtgtccgaatccatggagctttgtgccgctgtggaggtgatggaacagggagtcccagagaaggaggaaacccccccaccagttgaaccagaggaggaagaagacactgaggacgctggactagatgattgggaggccatggcatctgacgaggaaaccgagaaagtcgagggtaacaaagtccatatcgaagtgaaagagaatcccgaggaggaagaggaggaagaggaggaagaggaggaggacgaagaatcagaggaagaggaggaggaagaaggggagagcgaggggtccgaaggggatgaagaagatgaaaaggtgtctgacgaaaaagactccgggaagaccctggacaaaaaaccttcaaaggagatgagctcggattctgagtatgatagcgatgatgaccggaccaaagaagaacgggcatatgacaaagcaaagagaagaatagagaagcgccgattggagcacagcaagaatgtcaataccgagaaacttcgcgcacccattatttgcgtgttgggacacgttgacaccgggaagacaaaaatcctcgataaacttcggcacactcatgtccaagacggcgaagcgggaggcataacccagcagatcggcgctacaaacgtcccccttgaagctatcaacgaacagaccaaaatgatcaaaaacttcgatagggaaaatgtgaggatcccaggaatgctgataattgatacccctggccacgaaagttttagtaacctgcggaaccggggttccagtctctgtgacatcgccatactcgtggtggacatcatgcacggtctcgaacctcagaccattgagtccataaacctgttgaaaagcaagaaatgtccttttattgtggcccttaacaaaatcgacagactgtatgattggaaaaaatctcctgactcagacgtggctgccacccttaagaaacagaagaagaacacgaaggacgagttcgaagagcgagcaaaagctatcatagtggagtttgcacagcaagggctgaacgcagccttattctacgagaacaaggatccgagaacattcgtgagtctggtgccaacaagcgctcacactggtgacgggatgggatcccttatatacctgctggtagagctgacccagacgatgctttctaagcgactagcccactgcgaggagctcagagcccaggttatggaagtcaaggcgctaccaggcatggggacgacgattgatgttattctcataaacgggagattaaaagagggagataccataattgtgccgggagtggagggccctattgttactcagatccgcggacttctcctgccccctccaatgaaagagcttcgcgtgaagaaccaatatgaaaagcataaagaagtggaagctgcccagggggtgaagattctaggcaaagatctggaaaagaccctggccggactccccctccttgtggcctataaagaggacgagatcccagtgctgaaggatgagctgatccacgaactgaagcagacactcaatgcgatcaagcttgaggagaaaggcgtgtatgtgcaagcctctactctgggttcccttgaggccctcctcgaattcctgaaaaccagtgaggtgccatatgcaggcataaatattggaccagtacataaaaaagacgtgatgaaggccagtgtaatgctagaacatgatcctcagtatgccgtcattctggcattcgacgtgagaatcgagcgggacgcccaggaaatggcagattctttgggcgtcaggatcttcagcgcagagatcatctatcaccttttcgacgcttttactaagtacagacaggactacaagaaacagaagcaggaagagtttaaacacattgctgtcttcccatgtaaaattaagatcttgccgcagtacatctttaactctagagatcctatcgtgatgggtgtgactgtcgaagctgggcaggtgaagcaggggactcccatgtgcgtgccatccaaaaatttcgtggatattggcatcgtgacatccatcgagatcaatcacaagcaggtcgacgtagccaagaagggccaggaggtttgcgtgaaaatagaacctataccgggagagagcccaaaaatgttcggtcggcattttgaggccacggatattcttgtgtccaagatttcacgacagagcatcgacgccctcaaagattggttcagggatgagatgcaaaaaagtgactggcagctgatcgtggagctcaagaaagttttcgagatcatatag

SEQ ID NO: 27697 - DNA, 138 bp, synthetic construct
  source 1..138: mol_type = other DNA; note = Synthetic coding sequence
atgtccgacaagccggacctcagcgaggtggaaaaattcgatcgaagcaagctgaaaaagaccaacacagaggagaagaacactctgcctagtaaggagaccattcagcaggagaaggagtgtgtgcagacctcatag

SEQ ID NO: 27698 - DNA, 1533 bp, synthetic construct
  source 1..1533: mol_type = other DNA; note = Synthetic coding sequence
atgcccggaggtggcgcttctgcagcttccggaagactcctgacggccgcagagcagaggggttcacgggaggctgccggaagcgcttcgcgctcggggtttgggggatcaggcggtgggaggggaggcgctagcgggccagggtctggaagtggcggtcctggagggcctgctggtcgcatgtcactgaccccgaaggagctgtcatcactgctctctatcataagcgaggaagcaggcggtggtagtactttcgaggggttgtcaactgctttccatcactatttcagcaaagcagaccattttaggttaggctcagttcttgtgatgttgctgcagcagcctgacctgctgccctcagcagctcaacggttaaccgctctctacttgttatgggagatgtaccgcactgagccacttgccgcaaatccattcgccgcatcttttgctcacttactgaatcccgcacctccggctcgcggaggtcaggagcctgaccgcccaccattatccggctttcttcctccaatcaccccccctgagaaatttttcttgtcacaactgatgctggcacctcctcgggaactttttaagaaaaccccacggcaaatcgccctgatggacgtcgggaacatgggccagtccgtggacattagtggattgcagcttgccctcgctgagcggcaaagcgaacttcctactcagtctaaggcatcattcccctccatactctcagacccggaccccgactcttctaactccggattcgattccagcgtagcctctcagatcacagaggcccttgtatcaggcccaaagccacctatcgaaagtcatttcaggcctgaatttattcgaccacccccaccgctccatatctgcgaagatgagctggcctggctaaatcctactgagccagatcacgctatccagtgggataaatcgatgtgcgttaagaactctaccggcgtggaaataaaacggattatggcaaaagctttcaaaagtcctctttcctccccgcaacagacccagctcctgggggagctggagaaggatcctaagctggtctaccacattgggctcacccccgctaaactgccagacctagttgaaaacaatcccttggtcgctatcgagatgttactcaaactcatgcagtcctcccagattactgaatacttctctgtgctcgttaacatggacatgagtctccattccatggaggtggttaataggctgactaccgctgtagacctgccaccagagttcatccatctgtacatctccaattgcatatccacatgcgaacagataaaagataagtatatgcaaaatcggttggtcagactcgtatgcgtgtttctccagagcctgattagaaacaagattattaacgtgcaggaccttttcatagaggtgcaggcgttctgcatagaattctcacgcatcagggaggctgccggactgtttaggttactaaaaacgctggataccggagagacaccatcagagaccaaaatgtctaagtag

SEQ ID NO: 27699 - DNA, 2184 bp, synthetic construct
  source 1..2184: mol_type = other DNA; note = Synthetic coding sequence
atgtctggacggaagcggtctttcacctttggggcatatggtggtgtggataagtcattcacttctaggcgctcagtgtggagaagcgatggccagaatcaacactttccccaagcgctggatctcagcagagtgaacctggttccgagttacaccccgagcttgtaccccaaaaacaccgatctgttcgaaatgattgagaagatgcaaggaagccgaatggatgaacagcgttgctcgtttccacctccccttaagacggaggaggattatatcccttatcccagtgtacatgaggtactgggcagagagggacctttccctctaatcctgctgccccagttcgggggttattggattgagggcacgaatcacgagattacttcgattcctgagaccgagccactgcagtcaccgaccaccaaagtgaaactggagtgtaatcctacagctagaatctaccgtaaacatttccttggaaaggaacatttcaactattacagcctggacgctgccttgggccacttagtgttctctctgaaatacgatgtcattggcgaccaggagcacctgaggctcctgttgagaactaaatgcaggacttatcatgacgttattcccatcagttgtctgacggaatttccaaacgtcgtgcagatggcgaaactcgtctgtgaggatgtgaacgttgacaggttctaccctgtgctgtaccccaaagcgtccaggctgatcgtgacgtttgacgagcatgtaatctccaacaatttcaagttcggagtcatttaccagaagttgggacagactagcgaagaagagctgtttagcactaacgaagagagcccagctttcgtcgaattcttggaatttctgggccagaaagtaaaacttcaggacttcaagggcttcaggggcggactggatgttactcacggtcaaaccgggacagaatctgtgtattgtaattttcgtaacaaggaaatcatgtttcacgtctcgacaaaactgccctataccgaaggcgatgcacaacagctacagagaaagagacatattggtaatgatatcgtcgcagtggtgtttcaggacgagaacaccccattcgttccagatatgatcgcatctaactttctgcacgcatacgtggttgtgcaggctgagggaggaggacccgatggtccactgtacaaggtgtcagtgactgccagggatgacgtgcctttcttcggtccacccctgcccgacccagccgtgtttcgaaaggggcctgagttccaggaatttctgctgaccaaactcatcaacgctgaatacgcctgctacaaagctgagaaatttgccaaactggaggagaggacaagggcagcgttactggagaccctgtatgaggaattacacatacacagtcaaagcatgatgggcctgggaggcgacgaagataaaatggagaacgggtcaggaggaggaggtttctttgagtctttcaaacgggttatccgatctcgatcccagtcgatggacgctatgggtttgtccaataaaaagcccaacaccgtcagtacgtcccactctggttcttttgcccctaataatccagatctcgcaaaggccgctgggatcagcctgattgtcccaggcaaatctcccaccagaaagaagagcgggcctttcggcagtcgaagatcgagtgctatcggcatagagaacatccaggaagtccaggagaaacgcgaatcccccccagccggtcagaaaacacctgattcagggcacgtgtcccaagaacccaaatcggagaactcttcaacccaaagctccccagaaatgcctacaacgaaaaaccgagcagaaaccgcagcccaacgggctgaagcactgaaggatttttctagatcgtcctcttctgcgtcgagttttgcttccgtggtagaggaaacagagggagtagacggggaagatacaggcctcgagagcgtgtcctcctccgggacaccccacaaaagagattcttttatctacagcacatggctggaggattctgtatccactacctctgggggttcatcacctggcccttcccgcagcccgcatccggacgcgggaaagctaggtgatcccgcttgccccgagatcaagatacagttggaggcctcagagcagcacatgccccagttgggctgttag

SEQ ID NO: 27700 - DNA, 873 bp, synthetic construct
  source 1..873: mol_type = other DNA; note = Synthetic coding sequence
atggtactcctgcacgtcaagcgtggagacgagagccaatttctgttgcaagcccctgggtctacagaactagaggaactgacagtgcaggtggcaagagtctacaacggacggctcaaggttcaacgactgtgttccgaaatggaggaactagccgagcacggcatcttcctgccaccaaacatgcaggggctgaccgacgaccagatcgaagaacttaaactcaaagacgagtggggagagaaatgtgtgccatcgggcggtgcagtgtttaaaaaagacgacataggcaggcgcaacggacaagcacctaatgaaaaaatgaagcaggtgctgaaaaaaactatcgaagaggccaaagcgatcatatccaaaaagcaggttgaagccggtgtatgcgttactatggaaatggttaaggatgctctggatcagctcaggggcgctgtcatgatcgtgtaccccatgggcctgccaccatatgacccaattcggatggaatttgaaaataaagaagatctgtcgggtacccaggccggacttaatgtgatcaaggaggccgaggcccagctgtggtgggcagctaaagaactgcgcagaaccaagaagctatccgattacgtgggcaaaaacgaaaaaaccaagattatcgcaaagatccagcagaggggtcagggggctcctgcaagagaacctattatttcgagtgaagaacaaaaacaactcatgctgtattatcataggcgacaggaggaactaaagaggttagaggaaaatgatgatgatgcctatttgaatagcccttgggccgacaatacggccctgaagcgacactttcacggtgttaaagacatcaagtggagacctcggtag

SEQ ID NO: 27701 - DNA, 567 bp, synthetic construct
  source 1..567: mol_type = other DNA; note = Synthetic coding sequence
atggaaccgcctaggggaccacctgcaaatggcgctgagcctagtcgtgccgtagggacagtgaaggtttacctaccaaataagcagcggaccgtggtgaccgtacgggatgggatgtctgtttacgactctttggacaaggccttgaaggtacgcggactcaatcaggactgttgcgtggtctaccggttgatcaagggacggaagacagtcaccgcctgggacaccgctattgcgcctctcgatggcgaggagttaatagttgaggtgctcgaggacgtgccactcacaatgcataacttcgtgcggaaaactttcttttccctcgccttttgcgatttttgcctgaaattcctttttcacggctttcggtgccagacgtgcggctacaagttccatcaacactgttcctccaaagtgcccacagtatgcgtggatatgtcaaccaacagacagcaattttatcactcggttcaggaccttagcggcggaagtagacagcatgaagccccttctaatcggcctctgaatgaactcctgacccctcagggaccgagttgcagatag

SEQ ID NO: 27702 - DNA, 2034 bp, synthetic construct
  source 1..2034: mol_type = other DNA; note = Synthetic coding sequence
atggatgaccccgactgtgatagtacctgggaggaggatgaggaagatgccgaagacgccgaagatgaggattgcgaggatggtgaagctgctggagccagggatgccgacgcaggtgacgaggacgaagagagcgaagaaccccgtgctgctcgccctagcagctttcagagccgaatgacagggtcgcgcaactggcgggcaacgcgggatatgtgccgctatcggcataattacccagaccttgtcgaaagagactgcaatggcgatacgccaaatctatcattttacaggaatgagatcagattcttacctaacggatgctttatcgaagatatccttcagaattggactgacaactacgatctgttggaagataaccacagctacatccaatggctgtttccgctgcgagagcccggagtcaattggcacgctaaacctcttactttgcgggaagttgaggtgtttaaaagctcccaagagatacaggagaggctggttagagcttacgagctgatgttaggattctatgggattagactcgaggacagaggaacgggcacagtggggagagcacaaaactaccagaaaaggtttcagaaccttaattggcgcagccataacaacttgcgcattaccagaatattgaaatctctaggtgagctaggattggagcatttccaagctcctctggtaaggttcttcctggaagagaccctggtgcgccgagagttacctggtgttcgccagagtgccctggattacttcatgttcgcagtgcggtgtagacatcagcgcaggcaactcgtccatttcgcctgggagcatttccgcccaagatgcaagtttgtctggggtcctcaggacaaactgagacgattcaaaccttcctccctcccccatcccctggagggaagccgtaaagtcgaggaggaagggtctcccggtgatcccgatcatgaggccagcacccaggggaggacatgcggcccagaacactcaaagggagggggtcgagtcgatgagggcccacagcctaggtcagttgagccccaggacgctgggcctttggagagatcccagggggatgaagctggtggtcatggtgaagatcgccctgagcctttgagccccaaagagagtaaaaagcgtaaactggaactctctcggagggagcagcctcccacggaacccggaccacagtctgcttcggaagtggaaaagatcgcattgaacctcgagggctgtgctttatctcagggctcactaagaacgggcacacaagaggtcggtggacaggaccccggagaggctgtccagccttgccggcagccactaggggcaagggtggccgataaggtgagaaagaggcggaaggtcgacgagggggcaggggactctgcagccgtggcctccggcggagcacaaacactcgcgctcgctggcagcccagcgccttcaggccacccaaaggccggtcatagtgaaaacggggttgaggaggacactgaagggcgtaccggtcccaaggagggcacgccaggctccccatccgaaacgccgggaccatcccctgccggaccagccggagacgagccagccgagtcgcccagcgagacccccggaccccgtcccgcaggacctgcaggggacgaaccagctgaaagcccatcagaaacccctggtcctaggcccgctggacccgctggcgacgagcctgcggagagtccctctgaaactcctggtccatctcctgccggacccacgagagatgagcctgccgagagcccttctgaaacaccaggccctcggccagccggacccgctggagacgaacccgcagagtctccctccgaaacaccgggaccgcgtccggctggcccagctggggatgaaccggctgagtcaccctcggaaaccccaggtcccagccccgctggtccgacgcgagatgagccagctaaagctggggaggcagccgagctacaggacgcagaagtggaatcctcagcaaagtccgggaagccgtag

SEQ ID NO: 27703 - DNA, 735 bp, synthetic construct
  source 1..735: mol_type = other DNA; note = Synthetic coding sequence
atggggctcgaactgtttttagatctggtgagccaaccgagtcgcgcagtttacatttttgctaagaagaatggaattcccctggaactgcggaccgtcgacctcgtgaagggacagcacaagagcaaggagttccttcagatcaactcactggggaagctgccgaccttaaaagatggcgacttcatcctgactgagtcatcggctattctgatctacttaagttgcaagtatcagacgcctgaccactggtatcctagtgatcttcaggcccgagctagagtgcatgaatacctcggttggcacgctgactgtataagagggactttcgggatcccactgtgggtccaagtgctgggacctctgatcggcgttcaggtcccagaagaaaaagttgagaggaaccggacagccatggaccaagctctgcaatggctggaagataagttcctaggagacaggcccttcttggccggacagcaggttactctggcggacctcatggccctggaggagctcatgcaacccgtggcacttgggtatgaactttttgagggcaggcctcgccttgcagcttggaggggtagggtagaagcattccttggagcagagctatgtcaggaagcccacagtatcattcttagcatcctagagcaggccgctaaaaaaacactacccacaccaagtcccgaggcttaccaggccatgctgctcagaatcgcaagaatcccatag

SEQ ID NO: 27704 - DNA, 531 bp, synthetic construct
  source 1..531: mol_type = other DNA; note = Synthetic coding sequence
atggcagcaagcaccgatatggctgggctcgaggaatccttcagaaagtttgctattcatggggaccccaaggcaagcggtcaggagatgaatgggaaaaactgggccaaactgtgtaaggattgtaaggtagccgatgggaagtcagtcacaggaacagacgtggatattgtcttctccaaagtgaagggaaagtctgcaagagtgattaactatgaagagtttaaaaaagcacttgaagagctggctaccaagaggttcaagggtaaatcaaaggaggaggcctttgacgcgatttgccagctcgtggccggaaaggagcctgcaaacgttggcgtgacaaaggcaaaaacaggcggagccgtcgatagacttactgataccagcagatacaccggctctcataaagaaagatttgatgaaagcggtaaaggcaagggcattgctgggagacaggacatcctggacgactccggctacgtgtctgcctacaagaatgcagggacctacgacgcaaaagttaagaaatag

SEQ ID NO: 27705 - DNA, 930 bp, synthetic construct
  source 1..930: mol_type = other DNA; note = Synthetic coding sequence
atgagcgatctcggttctgaggagctggaggaagagggtgaaaatgatattggggaatacgagggaggaagaaacgaagctggcgaacggcatggcaggggtagagcacggctgccgaatggggacacttacgagggatcttatgagtttggcaagagacacggccagggcatatacaaatttaaaaatggggctcgatacatcggcgaatacgtgaggaataagaagcacggacagggaacatttatttacccagatggttcaagatacgaaggtgagtgggccaatgaccttcgtcatgggcacggcgtgtattattacataaacaacgacacgtacacaggtgaatggttcgcacaccagagacacggccaggggacttatctatacgccgagacaggctctaagtatgtcggcacctgggtgaacggtcagcaggaaggaacagccgagttgatccatctcaatcatagataccaggggaaatttctgaacaagaatccggtaggaccaggtaagtacgtcttcgatgtaggatgcgaacagcacggggagtaccggctgaccgacatggaaagaggggaggaagaggaggaagaggagctggtcactgtggttccaaaatggaaagcaactcagatcaccgagctggcgttatggaccccaacacttcccaaaaaacccacaagcacggatggacccggacaagatgctcctggcgctgagtcagcaggagaacccggtgaagaagcccaggctttgctggagggctttgaaggagaaatggatatgaggccaggggacgaggatgctgatgttcttcgcgaggaaagtcgggaatatgaccaggaagaatttcggtacgatatggacgaaggtaacatcaatagtgaagaggaagaaactagacagagtgatcttcaagactag

SEQ ID NO: 27706 - DNA, 5943 bp, synthetic construct
  source 1..5943: mol_type = other DNA; note = Synthetic coding sequence
atgaaccccactaacccgtttagcggccaacagccctccgctttctcggcgagctcaagcaacgttgggacgctgccctcgaagcccccattccgtttcgggcagccctccttgttcgggcagaattccaccctgagcggcaagtcttccgggttttcccaagtgtcctcgttccctgcaagcagcggcgtctcccacagtagctctgtccagacactaggctttacacagacctcaagcgttggccctttttcaggacttgagcatacttctacttttgtcgctacgtctggtccaagttcctccagcgtgctcggaaataccggcttcagcttcaagagtcccacctccgtgggcgcattccctagcacttctgccttcgggcaagaggcaggggagatcgtgaattcgggctttgggaagaccgagttctcatttaaaccgctggagaacgctgtgtttaagcctattctgggagccgaaagcgaaccagaaaagacccaatcacagatcgcctctggctttttcactttctcacacccgatctcgagcgccccagggggacttgcgcctttctcttttcctcaagtcacatctagctccgccaccacaagcaacttcacattttcaaagcctgtgtcaagcaataacagcctgtccgcttttaccccagcactgagtaaccagaacgttgaagaggaaaaacggggtcctaagagcatcttcgggtcttcgaataattcattcagcagtttccccgtcagcagtgctgtcctcggcgaaccttttcaagcgtcaaaagctggtgtgcgccaaggttgtgaggaggccgtcagccaggtggagcctctcccctccttaatgaagggacttaaaaggaaggaggatcaggaccgaagcccccgtaggcacggccatgaacctgcagaggactctgacccactgtcacgtggtgatcatccacctgataagcgacccgtgaggctgaatcggcctcgcggtggaaccctattcggtagaacgatccaggatgtgttcaagtcaaataaagaggtcggccgtctgggcaataaagaggcgaagaaagagactggctttgtggagtctgcggagagcgaccacatggccatccccggaggcaaccaatcagtgctggcaccaagccggatccctggggtgaacaaagaggaagagacagaatcacgtgaaaagaaggaagacagcttacgcggaacacctgctcgccagtcaaataggtcagaatccacagattctctcggcggtctgtcgccttctgaagtcacagctatccagtgcaagaacatcccggattatctgaacgatagaacgatcctggagaaccactttggcaagatcgccaaggtgcagagaatatttaccagaaggtctaaaaaacttgcggtagttcatttcttcgaccatgcctcggcagcgctggcgcgtaagaaaggaaaaagcctacacaaagacatggctatattctggcatagaaagaagattagccccaataaaaaaccattttcgctgaaggaaaagaaacctggagatggcgaggtcagtccgagtacagaggacgcccctttccagcacagtcccctggggaaagcagcgggtcgaaccggcgcaagctccctcctgaataaatcctccccagtcaagaagccttcactcctgaaggctcatcaattcgaaggtgattcatttgattctgcttctgaaggcagtgaaggcctgggaccatgtgtcctaagcctctctaccctgattggcaccgttgccgaaaccagtaaagagaagtatcggctcctggaccagagggaccgtattatgcggcaggccagagtgaagcgcaccgatcttgacaaggctcgcactttcgttggcacttgtctggatatgtgcccagagaaggagagatacatgcgcgaaactcgctcccagctttctgtcttcgaggtcgtccccggtactgaccaagtagatcatgccgcagccgtcaaggaatatagtcgctccagcgccgaccaggaggagcccctgccacacgaactgcgtcccttgcctgttctgtctaggactatggattatctggtgacacagattatggatcagaaggaggggagcttgagagactggtacgactttgtgtggaatcgaacccggggtataagaaaggacatcacgcaacagcatctgtgtgaccctctcactgtatcactgattgaaaagtgcacgcggtttcatatccactgtgcccactttatgtgcgaggagcccatgtcctcgttcgacgctaaaattaataacgagaatatgaccaagtgcctccaaagcctcaaagagatgtaccaggatctgcggaataagggggtgttttgtgcatccgaggctgaatttcaaggctacaatgtcctgttaagtctgaataagggcgacattttaagagaagtgcagcaattccatccagccgtccggaacagcagcgaagtgaaatttgccgtgcaagccttcgcggctctgaactcaaataattttgtgagattctttaagcttgtccagagcgcctcttacttgaacgcctgcttgctgcactgttatttctctcagatacgcaaagatgcactcagggcgcttaactttgcatatacggtgtcaacccaacgcagcacaattttccccctcgacggcgttgtgcgaatgcttttattccgggattgtgaggaggctactgatttcctcacttgtcacggactcacagtttcagatgggtgtgtcgaattgaatcggtccgcattcttagagccagagggcctgtctaaaacacgcaagagcgtgttcatcacgaggaagctgaccgtgagcgtgggtgagatcgtgaacgggggtcccttgccccctgtgcccaggcacacacctgtgtgtagcttcaattcacagaacaagtatatcggcgaaagtctggcagccgagctgcctgtgtctactcagaggcccggtagcgacacagtcgggggaggaagaggcgaagagtgcggggtcgagccagacgctcctctttcttccctcccacagtcattaccagcccctgcgccttcacctgtcccgctccctccagtgttggccttaacaccttccgttgcccctagtcttttccaactgagcgtgcagcccgaacctccaccccctgagccagtgcctatgtacagtgacgaagaccttgcgcaggtcgtagatgaactcatccaggaagctctccagcgggactgcgaagaagtgggatctgccggagccgcatacgctgctgcagcacttggtgtgtcaaatgcagctatggaggatctgctgaccgccgctactaccggaatcctgcgacatatcgccgcagaggaggtgtcaaaagagagagagcggagggagcaggaacgacaacgggctgaagaggaaagactgaagcaggaaagagagctcgtgttgtcagaactttcccagggcctggccgtggagctgatggaaagggtcatgatggagtttgtcagggagacatgctcacaagaactgaagaacgccgtggagactgaccagagggtgagggtggcacgctgttgtgaagacgtgtgtgcccacttggtagacctgtttctcgtagaagagattttccagacggcaaaagaaacccttcaagaactccagtgtttttgcaagtacttgcagcggtggcgggaagccgttactgcccgtaagaaacttaggcggcagatgcgcgctttccctgccgctccgtgctgtgtagacgtgagtgatcgcttgagggccctggctccatccgcggagtgtcctattgccgaggagaacctggctcgaggcttgctagatctggggcatgccggaaggcttggcattagctgcacccgcttgcgcaggcttcgtaacaaaaccgcacaccagatgaaggttcaacacttttaccaacaattgctctctgatgttgcttgggcctccctcgatctgccatcactggtggccgagcacttgcccggacggcaggaacacgtgttctggaagctggtgctggtcttacccgacgtggaggagcagagtccggagtcatgtggacgaatcttagcaaactggttgaaggtgaagtttatgggagatgaagggagcgtcgacgacacatccagtgacgccggaggaatacaaacgctctcactgtttaactcactctcatctaagggtgatcagatgatttcagtcaacgtatgtataaaggtggcccatggcgctctctctgacggagcaatagatgcagtggagacccagaaggatttgctgggcgcttccggcctgatgctgctgctaccaccaaaaatgaagtccgaggacatggctgaagaagatgtgtactggcttagtgcactgctgcaactcaaacagctgctgcaggctaagcctttccagcccgcattgcccctggtggttcttgtgccttctcccggaggtgatgccgtggagaaagaggtagaagacggactgatgctgcaagatctcgttagtgccaaattgatctccgattacacagttaccgaaattcctgatacaatcaatgatcttcagggatctaccaaggttctgcaggcagtgcagtggctcgtgtcgcactgtccacactctttagatttgtgttgccaaaccttaatccagtatgtagaagatggaatcggccatgaattttccggtagattttttcatgaccggagagaaagacggctaggtggacttgctagccaggagccaggcgcaattattgaactttttaatagtgtgctgcaatttttagcctcagtggtcagcagtgagcagctctgtgacctgtcctggcccgtgacagagttcgctgaggccggtgggagtcgtctcttaccacatctgcactggaacgctcctgagcacttggcctggctgaaacaagcggtcctggggtttcagctgccccagatggatctgcccccattaggtgccccttggctgccggtatgttctatggttgtacaatacgcgagtcaaatcccatcttctagacagacccagcctgtgctccagagccaggtggaaaatctcctgcatagaacgtactgccgatggaaatctaagtcacccagcccagtgcacggagcaggccctagcgtgatggagataccttgggatgatctgattgcgttgtgcatcaatcataagttaagagattggaccccgcctaggctgcccgtgactagtgaggctttatccgaggatggacaaatatgcgtgtactttttcaaaaacgacttaaagaaatacgatgtgcccctgtcttgggagcaagccaggctgcagacacagaaagaactgcagttgagggaggggcgacttgccataaaaccgttccatccatcagctaacaattttcccatccccctgctgcatatgcatcgtaactggaaacgctcgaccgagtgtgctcaggaaggaagaatcccctccacggaagacttaatgagaggggctagcgcagaagaattgctggcccagtgcttaagctcctccctcctacttgaaaaagaggaaaataagcgcttcgaagaccagctgcagcagtggctgtcagaggacagtggagcctttaccgacctgacatcactgcctctgtacctgccacagactctggtctccttgtctcacacaatagagcctgtgatgaaaacgtctgtgacgactagtcctcagtccgacatgatgcgcgaacagctccagctcagtgaggctaccggcacgtgtctcggggaacgcctcaaacacctggagagactcattcggagttccagagaggaggaggtggcgtcagagctacacttgtccgccctcctggatatggttgacatttac

SEQ ID NO: 27707 - DNA, 3147 bp, synthetic construct
  source 1..3147: mol_type = other DNA; note = Synthetic coding sequence
atgtcagatgtgaatccgccatccgatacaccaatcccgttttcatctagctcaacccatagtagccatatccctccgtggacctttagctgttacccgggatcgccgtgcgaaaacggtgtgatgctgtatatgcggaacgtcagccacgaggagctgcagcggtttaaacagcttctcttgaccgagctctcaaccggcaccatgcctattacatgggatcaggtggagaccgcatcttgggccgaagttgtccatcttcttatagagcgcttccccggtagaagagcctgggacgtgacctcaaatatattcgcaattatgaattgtgataaaatgtgcgttgttgtgaggagggaaattaacgcgatcctgcctacccttgagcccgaagacctcaatgtcggcgagacccaggtcaacctggaggagggagagtctggtaaaatccgcagatataagtccaatgtgatggagaaattctttccgatatgggatataacaacctggcccggaaaccaaagggatttcttctatcagggcgtccacagacatgaggaatatttgccatgcctgttactacctaagagaccccaaggtcggcagcccaagaccgtggccatccagggggctcccggaatcggcaagactattttggcgaagaaagtcatgttcgaatgggccaggaataagttctatgcacataaaaggtggtgtgccttctatttccattgccaggaagtcaaccaaaccacagatcagtccttctcagagttgattgagcaaaaatggccagggagtcaggacctggtctctaagatcatgtctaagccagaccaactgctgctgctgctggatggcttcgaggagctcacctctacattaatagatcgtctggaggatctatcagaagactggcgacagaagctaccgggttctgtcctcctctcatctctcctgtctaagacgatgctccctgaggccacacttctgataatgatacggttcacctcttggcaaacgtgcaaacctctgttgaaatgcccttcactcgtaactctaccagggtttaacacaatggagaagatcaagtattttcagatgtacttcggccatacagaggaaggagaccaggttctctcttttgcgatggaaaataccattttatttagcatgtgtagagtgcctgtggtgtgctggatggtgtgctccggcctgaagcagcagatggaacgcggtaacaacctgacccagtcctgtccaaatgccacctcagtattcgtgcggtacatctcctccctgtttcctactcgtgcagaaaacttttcccggaagatccaccaggcccaacttgagggactgtgtcatctggctgctgacagtatgtggcaccggaagtgggtgcttgggaaggaggacctggaggaagcaaaacttgaccaaaccggggttaccgccttcctcggtatgtccatacttcggagaattgccggagaagaggatcactatgtcttcactctcgtcacgttccaggaatttttcgcagcccttttttacgtgctctgctttcctcagcgtcttaaaaatttccacgtcctcagccacgtgaacatccagaggcttatcgcatctcccagaggctctaaaagctacctgtcccatatgggcctgtttttgtttggctttctgaatgaggcatgcgcttctgccgttgagcagagcttccagtgcaaggtgagctttggaaacaagcgcaaactgctgaaagtgatcccgttgctgcacaaatgcgacccaccaagccctggctccggtgtaccccagctgttttactgtctacacgagattcgtgaggaggcctttgtctcccaggcactaaatgactatcacaaagttgttctcagaattggtaacaacaaggaggtccaagtttctgcattctgcctgaaaagatgccagtatctgcacgaagtggaattgacagtcactcttaatttcatgaacgtgtggaaactgagctcctcatcccaccctgggagtgaagcacctgagagcaacggccttcacagatggtggcaggatttatgttcagtttttgccaccaatgacaagctggaggtcctgaccatgactaacagtgttcttggacctccgtttcttaaggcgcttgcagccgctctgcgccatcctcagtgtaagctgcagaagctgctgttgcgtagagtaaattcaactatgctgaaccaagacctgatcggcgttctcaccggtaaccagcatcttcgctatctggaaattcagcacgtggaggtcgagagcaaggcagtgaagctgctctgtcgcgttttgcgctcccccagatgccgcttgcagtgtctgagactcgaagattgcctcgcaaccccacggatttggacggacttaggtaacaatctgcagggcaacggccatctgaagacacttattttgcgcaaaaactctttggaaaattgtggggcttattatctcagcgtggctcagctggagcgtttgtcaattgaaaattgcaacctcacacagttgacctgtgagtcccttgcctcatgccttagacagtcaaaaatgttgacacacctttcgttggctgaaaacgcactcaaagatgagggtgctaaacatatctggaacgccctcccccacctcaggtgccctttgcagcgcctggttctgaggaaatgcgacttgacgtttaattgttgccaggacatgatttcggccttgtgcaagaacaagaccttaaagagcctagacctgtcatttaacagcctaaaggacgacggtgtcattctgctgtgcgaagccctgaagaatccagactgtaccctccagattttggagctagaaaattgcctgtttacatctatctgctgccaagcgatggcctcaatgctgagaaagaaccaacatctccgtcatctcgacctgagcaagaatgctataggtgtttacgggatccttacactgtgcgaagctttttcatcccagaagaaaagagaggaagtaatcttctgcatccccgcttggacccgtatcacctctttttcccctactccccatcccccagacttcaccggaaagtctgattgcctctctcagattaacccttag

SEQ ID NO: 27708 - DNA, 3792 bp, synthetic construct
  source 1..3792: mol_type = other DNA; note = Synthetic coding sequence
atgcctgccagaatcggctactacgaaatagatcggacaattgggaaaggcaatttcgccgtggtcaaacgggcaacccatctggtcaccaaggcaaaggtggccatcaagattattgataagacccagctggatgaggagaatctaaagaagattttcagagaggtccaaattatgaagatgctgtgccacccgcacataattagactttaccaagtgatggaaactgagcgcatgatataccttgtcacagagtacgctagtggcggtgagattttcgaccacctggtggcccatggacggatggccgagaaggaggcccgacgtaagttcaaacagatcgttaccgcagtatacttttgtcattgccgcaatatcgtgcacagggatctgaaagctgaaaacctgctgctggatgccaaccttaatataaagattgctgattttggcttcagcaacctctttactccgggacaactgttaaagacttggtgtggcagtcctccttacgcagctcccgagctttttgaagggaaggaatacgatggacccaaggtggatatttggtccctgggagtggtgctttatgtcctggtctgcggcgcacttccttttgatgggagcactctacagaatttaagagccagagtcctgtctgggaaattccggattccgtttttcatgtctaccgaatgcgaacacctgattcggcacatgctcgttctggatcctaacaagaggctcagtatggagcagatttgcaaacacaaatggatgaagcttggcgacgccgatcctaatttcgatcggttgatcgctgaatgccaacagttaaaagaggagagacaggtggatccactcaacgaagatgtgttgttggccatggaagacatgggcttggataaagagcaaactctacagagcttgcggtcagatgcgtatgatcactactccgcaatttactcacttctctgcgaccggcacaaaaggcataaaacgctccgccttggagccctcccttcaatgccgcgagcccttgccttccaggcccctgtgaatatacaagctgaacaagcgggtactgctatgaacatctcggtcccccaggtgcagctaataaacccggaaaaccaaattgtcgagccagacggcactctgaatctcgatagtgatgagggcgaagaaccttctccggaagccctggtccgctacctgagcatgcggcgtcataccgtcggagtagcagacccacggactgaagtgatggaagacctgcagaaactgcttccaggattcccaggtgtcaacccacaggctccattcctacaggttgcccctaatgtaaacttcatgcacaatctgctgcccatgcaaaatctgcagccaacgggccagctagagtacaaggaacaatccctcttgcagccccctacactgcaactgctgaatgggatgggccctctaggtcgtcgggcatctgatggaggggcaaacatccaactgcacgcccagcagctgctgaagcggcctcgcggtccatcccccctcgtgacaatgacgcccgcagtgcccgcagttacacctgtcgatgaggaaagttccgatggggaacccgaccaagaggccgtccaatcatcaacatacaaagacagtaacacacttcaccttcccaccgaacgctttagccccgtgagaagattttctgacggagccgcttccattcaagctttcaaagctcatcttgaaaaaatgggcaataattccagcataaagcaactacaacaagagtgtgagcagcttcagaagatgtatgggggacagatcgacgaacgaacccttgaaaagacccagcaacagcatatgctctaccagcaggagcagcatcatcagattctgcaacagcagattcaggacagtatttgtccaccgcaaccttccccacctcttcaggccgcatgcgaaaaccagccagccctgctgactcatcagctgcagaggctccgaatccagccatcatcccctcctcccaatcatccgaataatcacctgttcagacagccctcgaactcgccaccacctatgtccagcgcaatgatccagccccacggtgccgcaagctcctctcagttccaggggcttccatcacggagcgctattttccagcagcagcccgagaactgctcttcaccaccaaacgtagcgctaacttgcctcgggatgcaacagcctgcgcagtcacagcaggtgacgatccaggtgcaggagccggtggacatgttatccaacatgcccggtactgccgctggaagtagtggaagagggatatccatctccccttcggctgggcagatgcagatgcagcatcgtacaaatctcatggcaacgctctcttacggtcacaggccactgtctaaacaactgtctgcggactccgccgaagcacacagcttgaatgtcaacagattcagccctgccaactatgatcaagcacacctgcatccgcatctttttagtgaccaatcccggggaagcccttcttcatactctccctctacgggcgtgggattttctcctacccaggcactgaaagtgccaccactggatcagttccctactttccccccttcggctcaccagcagccccctcattacacaacgtccgcgctgcagcaggctctgctctcccctaccccccctgattatacaagacaccaacaggtcccccatattctgcaggggttactgtcaccacggcatagcctgacaggacactcagacatacgcctaccgcctaccgagttcgctcagctaatcaagcgccaacagcagcagagacagcagcagcagcagcagcagcagcagcaggaataccaagaactgtttagacacatgaaccagggggacgccggttcgctcgccccatccctgggcggacagtccatgaccgagcgccaggccctgtcataccaaaacgccgactcctaccaccaccatacttccccccagcacctcttacagattagagcccaggagtgcgtgtcgcaagcctcaagtccaaccccacctcacggctacgctcatcaacccgctttaatgcactcagagtccatggaggaggactgcagctgcgagggagctaaagatggcttccaagactctaagagcagctccaccctcacgaaagggtgccacgattctccattattgctctcaactggaggacccggagaccctgaatctctgctgggcaccgtgtcccatgctcaggagctgggaattcacccatatggtcaccaacccaccgctgcctttagcaaaaataaagtaccctcaagggagccggtgattgggaactgcatggacaggagctctccaggacaagctgttgaactgcccgatcacaatgggctcggctatcctgctagaccttccgtgcacgaacatcaccgcccacgggctctgcagcggcaccatactatccaaaattctgacgacgcctatgtgcaattagacaacctgccagggatgtctctggtcgcgggaaaggccctctccagtgcacggatgagcgatgcggtgttgtcgcagtccagccttatggggtcccaacagtttcaggatggagagaatgaggagtgtggcgcttccttaggcggacacgaacacccggatctttctgatgggtcacagcatttaaattcatcctgctacccgtctacgtgtatcactgatatcctgcttagttataaacatcccgaagtcagtttttcgatggaacaagcaggggtttag

SEQ ID NO: 27709 - DNA, 4395 bp, synthetic construct
  source 1..4395: mol_type = other DNA; note = Synthetic coding sequence
atgtatcagcccgaggacgacaataatagtgacgtgacaagtgacgacgacatgactcgcaacaggcgagagagttctcctccccactcagttcactcattctccggggatcgagactgggaccgaagaggcagatcgagagacatggagcctcgggaccggtggtcgcatactcgcaaccctcggagtcgcatgcctcccagagatctgagcctgcccgtcgtagctaaaacttcttttgaaatggaccgggaagatgacagagattctagagcctatgaatcaaggtcccaagacgcagagtcttatcaaaacgtggtggatttagctgaggaccgcaaaccacacaatactattcaggacaacatggaaaactaccgaaagttactcagtctcggtgtgcaactggctgaggacgatggacattcccatatgactcaggggcattccagcagaagtaaacgctcagcctaccctagcacgtcccggggtctgaagaccatgcctgaagctaagaaatctacacatagaaggggcatctgtgaagacgagtcctcccatggggtcatcatggagaaattcattaaggatgtctctcgatcaagcaaaagcgggagggccagggagagctccgaccggtctcagagattcccaaggatgtctgatgataactggaaagacatcagcctcaataaacgggaaagcgtgattcagcagagggtgtacgaggggaatgctttcagagggggtttccgctttaactccaccctggtcagccgcaagcgagtgctggaacgcaagcgccgataccatttcgatacagacggcaaaggtagcattcatgatcagaagggatgcccgcgtaagaagccgttcgagtgcggctccgagatgcggaaagctatgtctgtgtcgtccctaagctcactgagttctccctcattcaccgaatctcaacctatcgactttggagctatgccgtacgtatgcgacgaatgtggcagaagcttctccgtgatatctgaatttgtggaacatcagatcatgcatactcgtgagaatctttacgagtacggagaatcttttatccatagtgttgctgtctccgaggtgcagaagagccaagtgggaggcaaaaggtttgaatgtaaggattgtggcgagacctttaataagtccgctgccttagcagagcacagaaagatccacgctaggggttacctggttgaatgcaagaaccaagaatgcgaggaggccttcatgccatcccccaccttttccgaattgcagaagatttacggtaaggacaagttttatgaatgccgagtatgcaaggagacctttctccatagcagtgcactcatcgaacatcagaagatccactttggcgacgacaaggataacgagagggagcacgaaagagagcgcgaacgtgagagaggagagactttcaggccctcccctgctctgaatgaatttcagaaaatgtacggcaaagaaaagatgtacgaatgcaaggtatgcggggagacgtttctgcactcttcatcccttaaagagcatcagaagattcataccagaggaaacccattcgaaaataaaggaaaggtgtgcgaggagaccttcattcctgggcagtccttaaagagaagacagaagacttataacaaggaaaaactgtgtgattttactgacggccgtgacgccttcatgcagagctctgaactctccgagcatcagaagattcattcacgaaagaaccttttcgaaggccgtgggtatgaaaagagtgtgatccacagtggccctttcacagagtcgcaaaaaagtcacacaattacccgcccattggagtccgatgaagatgagaaggcatttactatcagtagcaacccatacgagaaccagaaaattcccacaaaggagaacgtgtatgaagcaaagagttacgaacgatctgtcattcattccctggcatccgttgaagcacagaagagtcactccgtcgccggacctagcaagccgaaagtgatggctgaaagcaccatccagtcgtttgatgcgataaaccaccagagggtccgggctgggggtaatacctctgagggcagagagtacagccgaagtgtaatacatagcttggttgcttccaaaccgccaaggtcgcataacggtaatgaactggttgagagcaacgagaaaggggagtcatcgatctatatctctgatctcaacgacaagcgtcagaaaattcctgcgagagagaacccctgtgaaggtggaagtaagaatagaaactacgaagacagcgtgatccagtccgtgttccgcgctaagccacagaagagcgtacccggtgaaggctccggcgaattcaaaaaagacggagaattttcagtgccttcctctaatgtgagggagtatcagaaagcacgcgctaaaaaaaaatacattgagcacaggtctaatgagacatctgtgatccactcccttcccttcggggaacagacctttcgtccccgaggaatgctttatgagtgccaggaatgtggggagtgcttcgcccacagctccgacctgacagagcaccagaagatccatgaccgcgagaaacccagcgggagcagaaactatgaatggagcgtgataaggagcctcgcccctacagacccgcagacatcatacgcacaagaacagtacgccaaggagcaagccaggaacaaatgcaaggacttcaggcagttcttcgccacttccgaagacctgaatactaaccaaaagatctatgaccaagagaagtcacacggggaggagtcccagggcgaaaatacagatggcgaggagacccactctgaggaaacacatggacaggagaccattgaggacccagtaatacagggatccgatatggaggacccacagaaagacgatcctgacgacaagatttacgagtgcgaagactgtggcctgggtttcgtggacctaaccgacctgactgatcatcagaaggtgcactcccggaaatgtctggttgatagtcgcgagtatactcactccgttatccacacacattcaatctctgaatatcaaagagactataccggggagcaactgtatgagtgtcccaagtgcggcgagagcttcatccactcttccttcctgttcgagcatcaacgcatacacgagcaggatcagctctactctatgaagggctgtgatgatggctttatcgctttgcttcccatgaaaccacggcgtaaccgcgcagcagaacgcaaccccgcattggccggatctgccataagatgcctgctctgcggtcagggctttattcatagtagtgctctgaatgaacacatgcggctgcatagagaagacgatttgcttgaacagagtcaaatggccgaggaggctattattcctggcttggctctgaccgaattccagcgatcacagacagaagagcgactctttgaatgtgcggtttgcggcgagtcatttgtgaacccagcagaattggctgaccacgtgacagtgcacaaaaacgagccttatgaatatgggtcgagctatacgcacaccagctttttaacagagcctttgaagggggcaatacctttctacgagtgtaaggattgtggtaaatccttcatacatagtaccgtattgactaagcataaggagctacacttagaggaagaagaggaggatgaagcagcggctgctgccgcagctgccgctcaagaagtcgaagccaacgtgcacgtgcctcaggtggtgctccgcatacagggactgaacgtggaggcggcagagcccgaggtggaagctgcagagccagaagtcgaggccgcagagcccgaagtggaagcagcagagccaaatggggaggctgaagggcctgacggggaggccgctgaacctatcggggaggcgggacagcccaatggagaggctgaacagccaaatggcgatgctgatgagccagatggtgcaggcatcgaagacccagaggaaagggccgaggaaccggagggcaaggccgaagagcctgagggggacgcagacgaacccgacggggtgggaattgaagatccagaagagggtgaagaccaggaaatccaggtggaagaaccctactatgactgtcacgagtgcaccgagacattcaccagctccaccgcttttagcgagcacctgaaaactcacgccagtatgatcatctttgaaccggctaatgcgtttggagaatgctctggttatattgagcgcgcttctacctccactggaggcgcaaaccaggcagatgaaaagtattttaaatgtgatgtgtgcggtcagctgttcaacgaccgcctgtccctggcacggcaccagaatacacataccggttag

SEQ ID NO: 27710 - DNA, 1302 bp, synthetic construct
  source 1..1302: mol_type = other DNA; note = Synthetic coding sequence
atggcagaagcgcagtcaggtacggggcagctgcaggaacaaaaaaaggggctgctgattgccgtgagcgtgagcgtcgataagatcatcagccactttggcgctgccagaaatttggtccagaaggcacagctgggcgacagcagactcagcccagatgtcggtcacctcgtactcaccacactctgcccggctctacatgccctcgttgctgacggacttaaaccctttagaaaggacttaattacaggtcagcgccgatcttctccttggagcgtcgtggaggcctccgtgaagcccggatccagtacgcggagtctgggcacattatactcacaggtgtccagactggcaccactatcctcctctaggagccgcttccacgccttcattctggggctgctcaacacaaaacagttggaactatggttttcatctttacaagaagacgccggtcttctgtctcttctatacctgccaacaggttttttctccttagctagaggcggttgtcccagtttaagcactgaactcctgcttttgctgcagcccttgtccgttcttacgtttcacctggacctgctctttgagcaccaccaccacttgcccctggggccaccccaggccccagcgcctcctggccctccccctgcgcttcaacagaccatgcaggcaatgctgcactttggaggtagactggcgcaatcattgcggggtacttcgaaggaagctgcctcggatcccagcgattctcctaatttacctacacctggctcatggtgggagcagttgacacaggcctctcgcgtatacgcatctggaggcacagagggctttccactgagtcgctgggccccagggaggcacgggaccgccgctgaagagggggctcaggagagacccctgccaactgatgagatggccccaggaaggggcctgtggctcgggcgtctgtttggcgtgcctgggggtccagctgagaatgagaacggcgcattaaagagccgcagacccagttcgtggctgccacctaccgtgtctgtactggccctggtcaagcgcggagcacccccagagatgccatcacctcaggagttagaagcgagtgccccaaggatggttcagacccaccgtgctgttcgtgccctgtgtgaccataccgcagccagacctgatcagttgtctttcagacggggagaggttctgcgggtgatcacaaccgtcgacgaggactggcttcggtgtggaagggatggaatggagggtctcgtccctgtcggctatacctctctcgtgttgtag

SEQ ID NO: 27711 - DNA, 1584 bp, synthetic construct
  source 1..1584: mol_type = other DNA; note = Synthetic coding sequence
atggctcaaaccctgcagatggagattcccaactttggaaacagtattctagagtgtctgaatgaacaaagattgcagggactgtattgtgatgtctcagtggtcgtcaaaggacacgccttcaaggcacatagggctgtgttggccgcatcttcttcttactttcgggacctcttcaataactctcgcagtgcggtggttgaattgcccgctgccgtacagccacaaagttttcagcagatcctgagtttctgttacacaggaagactgtccatgaatgtgggagatcaatttttactgatgtacacggcaggctttttgcagattcaggaaatcatggagaaggggaccgagttcttcctgaaagtgagttccccttcctgtgacagtcagggtttacacgcagaggaagccccaagttccgagccccagtctcctgtagcccaaacctctggctggccagcgtgctctacgcctctgccgctcgttagtcgtgtgaagactgagcagcaggaaagtgactccgttcagtgtatgccagtggctaagagactttgggatagcggccagaaggaggcaggcggaggaggcaacggtagtcggaagatggctaagttctctaccccagacctggctgccaacaggccacatcagccgcctccacctcagcaggcccctgtagtggcagctgcccagcctgcagtggcagcgggtgccggacaacctgcaggaggcgtggccgcagcaggaggagtcgtgtctggacccagcacctccgagagaactagtcccggaacctcgagtgcctatacatcagattcaccgggttcctaccacaacgaggaggatgaagaggaggatggcggagaagagggtatggatgagcaatatcgacaaatttgtaacatgtatacaatgtacagcatgatgaatgtgggacagaccgctgagaaagtggaggccctacccgagcaggtcgctcccgaatcccggaatcgcatccgcgtccggcaggacttagcaagcctgccggcagaactcatcaaccaaattggaaatcgatgccatccaaaactgtacgatgaaggagatccgagtgagaaactcgagttggttaccggcacgaacgtctatatcacaagagctcaactgatgaactgtcacgtgtcagccggaacccgccacaaagtacttctccgtcgattgctggcgagcttctttgacaggaacaccctcgccaacagctgtggaacggggatacggtcatcaaccaatgatcctcgtcgcaagcctttggactcgcgggtgctgcatgctgtgaagtactactgccagaattttgccccaaatttcaaagaatctgaaatgaacgctatcgccgctgacatgtgcacaaacgccagaagggtggtgcgaaagtcatggatgcccaaggtaaaagtccttaaggcggaggacgatgcatataccacttttatcagcgaaacaggtaagattgaaccggatatgatgggcgtggaacacgggtttgagacggctagtcacgagggggaggctgggcctagtgcggaggccctgcaatag

SEQ ID NO: 27712 - DNA, 672 bp, synthetic construct
  source 1..672: mol_type = other DNA; note = Synthetic coding sequence
atggaggtgcaaaaagaagcacaacgtatcatgactttgtccgtctggaagatgtaccactcccgcatgcagcggggaggactgcgtctccacagatctcttcagctgagtctggtgatgcggtctgcccgtgaactttatctcagtgctaaagtggaagcactggaacccgaggtgtctctacccgcagccctgccctctgaccctagattgcacccccctcgggaggctgagtctaccgccgaaactgcaacccctgacggcgagcacccgttcccagaacccatggacactcaggaggcaccgactgcggaagagactagcgcctgttgcgcccctaggccagccaaggtcagcaggaaacgcaggtcttccagtcttagcgacggtggcgacgccggactcgtgccatcgaagaaagccaggcttgaggagaaggaggaagaagaaggtgcctcttccgaggtcgccgatagattgcaaccccctcccgcacaggctgagggcgctttccccaatctagcccgtgttttgcagcgtcgtttttccggtctccttaactgttctccagcggctccccctaccgctccacccgcttgtgaagctaaacccgcatgtcgcccagctgactctatgttgaacgtgcttgtcagggctgtggtggccttctag

SEQ ID NO: 27713 - DNA, 1500 bp, synthetic construct
  source 1..1500: mol_type = other DNA; note = Synthetic coding sequence
atgcgtgtcctggtgcccccagctgaacgttcacaagatacacgcgtgggggctccagcgtggagagaagctgcgcaggcaatggcaagaactgctcatattctgactgaccgctgtggacaggaagctgtaacaatgtggcagcctaaagacagcgtcttggatcctaatgtggcccatcatctcggaagagcagcctacatccaaccatggcgctttagagtggaaatgatcaaaggaggcggtaccctggagaagcccccaccgggtgaaggggtaacgctttggaaaggtaagatgaaacctcccgcttggtatgccagactgccactgccactgcacaggaaagccagagccctgcagactaccgaggtcgtgcacgcccacgcaagaggggcaagactcactgcagccagattagggagggcacagcaccagatcaacggccgagtgcggcagcttctgcgtcagcgggaagtgactgaccatcgattgtcggaagtcagaaaagggctgctgatcaatcaacaatccgttaagctgcgagggtacagacccaaatcagagaaggtacctgacaaggctgatagcatgctgacctgggagaaggaggagctgaagtcaatgaaaagaaaaatggagagggacatggagaagtctgaggtcctgttgaagacgttggcctcatgtcgcgacactctgaacttttgtttcaaagagcgcctgcaggccgttgaccttatgaatcaaccactcgataaggtgctcgagcaagctcggcgacactcttgggtgaatttgtcccgggcacccacacctagaacccaggggcagaagacacccccaccagatcccgtgggaacatataacccagcgtgcgcactcgcgctgaacgaggcaaagcggttgctggtggagagtaaggacacgctcgtcgagatggccaagaatgaggttgacgtgcgggaacagcagctgcagatttcagatcgcgtatgtgcctccctggcgcagaaagctagcgaaacactcgagttgaaagagagactcaacatgacattggggcttatgaggggtaccattctaaggtgcaccaaatacaaccaggaactgtacacaacccacggactgatcaagggcccactgtctaaagttcaccttgagaccgcagagaaattggatagacccctggtgaggatgtatcagcgacacgtgggaactcagcttccggaagcagccagactggcccagggcacagacaaactacagtgtcacatcacgtacctggaaaagaatctagatgagttgctcgctacccataagaacttgagttggggactcaattgtaaaaatatcggacacgaggtagacggcaatgtggtacggctgcgactgcggcaaagacagccccacgtctgctacgagcaggcacagaggctcgtcaaggactgggatcctagaacaccacccccaaggtccaaaagttctgctgatccatag

SEQ ID NO: 27714 - DNA, 1827 bp, synthetic construct
  source 1..1827: mol_type = other DNA; note = Synthetic coding sequence
atggagatggaatcagcagctgccagtacgcggtttcaccagccgcacatggaaaggaaaatgagtgcaatggcgtgcgagatattcaatgaattgagactggagggcaagttgtgcgacgtggtcattaaggttaacgggttcgaatttagcgctcacaaaaacatcctctgctcctgtagctcctacttcagagccctgttcacatccggctggaataatactgaaaaaaaggtgtataatattcccggtataagccccgatatgatgaaattaattatcgaatacgcctacacccgcacagtgcctataacacccgacaacgtggagaaactgttagcggcagctgatcagtttaacattatgggcattgtcagagggtgttgtgagttcctgaagtctgagctctgtttggataattgcataggtatttgcaagttcaccgattattattactgccctgagttgagacagaaggcctacatgtttattctgcataatttcgaggaaatggtgaaagtgtctgctgaatttctggaactaagtgtaaccgagctaaaggacattatcgaaaaggacgagcttaacgtaaagcaagaagatgcagtttttgaggcgattctcaagtggatcagccatgatccacagaaccggaagcagcacataagtatcctactgcccaaagtacgtctggccctgatgcatgccgagtactttatgaataatgttaagatgaacgattatgttaaagacagtgaagaatgcaaaccagtcataataaatgccttgaaggcaatgtacgatctgaacatgaatggtccctccaatagcgactttaccaaccctttgacccgtccacgcctcccctatgcaattttgttcgctatcggcggttggtcgggcggaagccccactaatgccattgaggcctacgatgctcgcgcagaccgctgggtcaacgttacttgtgaggaagaatctcccagagcatatcatggcgctgcatacttaaagggctatgtctacataatcggaggctttgatagcgttgattactttaattctgtaaagcgattcgatccagttaaaaaaacctggcaccaagttgccccaatgcatagccggcgttgttacgtttctgtcacagtccttgggaacttcatctacgctatgggcggtttcgacggatatgtgaggttgaataccgccgagagatacgagcccgagactaatcagtggactcttatagcacctatgcacgagcagaggagcgacgcttccgccactaccctgtatggcaaggtgtacatatgtggcggtttcaatggcaacgaatgtctttttaccgccgaggtttacaacaccgagtccaaccagtggaccgttatcgccccaatgcgtagccggcgatcaggcatcggcgtcatcgcctacggcgaacacgtgtacgcggttggaggttttgacggggcaaataggctcagatccgccgaggcctacagccctgtggccaacacttggcgtacaatccctacaatgttcaaccctcgcagtaattttggaattgaagttgttgacgatctgctgtttgtcgttgggggtttcaacggctttactactacattcaacgttgagtgctatgatgagaagaccgatgaatggtacgacgcgcatgatatgagcatataccgatccgcactatcatgctgtgtggttccgggattggcaaatgtcgaagagtacgccgcaagacgcgataatttcccaggactcgccttgagggatgaggtcaagtattctgctagtaccagcaccctgcctgtatag

SEQ ID NO: 27715 - DNA, 942 bp, synthetic construct
  source 1..942: mol_type = other DNA; note = Synthetic coding sequence
atggcggctttaacagatttgtctttcatgtatcggtggtttaaaaactgtaacctggtgggcaatctgtcagagaaatatgtcttcatcactggttgtgactctggattcggcaatctccttgccaagcagttagtagatcggggaatgcaagtgcttgcagcttgctttaccgaggaagggtcccagaagcttcagcgcgatacttcataccgactgcagactactctgttagacgttacaaagtctgaaagcattaaggccgctgctcagtgggtaagagacaaagtgggagagcagggcttatgggcactcgtgaacaacgcaggcgtgggcctgccaagtggaccaaatgagtggctgactaaagacgattttgtgaaagttattaatgtcaatttggtaggcctgatagaagtgaccttgcacatgctccctatggtgaaaagagccagagggagagtggtgaatatgtcttccagtgggggaagggtcgccgtcattggcggaggctattgtgtgtctaagttcggggttgaagccttttcagattcaattcgtagggagctgtattatttcggcgtcaaggtctgcattatcgaacctggcaattacaggactgccatactcggaaaagaaaacttagaaagccgtatgagaaagctttgggaacgcctgcctcaggaaactcgggattcttacggcgaggactatttcagaatctataccgacaagcttaaaaatattatgcaggtggccgaaccaagggtccgagatgtgattaattctatggaacacgccatagtatcccgtagccccagaatacgctataatccaggtttggacgcaaaattgctctacatcccacttgctaaactgcctactcctgtcactgattttatattatcaagatatctgcctcgacctgcagactccgtttag

SEQ ID NO: 27716 - DNA, 1461 bp, synthetic construct
  source 1..1461: mol_type = other DNA; note = Synthetic coding sequence
atgacatgcggcagttattgtggcggaagagccttcagctgtatatctgcatgtggacctaggccaggtaggtgctgtataactgccgcaccctatcgcggaatttcttgttacagaggcctgaccgggggtttcgggagccattcagtctgtgggggtttcagagctggcagctgcggccgaagtttcggctacagatctggaggggtgtgcggcccttcaccaccgtgcattaccactgtctctgtaaacgagtcactactgacgcctctcaacctggagatcgaccccaatgcacagtgtgtgaagcaggaggagaaagagcagataaaatcactaaacagcagattcgccgctttcattgataaggtccgtttcctggagcagcagaataagttgttagaaacaaagctgcagttctatcagaatagggagtgttgtcaaagcaatctggaacccctgttcgagggatatattgagacactcaggcgcgaggccgaatgtgtagaagccgattcaggccgactcgccagtgagctgaaccacgtgcaggaggttcttgaagggtataaaaagaagtacgaagaggaagtgtctctccgagctaccgctgagaacgagtttgttgccctgaaaaaggacgtggactgtgcatatctgaggaagtcagacttggaggctaatgtggaggccttgatacaggagattgattttctacggcgtctttacgaggaggagatcagggtgctccagagccacatttccgacacttccgtcgtcgttaagctggataactcaagggaccttaacatggattgtatcatcgctgagatcaaagcccagtacgatgacatcgtcacacgctctcgcgcagaggctgaaagctggtataggtccaagtgcgaggaaatgaaagctactgtaataagacatggtgagaccttgaggaggaccaaagaggagataaacgagctcaacagaatgatccaaaggttgactgctgaggtagagaacgccaaatgccagaactcaaaattggaagcagccgtcgcccagtcagagcagcagggagaggctgccctgagcgacgccagatgtaagctcgctgagctcgagggagccctgcaaaaggcaaagcaagatatggcttgtctcattagggagtatcaggaggtgatgaactccaaactgggccttgatattgagatcgccacgtaccgcaggctgttggaaggcgaggagcagaggctgtgtgagggggtgggatcggtaaatgtttgtgttagttccagccgaggtggggtggtgtgtggtgatctgtgtgcgtcaaccaccgctccagtagtctcaacgagggtgtcctcggtcccatccaactccaatgtggtggtcggaacaacaaacgcctgtgccccatccgccagagtcggggtttgcggtggcagctgcaagcggtgctag

SEQ ID NO: 27717 - DNA, 939 bp, synthetic construct
  source 1..939: mol_type = other DNA; note = Synthetic coding sequence
atggcggaactcactgccttggagtcgttaatcgagatgggttttccacgcggtcgcgctgagaaggcgttagcgttgacaggaaatcagggcatcgaagccgctatggattggctgatggagcacgaagacgatcccgacgtcgacgagccactggaaactccacttgggcacatactcggccgtgaacccacatcgtctgagcagggcggtctcgagggcagtggaagtgccgcaggagagggaaaacccgctctgtcagaagaggagcggcaggagcagacaaagaggatgttagaattagtcgcccaaaagcagagagaacgggaagaaagagaagaaagggaggctctcgagcgcgagagacagcggagacgccagggtcaggagctgagtgctgcaagacagagattacaggaggacgaaatgcgcagagcagcagaggagcggaggcgagagaaagcggaggagctggccgcaagacagcgcgttagagaaaaaatcgaaagggataaggccgagcgcgcaaagaagtacggcggaagcgtgggatcccagccccctccagtggccccagaacctggacccgttccttcatctcccagtcaagagccccctaccaaacgagagtacgaccagtgccgtatccaggtcaggctaccagacgggaccagtctcacacaaacatttcgggcacgtgaacaactggcagctgtccgtctctatgtggagttacacagaggtgaagagctgggcggaggccaagatccggttcagctactaagtggtttccccagaagagccttttctgaagccgacatggaaagacctctgcaggagttggggatggccgcacggcttgagactcgcacgcggaattggggctcgcgggaagcatgcctgggaaaagggggaatgcagcgagagggtgcgctatag

SEQ ID NO: 27718 - DNA, 405 bp, synthetic construct
  source 1..405: mol_type = other DNA; note = Synthetic coding sequence
atgcctgccgacctctccgggacatggacactgctttcaagtgacaactttgaaggttatatgctggctctcggaattgacttcgccacaaggaagatcgctaaactactgaaaccacagaaagtcatcgaacagaatggcgattcctttaccatccataccaactcgtctttacgcaattattttgtgaagtttaaggtcggagaggaatttgacgaagacaatcggggattggacaataggaagtgtaagtccctggtcatttgggataacgacagactaacatgtatacagaagggagaaaaaaaaaatagaggctggacccattggatcgaaggggacaagctacacctcgagatgttctgcgaaggacaggtgtgcaaacagacctttcaacgcgcatag

SEQ ID NO: 27719 - DNA, 1383 bp, synthetic construct
  source 1..1383: mol_type = other DNA; note = Synthetic coding sequence
atggcgggttacttgagtgaatccgattttgtgatggttgaggagggcttttcaactagggatctcctgaaggagctgacgctgggcgcaagccaagctacgacagatgaggtggctgctttcttcgtggcagaccttggagccatcgtgagaaagcacttctgttttttaaagtgtctgcctcgggtccgcccattctatgcagttaaatgtaactctagcccgggagttttaaaggtcctagcgcagctggggttagggttttcctgcgctaacaaagctgaaatggagctggttcaacatatcggcatccctgcctcaaaaatcatctgcgcaaacccctgcaagcagatcgctcagattaaatacgctgccaaacacgggatacagctgctgtctttcgataacgaaatggaactagctaaggtggtcaagagccatccaagcgccaagatggttctgtgtattgccacggatgattcacatagtctttcatgtcttagcctcaaattcggagtaagcctgaagtcgtgtcgacatctgctggagaacgccaagaaacatcacgtggaagtcgtgggcgtatctttccatataggcagtggctgccctgaccctcaggcctacgcccagagcattgccgacgcacgtctagtgtttgaaatgggaactgaactggggcacaaaatgcatgtcctggacttgggcggagggttccctggcaccgagggagcaaaagtcagattcgaggagatcgcgagcgtgataaactctgccctggacctgtatttcccagagggttgcggggtggacatttttgccgagttgggtcgttactacgttacctcggccttcaccgtcgcagtttcaatcatcgccaaaaaagaagtgttgctcgatcagccgggtagggaggaagaaaacggaagtacgagcaagactatcgtgtaccaccttgatgaaggtgtgtacggcatatttaactccgtgctgttcgataatatctgtccaacacctattcttcagaaaaagccgagtacagagcagccactctacagtagctcactgtggggcccagcagtggatggatgcgactgcgtggccgaagggttatggctccctcaattacatgtgggtgattggttggtcttcgacaacatgggggcttatacagtgggtatgggtagtcctttttggggaacacaagcgtgtcacatcacatacgccatgagtagggtggcatgggaggctctgagacgccaattgatggccgctgagcaggaagacgacgttgaaggggtgtgcaagcctttatcctgcggctgggagatcaccgatacactttgcgtcgggccagtgtttacacctgcctcgatcatgtag

SEQ ID NO: 27720 - DNA, 1209 bp, synthetic construct
  source 1..1209: mol_type = other DNA; note = Synthetic coding sequence
gggggacctagaggctcaggaagcgctgcagaaacaatgccagaaatccgggtgactccactcggcgctgggcaggatgtgggaaggtcatgtatcctggttagtattgcgggtaaaaatgtgatgctggactgcggcatgcacatgggatttaacgacgaccggcgattcccagatttctcctatataacacaaaacggcaggctcaccgactttttggactgtgtaataattagccacttccacttggaccactgcggtgccttgccctactttagtgaaatggtagggtacgacgggccaatatatatgacacaccccacccaggctatctgcccgatcctactggaagactacaggaagatcgcggtggacaagaaaggtgaagctaacttcttcacatcccaaatgattaaggactgtatgaatctgttggagaccttttgggagcgtatgaatctgaaggtgccgatctacttcagcacaggtctaacagagaaggcaaaccactattacaagttgttcatcccatggactaaccaaaagataaggaaaaccttcgtccagaggaacatgttcgaatttaaacatatcaaggcttttgatcgggcttttgctgacaacccaggaccaatggtggttttcgcaactcccggtatgctgcatgctgggcagtctctccaaatctttcggaagtgggccggtaacgagaaaaatatggtgataatgcccggttattgtgtgcaagggaccgttggacacaagattttgtcagggcaaaggaaactggaaatggaaggtcgtcaggtgctggaggttaagatgcaagttgaatacatgtctttctctgcacatgccgatgctaaaggcattatgcagttagttagctcagaacaggcacttaaggagctggggctggcagagcaccagctgcggtttacatgcagggtgcacctgcatgatacacgcaaggagcaggaaacagcactgcgcgtgtatagccaccttaagtcagtcttaaaggatcactgcgtccagcacctcccggatggatctgtgaccgttgagagtgttctgcttcaggccgcagccccatccgaggaccccggtactaaggtactcctggtctcctggacttaccaggacgaggaactcggctcatttctgacgagccttctgaaaaagggactgcctcaagcgccatcatag

SEQ ID NO: 27721 - DNA, 1863 bp, synthetic construct
  source 1..1863: mol_type = other DNA; note = Synthetic coding sequence
atggagaaggcagtgaacgacggatcccattcggaggagttgttttgtcacctaaagactatctcagaaaaggaggatttgcctcgctgcacatctgaatcccacttatcttgcttaaagcaggacattcttaacgaaaaaacggagttagaagcaacactgaaggaggccgagctcgttacacatagtgttgagctgctgctaccattattcaaagataccattgagaagattaactttgagaacgccaacctttccgctctcaacttaaagatttcagaacagaaggaaattctgatcaaagagctcgatacctttaaaagtgtgaagttagccctggagcacttgctgcgcaaaagagactataagcagacaggggacaatttgagcagcatgctgctggaaaacctcactgacaacgagtcggaaaacaccaacttgaaaaaaaaggtgtttgaaaaggaggctcacattcaggaactctcctgcttgtttcagtccgagaaggcaaatacactcaaggcaaaccggttctcccagagtgtcaaggtcgtacatgaacgtttacagattcaaatacacaagcgtgaggcagaaaatgataaattgaaagagtatgtcaagtctctggagacaaaaatcgcaaaatggaatctccagagcagaatgaataaaaacgaggccatagtcatgaaagaggctagcagacaaaagactgtggccctcaagaaggcatccaaggtatataagcagcgtctcgaccacttcacaggcgctattgagaaacttacttcccagattagggaccaggaggcaaagctcagtgaaacgatatcagcatcaaatgcatggaagtcccactacgagaaaatagtcatagagaagaccgaactggaagtccaaattgaaacgatgaagaagcagattattaatcttctggaggacctcaaaaaaatggaagatcacggaaaaaacagttgtgaggaaattcttcggaaggtgcattctatagagtacgagaatgagacattaaacctggaaaacactaaattgaaaactacactggccgcactcaaggatgaggttgttagtgttgagaacgagctctctgaacttcaggaagtggaaaagaaacagaagaccctgatcgagatgtacaaaacacaggtgcagaaactgcaggaggcagctgagatcgtgaaatcacggtgtgagaacctcctgcacaagaataaccagataaccaagacaaagaataaaaacgtggagaagatgaggggccagatggagtcccatctcaaggaactggaaagggtgtgtgactccctcactgcagcagagagacgtctgcacgaatgccaggagagtcttcagtgctgcaagggcaaatgtgctgatcaggaacatactatccgtgagcttcagggtcaaatcctgaaacaatgggaagagtactcggtactggcatgggtggacggcaaccacaatctgctgacgaaattaagcctggaggaagagaactgtttgatacagcttaaatgcgaaaatctacagcaaaagctggagcagatggatgctgagaacaaagagctggagaagaagctagcaaatcaagaagagtgtttgaaacacagcaacctgaaattcaaggaaaagtctgctgaatacactgccctcgcacgccaactggaagcggctctggaggaagggagacagaaagtggcggaggagattgaaaaaatgtcatcgcgggagagcgccctgcagatcaagatcttggatctcgagacagagctcaggaaaaaaaacgaggaacagaatcagttagtgtgcaagatgaattccgatcccgaaacaccttag

SEQ ID NO: 27722 - DNA, 465 bp, synthetic construct
  source 1..465: mol_type = other DNA; note = Synthetic coding sequence
atgtctaaaaacacggtgtcctccgctcggtttaggaaagtcgacgtagacgagtacgacgagaacaaattcgtggacgaggaggacggcggtgatgggcaggccggaccggacgaaggcgaggttgatagctgcttgcggcactcaattacaggcaacatgactgcagcgcttcaagctgctctgaaaaaccctcccatcaacacaaagtcccaggccgtcaaagaccgggcaggatccatagtgctgaaagtcctgatctccttcaaggccaacgacatcgaaaaggctgtgcaaagcttggacaagaacggcgttgacctactgatgaaatacatttacaaaggcttcgagtctccgagcgataacagcagtgctatgttactgcaatggcacgaaaaggccctcgctgccggaggggtcggaagcatcgtccgagtgctcaccgccaggaaaacggtgtag

SEQ ID NO: 27723 - DNA, 2946 bp, synthetic construct
  source 1..2946: mol_type = other DNA; note = Synthetic coding sequence
atgagtgaacaggaacgcattcaggagtgtctgagaaaggagatcaggtcactgctgattagcaccaaggacggcctaagtcctcaggaactcgagaaggaatacttgttgatggtgggaaaccatcttcccttgaggatccttggctaccgcagtacaatggaactggtcttagatatgcctgacgttgttagggtttgccctggtgcgggaggaacggtaatacttaaagccatccccgacgagagcaccaaaggaattgcctccctcgtggcaaaacagcgctcttctcacaaacttagaaatagtatgcacaagggacggccaagtatctactcaggcccaaggagccacagacgcgtgccatatcgcggacgcgttgcgcctatccttccggcagttgtgaaatctgagcttaaggacctgctcgctctctcacctgtgttgttgagcgatttcgagaaagccttcgccaaacggttcggccgatcattccagtacatgcagtacggttttctgtcaatgttcgaggtcctaaacgccgcttccgacgttatctcagtggagcagactcgcgctggctctctgctcatgctcaagaaaagtgtgacggaagagaagccccgaggatgccccgctggcaaaatttttacccagcctttccggatgaagcaagggagttactcaacaggcttccccgtagctaagccttgcttctcccagcccacctccaacatggagccgcctaagcaaatcatgtctatggaaaaaaccagcaaactcaacgttgtggagacctcgagattgaaccacacggaaaagttaaaccagctggaaaatacgttcaagtctgttattgcccaaatcggtcccggtggaaccatttctagtgaacttaaacataagatcaaatttgtggttagtaaattcccagaggggcttttcatctccaaactcttaggcgagtatgaagttatctttaaagagcagctaagccccaagaaattaggatttctgaacgttaccgaactggtgggtgcactttctgacatactgcacgtggaatttagaaaaggccaccaggatctgttggtcttcgatgcggacaaaaagcctcttccccctgtccagagtgacaagaagattgaggcaaaagcgtgtgtgtcttctcctccacgaaacagtttaagtacggccgctgttaaggaaacagtgtggaattgtccgagcaagaaacaaaaagagccgcagcaaaagatttgcaagaagcctaatcttgtggtgaaaccacttcagctgcaggtggagactaacaaatccgagctgaatctggctatggcaaaccacgatataccgccagatgccgtacccaacaaaaaactgtgcaggctgcctcctttggacactagctcccttatcggcgtgtttgtggagtatataatttccccaagccaattctacatacgcatttattcccgggacagttcagagctgctggaggacatgatgatcgaaatgcgcagatgttacagcaatcagttagttagcgatcgttatgtgatgcctgagtgctttattcagcctggccatctgtgctgtgtcaggatcagcgaggacaaatggtggtaccgggtgattattcacagggtgctcgaaaagcaggaggttgaagttttctacccagatttcggaaacatcggaatagtacagaagtctagccttagattcctgaaatgttgctatactaaactgccagcacaagccatcccctgctcactggcctgggtgaggcctgtcgaagagcactggacaagcaaggccattctccagttccagaagctctgcgggctgaaacctctggtgggggtagtggacgaatatgtggacggtatcttaaatatttttttgtgtgacacatcttctaatgaggatgtttactttcaccacgttctcaggaccgaggggcatgcaatcgtatgccgggagaatattagttcaaagggcttcagcgagcttaatcccctcgcgctctacacaacttcaagtggaggccctgaggacatcgtgctgacggagctgggctacccatcgcagcagcattatttcaatgaggaccgtaagatctcccctcaaagcaaagagtcggaactccgaatcctcgacgaaattccgaccggtatgccttgcctggaatccgtgaccattggcgatgacatttgggacgaaaactggctccccctgcaggcaaaaatgggtaaggggggagacgcagcgtctcatttattcaccgcttcactcggaggcaagaaccaatacagtagttgtaaagagatgcctcaaaaagattggtgcttcagcaccccgaaagatacatgggacgatagctggcagccctcaggcctggtgaacgggacaaaggtggaggttcacaagccagaagtgctgggagcccaggagaaaaacacgggcactaatcggacccagaaacagctcgatatcaacggatcatctgactcaagtacactgcccaaattggaagagttttgcactagcctgacccagagtgaacagtctgcagatggctcacagtcagagcccaataacagccagacccagcctaaacagattcaactgtcaacggcagcaccgtgttcaaccacagcagtggacgattcagccgagaagccatcagggtcggtggaatcctccccagagatcctaaaaaatgaggacttttcatccagtcgagcgatcaccctctacaaagataaacggcaagaatctgtggaccaactcagcttgatactgagttatgaatgtcaaatatctcagaagttgtatatccctcggagcacagctaccgctgccttaggagctgccgcaagactggccacctcccgatcccttctccattggtatcctagtgtgaaaaggatggaggcctag

SEQ ID NO: 27724 - DNA, 909 bp, synthetic construct
  source 1..909: mol_type = other DNA; note = Synthetic coding sequence
atggaaatacaggaacttgaggagattcaagcctgccagggcctctgggaggtcttcgtaaccctttctgaaagggcacgcgactacctccacaagacaggcaggttcatcgtgatcggaggcattgtgagcccagttcatgattcatatgggaaacaaggactggtaagttcacgtcaccgcctgatcatgtgccaattggcagtgcagaattcggattggattcgcgtcgacccctgggagtgctatcaagacacatggcagaccacatgctccgtgctggagcatcacagggacctcatgaaacgcgtaacgggttgcatcctctccaacgtgaatacacccagtatgacccccgtgatcggccaaccgcaaaacgagacacctcagcctatctatcagaactcaaacgtcgctacgaagccgacagccgcaaagattttgggtaaggtgggtgagtctctgtcccgcatctgttgtgttcgccctcccgtggagagatttacgtttgtagatgaaaatgctaatcttggcactgtgatgaggtacgaggaaatcgagctgcggatactgttactgtgtggctctgatttacttgagtctttctgcattcctgggctgtggaacgaggcggatatggaagtgatagtcggagacttcggaatcgtcgtagttccaagagacgccgcagacacagaccgcattatgaaccattctagtattctcaggaagtataaaaataatatcatggtggttaaggatgacatcaatcaccccatgtctgtggttagctcaacaaaatctcggcttgcgttgcagcatggggacggccatgtggtggattacctgtcccagcccgttatcgactatatcctgaaatctcagctgtacattaatgccagcggatag

SEQ ID NO: 27725 - DNA, 861 bp, synthetic construct
  source 1..861: mol_type = other DNA; note = Synthetic coding sequence
atggaacgcagactgggcgtgagagcatgggttaaagaaaaccggggaagctttcagcccccagtgtgtaacaagctcatgcatcaggaacagctgaaggtaatgttcataggagggcctaacacaagaaaagactaccatatcgaggaaggcgaagaagtgttttaccaattggagggcgacatggtgctgcgcgtgttggagcagggcaagcatcgagacgtagttattcggcagggagagattttcctgctgcccgcacgagtgccccactccccacagcgattcgccaatactgtggggctcgtggttgagcgtcgcaggctggaaactgagctggatggcttaagatattacgtgggtgatacaatggacgtactttttgaaaagtggttctactgcaaggaccttggtacacaacttgcccctatcattcaggagttcttttcgtccgagcagtatcggacaggaaagcccatcccagatcagctgcttaaggagccaccatttccactcagtacccggtcaataatggaacccatgtccctagatgcttggctcgatagccaccatcgagagctgcaggccggtactccgctgagcctcttcggcgatacctacgaaacacaggtgatcgcgtatgggcagggatcttccgaaggcctgcgtcagaatgtggacgtctggctgtggcagctagaggggagcagcgtggtgacaatgggcggacgtcgtctgagcttggcacccgacgatagcttgctggtgctcgcaggcacttcatatgcttgggaacgcacccaaggcagcgtggctctgagtgtgacccaggatcccgcatgtaagaaacccctgggatag

SEQ ID NO: 27726 - DNA, 1545 bp, synthetic construct
  source 1..1545: mol_type = other DNA; note = Synthetic coding sequence
atgcaggagagtgggtgccgtttagaacacccatctgctaccaaatttcgcaaccacgtcatggagggtgactgggataaagctgaaaatgatttaaatgaacttaagccactcgttcattccccccatgccatcgtggtcagaggggcactcgaaatatctcagacacttctggggatcattgttaggatgaaatttctcttgctccagcaaaagtatctcgaatacctagaggacgggaaggtcctcgaagcgctgcaggtgctcagatgtgagctcactccccttaaatacaacacagagcggatccatgtccttagtggttatttaatgtgctcccatgctgaagacctgagggccaaagctgagtgggaaggtaagggtaccgcctcgcggtctaaactgcttgacaagctgcagacctatctgccaccaagcgtgatgctcccacctagacgtctgcaaacacttctgaggcaggcagtcgaactgcagcgcgatcggtgtttgtatcataacactaagttggataataatctggactcggtttccttgctcattgatcatgtatgtagtagacgacagtttccctgttatacgcagcagatcctcacagagcactgtaacgaggtttggttctgtaaatttagtaacgatgggaccaagctggccactgggtcaaaggacactaccgttattatttggcaagtcgacccagacacacacctgctgaagcttctgaagacactcgagggccacgcatatggggtgtcttatatcgcctggagtcccgacgataattacttggtggcctgcggacctgacgattgtagcgaactgtggttgtggaatgtgcagactggagagctgcgaacgaagatgtctcagagccacgaagacagcttgaccagcgtggcttggaacccagatggaaaaagattcgtcaccggcggtcaaaggggccaattttatcagtgcgacctcgatgggaatcttctggacagttgggagggtgtacgcgtccagtgtttgtggtgtcttagcgacgggaaaaccgtgcttgcgagtgacacgcaccagcgtatccggggttacaatttcgaggacctcactgatagaaacatcgtacaggaagatcacccgattatgtccttcacaatttccaagaatggccgtctggcgctgcttaacgtcgctactcagggagttcacttgtgggacttacaggacagggtacttgtcagaaagtaccagggcgtgacacaaggattctacacgatccacagttgtttcggaggccacaatgaggacttcattgccagcggtagcgaagatcacaaggtgtatatctggcacaaaaggtctgagttgcccatcgcggagcttaccggtcatactaggacggtgaattgcgttagttggaacccccagattccaagcatgatggcttcagcctctgatgatggcactgtgcggatatgggggccagcccctttcattgatcaccaaaatatcgaagaagagtgttcctcaatggactcatag

SEQ ID NO: 27727 - DNA, 540 bp, synthetic construct
  source 1..540: mol_type = other DNA; note = Synthetic coding sequence
atgggtatacttttcacaagaatatggcggctgtttaatcatcaagaacacaaagtaatcatcgtggggttagacaacgcaggtaaaacgactatcctgtaccagttctctatgaatgaggtggtccatacctccccaaccatcggctcaaacgtggaagagatcgtcatcaataacacgcgatttctgatgtgggacatcggtggtcaggaatccctgcggtcaagttggaatacatattataccaatactgagttcgtgatagttgtggttgacagcacagaccgggagcggatctcagttaccagggaagagttgtataagatgttagcacatgaggatttacgtaaggctggcctcctgattttcgccaacaagcaggacgtgaaggagtgcatgaccgttgctgagatttcacagtttctgaagttgacatccattaaggaccatcaatggcatatccaagcctgttgcgcactaactggagagggactgtgtcagggtttagaatggatgatgagcaggttaaagattagatag

SEQ ID NO: 27728 - DNA, 1428 bp, synthetic construct
  source 1..1428: mol_type = other DNA; note = Synthetic coding sequence
atgcagaaaagcactaatagcgacacgtctgtggaaactctcaacagtactcgtcagggtaccggcgctgtccagatgagaatcaagaacgccaactctcaccacgatcgactgagtcaatcaaagtcaatgattctgacagacgtgggcaaggttaccgagcctatctctcggcaccggaggaatcatagccagcacatcctgaaggacgtaatccctccactcgagcagctcatggtcgagaaagaggggtatctgcagaaagcaaaaatagccgacggtggcaagaagctacgtaagaattggagcacgtcctggatagtgctttcttcgcggaggattgagttttataaagagtcaaaacagcaagctctctccaacatgaagaccggtcacaaacccgagtccgtggacttgtgtggagctcacatcgagtgggctaaggagaaatctagtcgaaagaacgtgttccagatcaccaccgtgtctggtaacgagtttctcctacagtcagacatcgactttatcatcttggattggtttcatgcaatcaagaacgccatcgaccggctgccaaaagatagctcctgcccgagtagaaatctggaactcttcaagatacagaggtcctcatcaacagagttgctcagtcattacgattccgacatcaaggaacagaagcccgaacaccggaaatccctcatgttcaggctgcatcatagcgccagcgatacgtccgataagaatcgagtaaagtctaggcttaaaaagttcattacacggagaccatctctgaagacactgcaagaaaaaggtctgatcaaggaccagatttttggatcccaccttcacaaggtgtgtgaaagggagaacagcaccgttccatggttcgttaaacagtgcattgaagctgtcgagaagaggggactagatgtcgatggcatttatcgcgtgagcggaaacctggccacaatccagaaactgcggttcattgtgaatcaggaggagaagctgaacctagacgactcgcaatgggaagatatacacgttgtcaccggcgctctgaagatgttttttagggagctgccggaacctctgtttccctacagttttttcgaacagttcgttgaggctatcaaaaagcaggacaacaacacgaggattgaggccgtcaagtcactggtgcagaagctgccccctccaaaccgagatacgatgaaggtgctttttggacaccttacaaaaattgtggctaaagctagcaagaacctgatgagtacacaatcgttaggcatcgtgttcggacctacattgctgcgggcagagaacgaaactgggaatatggctatacatatggtgtaccagaaccagatagccgagctgatgcttagtgagtatagtaaaatctttggatccgaggaagactag

SEQ ID NO: 27729 - DNA, 1308 bp, synthetic construct
  source 1..1308: mol_type = other DNA; note = Synthetic coding sequence
atggcgcagaccgttcccccatgcgaactcccttgcaaggagtatgatgtggctcggaatacaggcgcatatacatccagcggcctcgctacagcctcctttcgaacaagtaagtatctgctcgaagaatggtttcagaattgttatgccagatatcaccaggcattcgccgatagagaccagtctgagaggcagcggcatgagagccaacagctcgcgacagaaacccaggcgcttgctcaaagaacacagcaagactcaactagaacagtgggagagaggttacaggatacacactcctggaagtccgagctccagagggaaatggaggccctggccgctgaaaccaaccttttgctggctcagaaacagcgcctggagcgagccctggacgccacagaagtgcctttcagcattacgaccgacaatctgcagtgtagggagcggagggagcatcccaacttggtcagggatcacgtagaaacagagctgctgaaggaggccgaattaattagaaatattcaagagcttcttaagcggactatcatgcaagcagtgagccagatccgtctgaaccgcgagcataaagagacgtgtgaaatggattggagtgataagatggaagcctacaacattgatgagacctgtggcagacaccatagccagtccaccgaggtccaggcacacccttatagcacaacctttcaggaaagcgcgtctacgcccgaaacaagagcaaagtttactcaggataatctgtgtcgggcacagcgggaacggctggcttcagccaatctgagggtgttagtcgactgtatactaagagacacctccgaggacctacgacttcagtgtgacgctgtaaatctggcattcggaagaagatgtgaagaactcgaagacgcgagatacaagctgcaccatcacctccataagacactcagagaaataactgatcaggagcacaacgttgctgcactgaagcaggcaataaaagacaaggaggccccattacatgtcgctcaaaccagattatacctgagatcccataggcccaacatggagctctgccgcgacgctgcccagttccggctgttatctgaagtagaggaactgaacatgtcccttacagcccttcgtgagaaacttctcgaggcagaacagtccctccgtaatcttgaggatattcatatgagtctcgagaaggatattgcggctatgaccaatagcctgttcatcgacagacagaagtgtatggcacatcgcaccaggtaccctacaattttacagctggccggatatcagtag

SEQ ID NO: 27730 - DNA, 828 bp, synthetic construct
  source 1..828: mol_type = other DNA; note = Synthetic coding sequence
atgcgcaagcgtctgtctgcacccgagttaaggttgagtcttaccaaaggccctgggaacgacggggcttccccgacccagtccgccccaagctccccagacggcagtagtgatcttgaaattgatgagttggagactcccagcgattcagagcagttggattccggccatgaattcgagtgggaagacgagctccccagggcagaagggcttggtacttccgaaaccgccgaacggctagggagaggatgcatgtgggacgtgactggcgaggacggtcaccattggcgcgtgttcaggatggggccaagggagcagagagtggatatgacagtgatcgagccctacaaaaaagtgctgagccacgggggataccatggagacggcctgaacgcagtgatcctattcgctagttgctacctgccccgatcttcaattcctaactatacatatgtgatggaacacctctttcggtatatggtgggaacgctcgaacttcttgtggccgagaactatcttctggttcatctttccgggggaacatctcgtgctcaagtaccccctctaagctggattcgccagtgttatcgtaccctcgataggcggctgagaaaaaacctccgcgctctagtggtggtgcacgcgacgtggtatgtgaaagccttcctggccctgcttcgtccctttattagctcgaagttcacacgcaagatacgctttcttgactctttaggcgaactggcccaattaatatcgctggatcaagtgcatataccagaggcagtacgccagctagaccgcgatctgcacgggtctggcggaacctag

SEQ ID NO: 27731 - DNA, 2391 bp, synthetic construct
  source 1..2391: mol_type = other DNA; note = Synthetic coding sequence
atggaagaggaagccagtcgtagcgctgccgcaaccaatcctggatcccggctcacccggtggccccctcctgacaagcgcgagggttctgccgttgaccccggaaagcggagatctctggccgcaacaccatcgagctccctgccttgtactctgattgcgctggggttacggcacgaaaaagaggccaacgaattaatggaagacttgttcgagacattccaggacgagatgggcttctctaatatggaggatgacggccctgaggaggaagagcgggtggcagaaccgcaagctaacttcaacacgccacaggccctgagattcgaggagctgctggcaaaccttctaaatgaacaacaccagatcgctaaggagctttttgagcagctgaagatgaagaagccttcagccaaacaacagaaagaggtggagaaagttaagccacagtgtaaggaggtccatcagactctgattctcgatcccgctcagcgtaaaaggctacagcaacagatgcagcagcacgtgcagctcctcacacaaatccaccttcttgccacatgtaatcctaatctgaacccggaagcctcatcaactaggatttgcctgaaagaacttggcactttcgcccaaagtagcatcgcattacatcatcagtataacccaaagttccagaccttattccagccttgtaacctcatgggggctatgcagctgatagaagatttctcgacccacgtctcaattgactgctcccctcataaaactgtgaagaaaaccgcaaacgagttcccttgtttgcccaagcaggtggcttggatcctggctacatcaaaggtattcatgtatcctgaacttctcccggtctgcagcttaaaagccaagaatccacaggataaaattttgttcactaaagccgaggataataagtacctgctgacatgcaagactgccaggcagctgactgtgagaattaaaaatcttaacatgaacagagccccagacaatattatcaagttttacaaaaaaaccaagcagcttccagtgctggggaagtgttgcgaagaaattcagccgcaccagtggaaaccacccatagaaagggaagaacaccgcctgcctttctggctgaaggcaagtctgccatccatccaagaagagctgcgtcacatggcagacggcgctcgggaggtgggaaacatgacggggaccacagagatcaatagcgaccagggtcttgaaaaagacaatagcgagctgggctctgagacccggtatccgctgctgctgccgaagggagtggtgctgaaacttaaacccgtcgctgatagatttccgaagaaggcctggcgccagaaacggtcaagtgtgctgaaacctcttctgattcagccgagcccgtctttacaaccctcatttaacccaggcaaaacccctgcccagagcacacatagtgaagctccaccttccaagatggttttgcgaatacctcatccaatccaacccgctaccgttctgcaaactgtgccaggagttcccccactgggtgtgtccggtggagagtcctttgaatccccggctgccctccctgccatgccacctgaagccagaacatcttttcccttaagcgaaagtcagactcttctgtcatccgcccctgtgccaaaggtgatgatgccgtctccagcttcaagtatgttccgtaaaccctacgtccgaaggagacctagtaagcggagaggagctcgcgctttccggtgtattaagcccgcaccggttatacacccagcctccgtcatatttaccgtgcctgccacaactgtgaagatcgtgtccttaggcggagggtgcaatatgatccagccagtaaatgccgctgtcgctcaatcaccccagactatcccaattgccactctgctcgtcaaccctacctcctttccgtgtcccctcaatcagcccttggtcgcctcctctgtgagtcccctgatagtgagtggtaattcagtaaacctgcctataccctctactccggaggataaggcccacatgaacgttgatattgcatgcgctgtcgctgacggcgaaaacgcgttccagggattggaaccgaagctggagccgcaggagttgtcaccacttagtgccacagtgttccccaaggtggagcactcaccaggaccacctcctgtcgataagcagtgccaggaaggtctctcagaaaactcagcgtaccgctggaccgtcgtcaaaacagaggaagggcgtcaggcactcgagccactgccacaggggatccaggagtccctcaacaactcttccccaggggatcttgaagaggtagtgaagatggagcctgaggacgctaccgaggaaatctccggctttctgtag

SEQ ID NO: 27732 - DNA, 1380 bp, synthetic construct
  source 1..1380: mol_type = other DNA; note = Synthetic coding sequence
atggcagcatccgcttctgccgctgccggagaggaagactgggttctgccatctgaggtcgaagtcctggagtccatataccttgatgagctccaggtgatcaagggaaatggcaggacatccccctgggagatatacattaccctgcaccctgcaacggctgaagaccaggacagtcagtacgtgtgctttacactcgtcctccaggtcccggctgagtatccccatgaggtgccacagatctccattaggaatccacggggactctcagacgagcagatccacacaatcctccaggtgctgggccatgtggccaaagccggattaggcaccgctatgctgtatgagttgattgaaaagggcaaagagatcttgaccgataacaacatcccacatggtcagtgcgtcatttgcctgtatggcttccaggagaaggaggcctttacaaaaactccttgctatcattacttccactgtcattgcctggcaaggtacatacaacacatggagcaagaactgaaggcccaaggccaagagcaggagcaggagaggcaacacgctacaactaagcagaaggccgtgggggttcagtgtccagtgtgtagagaacccctggtatacgatttggccagtctcaaggcggcacctgagccgcagcagccgatggagctttatcagccgtccgcagagagtttgaggcaacaagaggagaggaaacgcctgtatcaacgccaacaggagcggggagggataatcgacctggaggctgaaaggaacaggtatttcatcagtctccagcagccccctgcgcctgcagagccggagagcgctgtggatgtgagtaagggttcccagcccccttctacactcgccgcagagctaagcacaagtcccgctgtacagagtaccctcccgcctcctttgcctgtggctacccagcacatttgtgaaaaaattccgggaacaagatctaaccagcagaggctgggcgaaacgcagaaagccatgctagatccccctaagccatctagggggccatggcgacagccggagcggcgtcacccaaagggcggagagtgtcacgcacctaaaggcactcgggacacccaggagctgccacctccagagggcccacttaaggaaccaatggacctgaaacctgagccccactcacagggcgtcgagggccctccacaggaaaaaggacctggctcatggcagggacctccgcctaggcgaacaagggactgtgtgcggtgggaaaggagtaagggcagaacaccgggatcttcctatccccgacttccccgaggacagggagcgtatcgccctggtacgcgcagggagagcctaggcttagagtctaaagatggaagctag

SEQ ID NO: 27733 - DNA, 2079 bp, synthetic construct
  source 1..2079: mol_type = other DNA; note = Synthetic coding sequence
atgggcagcgctgcagacgtaaggttcagtctaggcaccactactcatgctcccccaggggtacacagaagatactccgcactgagggaagagtcagccaaagactgggaaacaagccccctgcccggaatgctggccccagccgctggaccagcttttgactcggacccggagattagtgatgtcgatgaagatgaacctggtggtcttgtcggctctgcagatgtcgtttccccaagcgggcattcagacgcccagacacttgctatgatgttgcaggaacagttggacgccataaacgaggagatccgtatgatacaggaagagaaagaatcgactgaactccgagccgaggagattgagacgagggtgacttcaggcagcatggaggctctcaacctgaagcaactgcgcaaacgaggcagcattcccacatccctcacagcgctgtccctggcctctgcgtcgccacctctgagtgggagatctacccccaaattaactagccgttcggcggctcaggacctggataggatgggcgttatgacattaccttccgatttgcggaaacataggcgtaagttattatccccagtctcccgggaggagaaccgggaggataaggccaccatcaaatgtgaaaccagtcccccttcgtctcccaggacacttaggcttgagaagctgggccaccctgccctttcccaggaagagggcaagagtgcactggaagatcagggctccaacccttctagctccaactcgtctcaggacagtctgcataaaggagccaagcgaaaaggcatcaagtcatccattggcagattgtttggcaagaaagagaaaggcagattgattcagttgtcccgcgatggcgcaaccgggcatgtcctgttaactgacagtgaattttcaatgcaggaaccaatggtgccggcaaagctcggcacccaagccgagaaagatcgtagattaaagaagaaacaccagctgctcgaggacgcacgtcgcaagggcatgcctttcgcacaatgggatggccctaccgtggttagctggttagaattatgggtgggcatgccagcatggtatgttgccgcttgtcgggctaacgtgaagtcaggcgcaataatgagcgcgctgagcgatactgagatacaaagagagatcggcatttctaatgccctacatcgactcaagctgcgtctcgccattcaggaaatggtgtccctgacctctccatcagcccctccaacttcccgcacctctagtggcaatgtgtgggttacccacgaagagatggagactttagaaacaagcaccaaaaccacgctggcttatggcgacatgaaccacgaatggatcggaaacgagtggctgccgagcctgggcctccctcagtatagatcttactttatggagtgcctggtcgacgcacgcatgctggatcatctgacgaagaaagatctacgagtgcacctaaagatggttgactcttttcacagaacttcgctgcagtacggaatcatgtgtctcaagaggctaaattatgatcgaaaagagcttgaaaaaaggcgggaagagagccagcacgaaatcaaggacgtattagtgtggacaaatgatcaagtagtgcactgggtccagagcatcgggctccgcgactacgctggcaaccttcatgaatctggcgtccacggcgctctgttggctttagacgaaaacttcgatcacaatacactggccttgatcctgcagattcctacccagaatactcaggctagacaagtaatggagcgtgagttcaacaatcttttagccctgggtaccgaccggaaacttgacgacggtgacgataaggtctttagaagggcgccttcttggcggaagcgctttagaccgcgagaacatcacgggaggggcggaatgcttagcgcaagtgcagaaactctgcctgcaggattcagagtcagtaccttggggacccttcaacctcccccagctccaccgaagaagattatgcctgaagctcacagccactatttgtacgggcatatgctgtctgcgttcagggactag

SEQ ID NO: 27734 - DNA, 369 bp, synthetic construct
  source 1..369: mol_type = other DNA; note = Synthetic coding sequence
atggccccacagaaagacagaaaaccgaaacgctcaacttggcgattcaaccttgacttgacacatcctgtagaagacgggatctttgatagtgggaacttcgagcagttcctgcgagagaaagtcaaggttaacggcaaaaccggcaaccttggaaatgttgtgcacatcgaacggtttaaaaacaagattactgtggtttctgaaaaacagttctctaagagatacctgaaatacttgacaaagaagtacctgaaaaagaataacctgcgcgactggctaagagtggtggcctctgataaagaaacttatgagctgaggtacttccagatctcccaggatgaggatgagtcagagtcagaggactag

SEQ ID NO: 27735 - DNA, 936 bp, synthetic construct
  source 1..936: mol_type = other DNA; note = Synthetic coding sequence
atgcagtacatctctcatattttcggtgtaataaactgcaacggcttcacactctccgatcagagaggactgcaagccgtcggcgtgggcatcttcccaaatctcgggttggttaaccatgactgctggcctaattgcactgttatttttaataacgggaagattgagttgcgagctttagggaagattagcgaaggcgaggaattgacggtgtcatacatcgatttcttaaacgtgagtgaagagagaaagaggcagctcaagaaacaatattatttcgactgtacttgcgaacactgccagaagaagttaaaggacgacctgtttctgggagtcaaggataacccaaaacctagtcaggaagtggtcaaggagatgatccagtttagcaaggatacactggaaaaaattgacaaggctagatcagagggcctctaccatgaggtagttaagttatgcagagagtgtctagaaaaacaagaaccggtgttcgcggacactaatatttacatgcttcggatgctgagcatagtgagtgaagttttgtcttatctccaggcattcgaggaggcctctttctacgcgaggcgtatggtggatggctacatgaagctctatcacccaaataacgctcaactggggatggccgttatgagagccggtttgaccaattggcatgccggaaacattgaggttggacatggcatgatttgcaaggcttatgctattcttttggtgacccatgggccttctcaccctattaccaaagatcttgaagctatgcgtgtccagaccgagatggagctaagaatgtttcgccagaatgagttcatgtactataagatgcgggaagccgcactgaacaatcagcccatgcaggttatggccgagccatctaacgaacctagcccagcactgtttcacaaaaagcagtag

SEQ ID NO: 27736 - DNA, 1542 bp, synthetic construct
  source 1..1542: mol_type = other DNA; note = Synthetic coding sequence
atggcagagctgcagatgcttctggaggaggagatccctggcggtcgcagggccctgttcgacagctacactaatttggaacgtgtcgccgattattgtgagaataactatatacagagcgccgacaagcagcgtgccctggaagaaaccaaggcctacactacacagtcactcgcttcggtggcctaccttatcaacacacttgccaacaacgttctgcagatgcttgacattcaggctagccaactgaggcgtatggagtccagcatcaatcatattagtcagacagttgatatacataaagaaaaagtagcacgcagagaaataggcatcctgaccaccaacaagaatacctccaggacccataagataatcgccccagccaatctggagaggcccgtacgctatattagaaaacctattgactacaccattctggatgatatcggacatggggtaaagtggctgctgcgatttaaggtttcaacccagaatatgaaaatggggggactgcccagaaccaccccccctacccagaagccgccttcgccaccaatgtcgggtaaaggtactctcggcaggcactctccataccgcacacttgagcccgtccgtccgccagttgttccaaatgactacgtcccgtcccctactcggaatatggctcccagccagcagtcccccgtcaggacagcttcggtaaatcaacgaaaccgcacatatagtagtagcggctcttcagggggtagccacccaagcagtcgaagctcatccagggagaactccggaagcggcagcgtcggcgtgcccatcgctgtgccgacaccctcacctccatccgtcttccccgctcctgctgggtccgctgggaccccacctctgccagccacatccgccagtgccccagcccctttagttcccgcaaccgtgccctcttcaaccgccccagacgcagcggcagggggtgcgcagacactggccgatggcttcacaagccctacaccccctgtggtgagctctaccccaccaaccggacatccagtacagttctattcaatgaacagacccgcatcaaggcacaccccaccaaccattgggggatccctgccataccgtaggcccccatcaataaccagccagactagtcttcaaaatcagatgaacggtggacctttttacagccagaacccagtgagcgataccccccctcccccaccgccagtggaagagcctgtatttgatgagagtcccccacctcccccaccgccagaagactacgaggaagaggaggctgctgttgtcgagtactcagatccctacgcagaagaggacccaccctgggccccacgttcctatttggaaaaagtggttgccatttatgattataccaaggacaaagaggacgaacttagcttccaggaaggcgcaatcatctacgtcattaaaaagaacgacgatggatggtacgaaggagttatgaacggcgtgaccgggctctttccagggaactacgtggagtccatcatgcattattctgaatag

SEQ ID NO: 27737 - DNA, 1170 bp, synthetic construct
  source 1..1170: mol_type = other DNA; note = Synthetic coding sequence
atgcccctagagaacctcgaagaggaaggcttacctaagaatcctgacttacgcatcgctcagctgcggttcctgttgtccctgcccgaacatcgtggagacgctgcagtacgtgacgaactgatggccgcagtgagggataacaacatggcaccctactatgaggccctgtgtaagagtctcgactggcagatcgacgtggatcttcttaacaaaatgaagaaggcgaacgaggatgagctcaagcgcctggatgaggaactcgaggatgccgagaagaacctgggggagagcgagattcgggatgcaatgatggccaaggccgagtacctctgccgcattggggacaaggagggagcattaacagcctttcgcaagacctatgacaaaactgtagcgctggggcaccgcctggacatagttttttacttgttgcgcatcggtttgttttacatggacaacgacttgataacgcgtaatacggaaaaagccaagagtcttatcgaggaggggggagactgggaccgtcgaaacagactaaaagtgtatcaagggctttattgtgtggccatccgtgatttcaagcaggctgccgagctctttttagacacagtttccaccttcacttcttacgagctgatggattataagacttttgtgacctacactgtgtacgtttccatgatcgcgttagagagacccgacctgagggaaaaggtcatcaagggtgctgaaatcctcgaagtgctccacagcctgcctgctgtccggcagtatctgtttagcctctatgagtgtcgttatagtgtgttttttcaatccttagccgtggttgagcaagaaatgaagaaggattggttgttcgccccacattacagatactacgtacgagaaatgcgcattcatgcctactctcaactgttagagtcatatcgttctctcactttagggtatatggccgaggcattcggtgtaggggttgaattcatagaccaggaattgtcccgctttattgccgctgggagactgcactgcaaaattgataaggtcaacgagattgtggagacgaatcggcctgattctaagaattggcagtaccaagagacaattaagaaaggggatttgcttctaaaccgcgtccagaaactctcccgggtgattaatatgtag

SEQ ID NO: 27738 - DNA, 420 bp, synthetic construct
  source 1..420: mol_type = other DNA; note = Synthetic coding sequence
atggccaatatcgccgtccagcgcatcaagcgagagttcaaggaagtgttgaagagcgaggagacctcaaaaaaccagattaaagtcgaccttgtagatgaaaacttcactgaacttagaggcgagatcgccggacccccagacaccccctatgaaggcggaagatatcaactggagataaagattcccgagacctatccctttaaccccccaaaatataaacaaaaccctgagatgtttaaacaaaccgcccgtctttgggctcacgtatatgctggagcccctgtgtcctcacccgaatatactaaaaagatagagaatctgtgtgccatggggttcgaccgcaacgcggtgattgtcgcactatcctcaaaatcatgggacgtggaaacagctacagagcttctcctgtccaattag

SEQ ID NO: 27739 - DNA, 1203 bp, synthetic construct
  source 1..1203: mol_type = other DNA; note = Synthetic coding sequence
atgaattttacggtgggcttcaaacctctcctgggagacgcacatagcatggacaacctggaaaagcagctgatctgccccatctgcttagagatgtttagcaagcctgttgtcatactgccatgtcaacacaatctgtgccggaagtgtgcgaatgacgtgttccaggcaagcaaccccctatggcagtcaaggggatccactacggtctcttcagggggaagatttcgctgcccatcgtgcagacacgaagtggtgctggaccggcatggtgtctacggacttcaacgcaatctgctcgttgagaacattatcgacatttacaagcaggaatcctcgcgaccactccacagcaaggctgaacagcacctcatgtgcgaggagcacgaagaggagaaaattaacatatactgcctttcctgtgaggtgcctacctgttcgctctgcaaagtgtttggggcacacaaagattgcgaggtcgcgccacttccaacaatctacaaacgccagaaaaaacaagatcttacactcctccccaggttggagtgctccggaactaatacgacctattgttcattagacttgccctcgagctcagacccacccattttggcttcccaaaatacaaagatcatcgactctgaactctcagatggcatcgccatgctggttgctgggaatgatcgggtgcaggctgttatcactcagatggaagaagtttgccagaccattgaagacaatagccgaaggcagaaacaacttttaaaccagcgattcgagagtctgtgcgcagtactggaggaaaggaagggtgagttgctccaagcactcgctcgcgagcaggaggaaaaactgcagcgcgtgaggggcctaattaggcagtatggagaccacctcgaagcttcaagtaaactggttgagagtgctatccagtcgatggaagagccccagatggccctgtatttgcagcaggcgaaggaattgattaacaaagtaggggctatgtcaaaggtggagctggccggacggcctgaacccggatacgaatctatggagcagttcacggttagagtcgaacacgtcgctgagatgctaaggacgatcgactttcagcccggagcctcgggggaggaagaggaagtggcaccagacggagaagaaggatcggcgggacccgaggaagaacgcccagacggcccatag

SEQ ID NO: 27740 - DNA, 198 bp, synthetic construct
  source 1..198: mol_type = other DNA; note = Synthetic coding sequence
atgttcctgtcagctgtcttttttgccaaatcgaagtcgaagaacatcctggtgcgcatggtctccgaggccggtaccggattttgctttaataccaagcggaatcggttgagagagaaactgacactgctccattatgatccggtagttaaacagagggtgcttttcgtggagaaaaaaaaaatccgaagcctatag

SEQ ID NO: 27741 - DNA, 2919 bp, synthetic construct
  source 1..2919: mol_type = other DNA; note = Synthetic coding sequence
atgcgtccagagggagccggtatggagctgggcggtggcgaagaaaggttgcctgaagagtcccgaagagagcattggcagttactagggaacctcaaaacaaccgtcgaggggctggtttccactaatagtccaaacgtgtggtctaagtacggcggactagagagactttgccgggacatgcagtcaatcctctaccatggattaatacgcgatcaggcatgtaggaggcagacagactactggcagtttgtgaaagacattcgatggctgagtcctcactccgctctccacgtggagaaattcatttccgtgcacgaaaatgatcaatcctcagcagatggcgcttctgagagagccgttgccgagttgtggctccaacacagcctccagtatcattgcctgtctgcacaactgcgcccattgttgggagaccggcagtatattagaaaattttacacggacgctgcttttctactgtctgacgctcatgtgaccgctatgctgcagtgtctggaggccgtcgagcagaataacccacggttgcttgcacagatagatgcgagcatgtttgcgaggaagcatgagtcacccctactggtcactaagagtcagtctctgactgccttgccatcgtccacatacacaccacctaattcttatgctcagcatagctattttggctctttctcaagcctgcaccagtccgtccccaacaacggatccgaaaggaggtctacttctttcccattatccggaccccctcgtaaaccccaggagagtcgtggacacgtgtcacccgcagaggatcagaccattcaggctccacctgttagcgtttcggctcttgcccgtgatagtcccctgactcccaacgagatgagttcatcgactttgacatcccccatagaggctagctgggtgtcctcgcagaacgattctcccggtgatgcgagcgaaggtccagagtatctggctattgggaatctggatcctcggggaagaacagccagctgccagagccatagtagcaatgctgagtcgtcctcgtcaaacctcttctcctcaagctcctcgcagaaacctgatagcgctgccagcagcttgggcgaccaggagggcggaggcgagagccaactgtcttccgtgcttcgcagaagttctttctctgaggggcagactctgacggtgacatccggtgctaaaaaatcccacattcgcagccactcagatactagcattgcatctagaggcgctccagagtcatgcaatgataaagcaaagctaaggggacccctcccatactctggccagagttcagaggtgtctactcctagttcgctctacatggagtacgaaggcggtcggtatctatgttctggagaggggatgttccggagaccttcagaaggacagtccttaatctcctacctgtcagagcaggattttggctcttgtgcagatcttgaaaaggaaaacgctcacttctctatcagtgaatctttgatcgctgccatagagttgatgaaatgcaatatgatgagccagtgcttagaagaagaagaggtggaggaggaggactctgacagggaaattcaagaactgaaacagaagatcaggctgagacgccagcagatcaggacaaagaatttgctgcccatgtaccaggaagcagagcacggaagctttagagtcacttcttcatcatcccagttctcctcccgagactccgcccagctttccgactcgggaagtgcagacgaggttgacgagttcgagatccaggatgctgatatacgcaggaataccgcatcttccagcaagtcgtttgtaagctcccaatccttctctcattgtttcctccattccacctccgccgaggcggtcgctatgggactcttaaagcagttcgaagggatgcagctcccggctgccagcgaactagaatggctggtccccgagcatgatgcaccccagaagctcctcccaattcccgactctctacccattagcccagatgatggccagcacgccgatatctacaaactgaggatccgggttcgtgggaatctggaatgggctcctccaaggccccagattattttcaatgtgcacccggcacccaccagaaagatcgccgtagctaagcagaattatcgctgcgcgggttgtggtattaggaccgatccagattacataaaacgcctgaggtactgcgaatatctgggcaagtacttttgtcagtgctgtcatgagaacgcccaaatggcgattccttcgcgcgtgctgagaaagtgggacttttcgaagtactacgtctctaacttctccaaggatctgctaatcaaaatatggaatgaccctctcttcaatgtgcaggatataaactctgccctgtatagaaaggtcaagctgttgaaccaggtgaggcttctgcgggtacagctgtgtcacatgaagaatatgtttaaaacttgtagattagcaaaggaactgctcgactcctttgacacagtgccagggcatctcacagaggatctccacctctattccttaaatgatctgacggcgacacggaaaggcgagctggggcctagattggccgaattgactagagccggagcaacacatgtggaacgctgtatgctgtgccaagcaaaaggattcatctgtgaattttgtcagaatgaagacgatattatattcccttttgagctccataagtgccgaacatgcgaggagtgcaaggcctgctaccacaaggcatgcttcaagagcggtagttgcccacgctgcgaacgcctgcaggccaggcgagaagccctcgcgaggcaaagcctagagtcttacttaagcgactacgaagaggagcccgctgaagcactcgcccttgaagccgctgtgttagaggctacctag

SEQ ID NO: 27742 - DNA, 1161 bp, synthetic construct
  source 1..1161: mol_type = other DNA; note = Synthetic coding sequence
atggcggcagtagagacgagggtctgcgagactgacggctgctcaagtgaggcaaaattgcagtgtccaacctgtattaaactcgggatccaagggtcatacttttgcagccaggaatgcttcaaaggaagctgggccacccacaaattgttacacaagaaggccaaggatgaaaaggcgaaacgagaggtttccagttggacggtggaaggtgacataaacaccgacccttgggccggttacaggtataccgggaagcttcggccacattacccactgatgcctacccgaccagtgccttcatacatccagcggccagattatgctgaccaccctctcgggatgagcgagtccgagcaggcacttaagggtacaagtcagatcaagctgctgtcaagcgaggatattgagggcatgagactggtgtgccgactggccagggaagtgcttgacgttgccgcagggatgattaaacctggggtgaccaccgaagaaattgatcacgctgttcatcttgcttgtattgcccgaaactgctatccttcccctctgaactattacaactttcctaaatcttgttgtacctcggttaacgaagttatctgtcatggcattccagatcgcaggccccttcaggaaggtgatatcgtaaacgtggacatcaccttgtacaggaacgggtatcacggggatctgaacgagacgttcttcgttggtgaggtggacgacggggctcgaaagctggttcaaaccacctatgagtgcctcatgcaggccattgatgccgtgaaacctggagtccggtacagagagcttggcaatatcatccagaaacacgcccaggccaatggattcagtgtcgtgcgctcgtattgtggccacggtattcacaagctgtttcacactgcgcctaacgtgcctcactatgccaagaataaagccgtcggcgtcatgaaatcgggtcatgtgttcacaatcgagcctatgatatgtgaagggggttggcaagacgaaacctggcccgacggctggactgccgtgactcgcgatggaaaacggtctgcccagtttgagcacacactgctggtgactgacactggatgcgaaatactgacacgcaggcttgatagtgctcggcctcacttcatgtcccagttttag

SEQ ID NO: 27743 - DNA, 738 bp, synthetic construct
  source 1..738: mol_type = other DNA; note = Synthetic coding sequence
atgggcaggctcgacggtaaggtgatcattctcacggccgcagcacagggaatcggacaggctgctgccctggcattcgccagagagggggctaaggttatcgcaaccgacataaatgagtcaaaactgcaagaattggagaaatatcccggaatccagaccagagtacttgacgtgactaagaaaaagcagatcgatcaatttgcaaatgaagtggagagactcgacgttctgtttaatgtggctgggttcgtccatcatggcactgtgttggactgcgaagagaaggattgggactttagcatgaacctgaacgtgagatctatgtaccttatgattaaagcctttctgcctaagatgttggcccagaagtccggtaatatcataaacatgagttccgttgcatcctcagtgaagggcgtcgtgaacagatgtgtttactcgacgacgaaggctgccgtgattggtctgacaaagagtgttgcggctgactttattcaacagggcatccgctgtaattgcgtttgccctggaaccgtcgataccccctccttacaagaacggattcaggccagggggaaccccgaggaggccagaaatgatttcctgaagaggcaaaagaccggcagattcgcgacagcggaagagattgcgatgttgtgtgtttatctggctagcgacgaaagcgcatatgtcacaggcaacccagtgattatagatgggggatggagtctgtag

SEQ ID NO: 27744 - DNA, 2520 bp, synthetic construct
  source 1..2520: mol_type = other DNA; note = Synthetic coding sequence
atgagcgtagtgggcatcgacctgggcttcctcaattgctatattgctgtagcacgcagtggtggcatcgagacgatcgctaacgaatactccgatagatgcaccccggcatgtataagtttaggatcgcggactagagccattgggaatgccgcaaaatctcagatcgtcaccaacgtgcggaacacgattcacgggttcaagaaacttcatggaagatccttcgatgaccccatcgttcaaactgagcgcattcgcctgccatatgagctccaaaaaatgcctaatggcagcgctggcgttaaggtgcggtatctcgaagaagagcgccctttcgccattgagcaggtgaccggaatgctgcttgcgaaactgaaagaaacttcagaaaacgcccttaaaaagcccgtggccgactgtgttatttctataccctcgttctttactgacgctgaaaggaggagtgtgatggcagctgcgcaggtggctggtctgaactgtctgagactgatgaatgagaccacagctgtggccttagcctacggcatttacaaacaggaccttcccccactggacgaaaaacctagaaacgtggtgtttatcgatatgggccactcggcttatcaggtgctggtgtgtgcctttaacaagggtaagttgaaggttctggccactacgttcgatccctatctggggggacgcaattttgatgaggctcttgtggactacttctgcgacgaattcaaaacaaagtataagataaatgtgaaagagaactcacgtgctttgttgcggctttaccaggagtgcgagaagctcaaaaaactcatgagcgctaacgcatccgatctgccactgaatatcgagtgcttcatgaacgacctggatgtgtcatctaagatgaacagggcacagtttgagcagttgtgtgcttcattgctggcgagggtggaaccgcctctgaaagctgtcatggaacaggcaaatcttcagcgagaagacattagttctatagagattgtgggtggagccaccaggattcccgcagtgaaggagcagatcacgaagttttttctcaaagacatcagcacaaccctcaacgcagacgaggctgtcgccagagggtgtgctctgcagtgtgccatcctttcccctgcattcaaagtgagggagttttcaatcaccgacctagtgccttacagcatcacactccgctggaaaacctcgttcgaagatgggtctggagaatgcgaggtattctgtaagaatcatccagcacctttctccaaggtcattacttttcacaaaaaggaaccattcgagctggaagctttctatacgaacttgcacgaggtcccctaccctgatgcacggattggttcgtttaccatccagaacgtgtttccccaatcagatggcgatagctccaaagtgaaggtcaaggttagagtgaacattcacggcattttctccgtggcctccgcaagcgtgatcgagaaacagaatctggagggcgaccatagtgatgctccgatggagacagagacttctttcaaaaatgaaaataaagacaatatggataaaatgcaggtggatcaggaggaaggccaccaaaagtgccatgctgaacacacccctgaggaggagattgatcacactggcgcaaaaacaaaaagtgccgtaagcgacaagcaggatagactgaaccagacactaaaaaaggggaaagtgaaatccattgatctaccaattcagtcatcactgtgccgacagctgggccaggatctactgaattcttacatcgagaacgaggggaagatgataatgcaagacaaactcgagaaggagcgaaacgatgcaaaaaacgctgtggaagaatatgtgtatgattttcgcgatcggcttggcactgtctatgagaagtttataacccccgaggacctttctaaattaagtgccgttctggaagataccgagaattggctgtatgaggatggtgaggatcaacctaagcaggtttatgtggataaacttcaggagctcaaaaaatatggtcagccaatacagatgaaatacatggagcacgaggaacggcctaaggcgttaaatgacctcggcaagaaaatccagttggtcatgaaggtcattgaggcttaccgcaacaaggatgagcggtacgatcacctggacccaactgagatggaaaaggtggagaagtgtataagcgacgccatgagctggttgaacagcaaaatgaatgcccaaaacaagctaagtttaactcaggatccagtagtgaaggtaagtgagatcgtggccaaaagcaaggagctggataatttttgtaatcctataatatataaaccgaaaccgaaggccgaggtgcctgaagacaagccgaaagcaaattctgagcacaacggtccaatggacgggcagagcggcaccgagacgaaaagcgacagcacaaaggactcttcacaacacaccaagagtagtggcgagatggaagttgattag

SEQ ID NO: 27745 - DNA, 1224 bp, synthetic construct
  source 1..1224: mol_type = other DNA; note = Synthetic coding sequence
atggccgctccctgtgctgaggatccttccctcgagcggcattttaagggccatcgtgatgccgtgacctgcgtagacttttcgattaatactaaacagttagctagcggatccatggactcctgcctgatggtctggcacatgaagccacagtctcgcgcttataggtttacgggacacaaggacgccgttacatgcgtaaacttctctcccagtgggcatctgttggcaagtggaagtcgggacaagacagtgcgcatatgggtacctaacgtcaaaggagaatctactgttttccgagcacatacagctacagtgaggtctgtgcatttctgcagtgatgggcaatcattcgtgaccgcaagcgacgataaaactgtgaaagtgtgggctacccatcggcagaaattcttgtttagtctgagccagcacattaattgggtgcggtgtgccaagttctccccagacgggcgactcattgtgtcagcttccgacgataagacagtaaagttgtgggacaaatcctccagagagtgtgtgcattcatactgtgagcacggcggttttgtgacctacgtggattttcaccctagtggcacttgcatcgctgccgcaggtatggacaacaccgtgaaggtgtgggatgtacggacccaccgtctgctgcagcattaccagctgcatagcgcagccgtgaacggactgtcctttcatcctagcggaaactacctcatcactgcaagctcagactctacactgaagatccttgacctgatggaaggtaggcttctttacaccctgcatggacatcaggggcctgcaacgacggttgcctttagccgtaccggagaatattttgcaagcggaggctccgatgaacaggtcatggtttggaagtctaacttcgacatcgtggatcacggagaagttaccaaggtccctcgcccacctgctaccttagcatcctcaatgggcaatctgcctgaggtggactttccggtccccccagggagagggaggtcagtcgaaagcgtgcaatcacagccgcaggaacccgtgtcggtcccacagacacttacgtccacgctagaacatattgttggtcagttagatgtcttaacacagaccgtctctattttggagcagagacttacactaaccgaggacaaacttaagcagtgtctggagaaccaacaactcataatgcagcgggcaacaccatag

SEQ ID NO: 27746 - DNA, 1173 bp, synthetic construct
  source 1..1173: mol_type = other DNA; note = Synthetic coding sequence
atggccaccggcgatttgaagcggtcattaaggaaccttgagcaagttttgcggcttcttaattacccggaggaagtagattgtgttggattaataaagggtgaccctgccgcatcattgccaatcatctcctactcttttacatcctacagtccctatgtgaccgaacttataatggagtccaacgtggagctgattgctaaaaatgacctcagattcatcgatgcggtctacaaactgttacgagatcaattcaattacaaacccattctgactaaaaaacagttcatccagtgcgggttcgccgagtggaagatccagatcgtctgcgatattctgaactgcgtgatgaagaaacataaagagctttccagcttgcagaagataccgtcacaacagcgtaagaaaatcagttccggtaagtccgagcctccattgggcaatgagaagataagtgcagaagccgtaggtgttgatatctcaggacgcttcatgacgtctggaaaaaagaaggctgtcgtgatccggcacctgtacaacgaggacaatgtcgatatctcagaagatacactgtcaccaattaccgatgtgaatgaggccgtggacgtgtccgatttgaatgctacagaaattaagatgcccgaggtcaaggtgcccgagatcaaggccgaacaacaggacgtgaacgttaatccagaaatcaccgccctgcaaacgatgctggccgaatgtcaggagaatctgaagaaactgacctctatcgagaagagactggattgcctagagcaaaaaatgaagggcaaagtgatggtagatgaaaacacctggacaaatctgctttcccgagtaacgctgctagagacagaaatgctattatcaaaaaaaaatgatgaatttatcgagttcaatgaggtgtcggaggattatgctagctgttccgacatggatctgctcaatccccaccggaagtccgaggtggagagacccgcatctatcccgctcagctccggatatagcaccgcaagctcagactcaactccaagagcttctacagtaaactactgtgggttaaacgaaatttcagaggagacaaccattcagaagatggagcgtatgaaaaaaatgtttgaggaaacagctgagctgctgaaatgtccaaatcactacctttag

SEQ ID NO: 27747 - DNA, 2601 bp, synthetic construct
  source 1..2601: mol_type = other DNA; note = Synthetic coding sequence
atgccagccgtttcccttccacccaaagaaaatgcacttttcaaaagaatcctgcgatgttacgaacacaagcagtatcggaacgggttgaagttttgtaagcagatcctaagcaatcccaagttcgcggaacacggcgaaaccctggccatgaagggcctgacacttaactgcctggggaagaaagaggaggcttatgagctggtgcggaggggcctgcgcaatgatttgaaatctcatgtctgctggcatgtctacggactcctacagcggtccgacaaaaagtatgacgaggcgatcaaatgttacaggaacgcactgaaatgggataaggacaacctgcagatcttgcgggacctcagcctgcttcagattcaaatgcgagacttagagggctatcgagaaacccgatatcagctgctacagttgcgccctgcgcagagagcgagctggattggatatgccattgcctatcacctcctggaagactatgaaatggccgctaagatccttgaagaatttaggaaaacacagcagacaagccctgacaaggtagactacgagtactcggaactgctgctgtaccagaatcaggtgctacgggaggctggtctctaccgcgaagctctggagcatctctgcacttacgagaagcagatctgtgataagctggcggtagaagagactaagggggagctactgttacagctttgcaggctcgaggatgcagccgacgtttacagagggctgcaggagaggaaccctgaaaattgggcgtactataagggcctggagaaagcgctgaaaccggcaaatatgctggagcgcttgaagatctacgaagaggcatggaccaagtacccccgagggcttgtgccgaggaggctcccactgaactttctgtcaggtgagaagtttaaagaatgtctggacaagtttctgaggatgaacttttctaagggctgtcccccagtgtttaacactctgcggagtctgtataaggataaagaaaaggtcgcaattattgaagagctggtcgtggggtatgagacttcccttaagagttgccgcctttttaacccgaacgacgatgggaaagaggaacctcccaccactctcctctgggtgcagtactatctcgcacaacactacgacaaaatagggcaaccctccatcgccctggagtatatcaacactgcaatcgaaagtacgcctacactcattgaactgttcctcgtcaaagccaaaatatataagcacgcaggtaacatcaaggaagccgctcgctggatggatgaagctcaggcactggacacggccgaccgttttatcaactctaagtgtgccaaatacatgctgaaagcaaacctcattaaagaagcagaggagatgtgctcaaaattcacccgggagggcacctcagccgttgaaaatctcaacgagatgcagtgtatgtggttccagacggagtgcgcccaagcctataaggcaatgaataagtttggcgaagccctgaagaagtgtcacgaaattgaaaggcactttatcgagatcactgacgatcagttcgactttcatacctattgcatgcgtaaaattacccttcgctcgtacgtggacttgctcaagctggaggacgtgctccgacagcaccccttttatttcaaagccgcacgcatcgccattgaaatctacctcaagctgcatgacaaccctctaactgatgagaataaagagcacgaggctgacaccgcgaacatgtccgacaaggaactgaaaaaactccgaaacaaacagaggcgagcacagaaaaaagctcagatcgaggaagaaaaaaagaacgctgaaaaggagaaacagcagaggaaccagaaaaaaaaaaaagatgacgacgatgaggaaatcggcggaccaaaagaagagcttatccccgaaaagctggcaaaggttgaaacccctcttgaagaggccatcaagttccttacccctctcaagaacctcgtcaagaacaagattgaaacacacctcttcgctttcgagatatacttccggaaagaaaagtttttgctaatgctgcagtcagtcaagagagcttttgcaattgacagttcacatccatggctccatgaatgcatgatcagactttttaacacagctgtgtgcgagtcgaaggatttatccgacacagttagaacagtgctaaagcaagagatgaatcgcttatttggcgctactaaccccaagaattttaatgaaacattcctgaagcgcaactctgattcattgccacataggcttagcgccgctaagatggtttattacctcgacccgtcttcccagaagcgggctatagagctcgccacgactctagatgaaagtcttacaaatcgtaatctccagacttgcatggaagtcttggaagccctgtacgacggaagtctgggcgattgcaaggaagccgctgagatttaccgtgctaactgtcataaactgttcccatacgccctggcttttatgcccccaggctatgaagaggacatgaagattacggtgaatggagacagttctgccgaggcagaggagctggctaacgagatctag

SEQ ID NO: 27748 - DNA, 1293 bp, synthetic construct
  source 1..1293: mol_type = other DNA; note = Synthetic coding sequence
atggcgagctcggccaagtccgccgagatgccaactatctctaaaactgtaaaccctactcccgatccacaccaggagtatctggatccaagaataacaatcgccttattcgaaattggtagccactccccaagttcttggggttcccttccattccttaagaattcttcccaccaggtgacagagcaacagaccgcccagaaattcaacaacctcctaaaagaaataaaggacatcctcaaaaatatggcagggttcgaggaaaaaattactgaggccaaagaattgttcgaggagacaaacattacagaggacgtgtctgcccataaggaaaacatccggggattagataagataaacgaaatgctatctactaacctgcctgtgtccttggctcctgagaaggaagataatgaaaaaaaacaggaaatgatcctggaaacgaatatcacagaagacgtcagtgcacacaaagagaacattagaggcctggacaagatcaatgagatgctgagtacaaatctgccggtttcactcgctccagagaaagaggacaatgaaaaaaaacagcagatgatcatggagaaccagaacagtgagaataccgcacaggtattcgcacgagacctagtgaaccggctggaggaaaagaaggtgcttaatgagacccagcagagtcaagaaaaagccaagaaccgacttaacgtccaagaggagaccatgaaaatcagaaacaacatggagcagttactgcaggaagccgagcattggagtaaacagcacacagaattatctaaactgatcaagagctaccagaagagccagaaagacatatctgagactctcggtaataatggtgtgggtttccaaacgcaaccaaacaacgaggtgtcagccaagcacgaactggaggagcaggtcaaaaagctgtcacatgacacatatagcctgcagctgatggccgcattattggaaaacgagtgccagatcctgcagcagcgcgtcgaaattctgaaggagttacatcaccagaaacagggcaccctccaagaaaaaccgatacagatcaactacaagcaggacaaaaagaaccaaaagccttccgaggccaagaaagtggaaatgtataagcagaataagcaggctatgaagggaactttctggaaaaaggaccgatcctgccggtcactggacgtctgtctgaacaagaaagcgtgcaatactcagttcaacattcatgtagcacgcaaagcacttcgcggtaagatgagaagcgcttcaagccttcgctag

SEQ ID NO: 27749 - DNA, 5199 bp, synthetic construct
  source 1..5199: mol_type = other DNA; note = Synthetic coding sequence
atggcagcgatcggcagaggaagaagtctcaaaaatttaagagtgagaggaaggaatgacagtggcgaggagaacgtgcccctagacttaaccagagaaccctctgacaacctcagagagatcctgcagaacgtggctagattgcagggcgtcagcaatatgaggaagctggggcatctaaataattttactaagctgctctgcgacattgggcattcagaagagaaattggggttccactacgaggacatcattatctgcctgcgcttggctttattaaacgaggctaaagaggttcgggcagccggtctccgagctttacgctacctgattcaggactctagtatactgcagaaagtcctgaaattaaaagtggattacttaatcgcccgttgtatcgacatccagcagtcaaacgaggtggagaggacccaagctctgagactggtgcgcaaaatgattacagtaaacgcgagcctcttcccgagtagcgtgacaaatagcctgatcgccgtgggaaacgatggccttcaagagcgcgatcgcatggtgcgagcctgcatagcaattatttgcgaactggccttgcaaaacccagaagtcgtggccttgagaggtggattgaacacaatccttaagaatgtaatcgattgccagctaagtcgcatcaacgaagcacttattacaacaattctacatctgctgaaccacccaaagacaaggcaatatgttcgggctgatgttgagcttgaacggatactggctccttataccgattttcactaccgccattcccccgacacagctgagggccagttaaaggaggacagagaagctaggtttctggccagcaaaatggggattattgccacatttcgctcttgggcaggcattattaatctgtgcaaacccggtaactcgggtatacagtctctcattggtgtgctttgtatccctaatatggaaatccgaagaggactgctggaagttctgtatgacatattcaggctgcccctcccagtcgtgacggaggaattcattgaggccctgctgagcgtggatcccggacgctttcaggacagttggcgcttatctgacggattcgtggcagcggaggctaagactattctgcctcaccgcgctcggagtcgccctgacttaatggataattatctggccctcattctttctgcgtttattcgtaacgggctgctggagggtctagtggaggttatcactaacagcgacgaccacatttcggtccgcgcaaccatcttgctgggggagctgcttcatatggctaacaccatcttgccccactcacatagtcatcatctccactgtctcccaacacttatgaatatggcggctagcttcgacatcccaaaggagaagagacttcgagcgtctgccgctctcaattgtctcaagcgcttccacgaaatgaaaaaacgcggtccaaagccttacagcttacaccttgaccacatcatacaaaaggccatagctactcaccagaaaagggaccagtatctgagagtccagaaagacattttcatcctgaaagataccgaggaggcgctgctgatcaatctgagggattctcaagtgttgcagcataaagaaaatttggagtggaactggaatctcataggcactatcctgaagtggccaaacgtgaatttgcgaaactacaaagatgaacaattgcacagatttgtgaggagacttctgtatttttacaaacctagtagtaaactgtacgctaatctggatttggactttgccaaggctaaacagttgaccgtggtgggatgtcagttcaccgagtttctcctcgaatcggaagaggacgggcagggatatttggaggatttggtcaaagacatagtacagtggctcaatgcgagctcaggaatgaagccagaaagaagcctgcaaaacaacgggctgttgactaccttgagccagcactactttctatttattggaactctgtcctgccacccccacggcgtgaagatgcttgaaaagtgttccgtgtttcaatgcctccttaacctgtgctctctgaagaaccaggaccacctgttgaaactaactgtctcttcgctcgattactctcgagatgggctcgcacgcgtgatcctgagtaagatcctcactgctgcaacagatgcatgccgcttgtacgccactaaacacttacgagtcctccttcgcgcaaatgttgaatttttcaataattggggcattgaactgttggtgactcaactgcatgacaagaacaaaacaattagctctgaggcccttgacattttggacgaagcatgcgaggacaaggcaaatctccacgccctgatccagatgaaaccggctctttctcacctcggagacaaagggttactgttgttactgcgtttcctttctatccccaaaggcttttcatacctgaatgaacgaggatacgtggccaagcagcttgagaagtggcaccgtgagtataattctaagtatgttgatctcatcgaagagcagctcaatgaggcccttactacctataggaaacctgtggacggcgataactacgttaggcgctccaaccagcgtttgcagaggccacatgtgtacctcccgattcatctgtatggccagctcgtccaccataaaacaggctgtcacctactggaggtccaaaacatcatcaccgagctatgcagaaacgttaggactccagatctcgacaagtgggaagaaatcaagaaactgaaggcctccctgtgggccctgggcaatattggctctagcaattggggcctgaacctcttgcaggaggagaatgtgataccggatatactcaagctggctaagcaatgtgaggtgctttccatccgcggaacatgtgtatacgtgctcgggctgatcgccaaaacgaagcagggctgcgatatcctcaaatgccataattgggatgcggtgcgccactcgaggaagcacctgtggccagtggtgccagatgatgtggaacaactttgtaacgaacttagttcaattccctctaccttgtctttaaactcagaaagcacatcttctcgacataattccgagtctgagtctgtgccttcttccatgttcatcctcgaggatgacaggttcggcagcagcagtactagcaccttttttttggacattaacgaagataccgaacccacattctacgaccggtcgggacccatcaaagacaagaactcattcccattctttgcgagcagcaagcttgtgaaaaataggatactgaactctctcaccctaccgaacaaaaaacacaggagttcctcagaccctaagggtggcaaactgtcttctgaatcaaaaacgtcaaaccgtagaattcggactctcacggagccttctgtggacttcaaccatagtgacgactttactccgatcagtaccgtgcagaaaactctgcagctcgaaacttcattcatgggtaataagcacattgaagacacgggcagcacgccttctatcggcgagaatgatctgaagttcactaaaaacttcggcaccgagaaccatcgcgaaaacacaagtcgggagcggctggtggtcgagtcatccactagctcacacatgaaaatccgatctcagtcatttaatacggacactaccacctcagggattagctcaatgtcctctagcccaagcagggaaacagtaggtgtcgatgcaacgaccatggacacagattgtgggtccatgtctactgtggtgtctaccaaaactatcaagacttctcactacctcaccccccagtctaaccatctatctctgagcaagtcgaacagcgtgtcactagtgcctcctggaagcagccataccctccccagacgcgctcagagtctgaaagccccttctatcgcaacgataaagagcctcgccgactgcaactttagctacacaagtagcagggatgcctttggatacgccaccctaaaaaggctgcagcagcagcgcatgcatccctccctgtcccacagcgaggccctagcttctcccgctaaagatgttttgtttacagacacaataacaatgaaggcgaactcctttgaatctaggctaacgccatctcgcatagacttcaaaaaaaagcacgttgggggaatccgctctctgagacccactataacgaacaacctgttcaggtttatgaaagcattaagttatgctagcctcgacaaggaagacttacttagccccatcaaccagaacaccctccagagaagctcttcggtgaggtcgatggtctcttccgccacctacggcggatcggacgactacatcgggcttgcattacctgtcgacattaatgacatcttccaggtcaaggatatcccttacttccagaccaagaatatccctccacatgatgataggggcgctcgagcttttgcccacgatgccggagggttgcccagcggaaccggcggactggttaaaaattcatttcatttgctgcgtcagcagatgtctttaactgagataatgaattctatccactcagacgccagcctgttcttggaatcaacagaagacaccgggctgcaggagcatacggacgacaattgtctttactgcgtgtgcattgaaatcctaggttttcagccttccaaccagttgagcgctatctgcagccattctgactttcaggatatcccctacagcgactggtgtgaacagacaatccataatccgctggaggtagttccgagcaaattttctggaatcagtggatgttccgatggtgtgtcacaggaggggagcgcttcaagtaccaagtccacagaactgctgctaggggtaaaaacaattcctgatgacacacccatgtgcaggattctgcttaggaaagaggtgctgcggcttgttataaatctctcttcgtctgtgtccaccaaatgtcatgagacggggctcctgacaatcaaggagaagtatccacagacatttgacgacatctgcctgtacagcgaggtgtcgcacctgctgagtcactgcaccttccgcctgccttgtcggagattcatccaggaattgttccaggatgttcagtttttgcagatgcatgaggaggcagaagcggtcctggctacccccccaaaacaaccaattgtggatactagtgccgaatcctaa

SEQ ID NO: 27750 - DNA, 1761 bp, synthetic construct
  source 1..1761: mol_type = other DNA; note = Synthetic coding sequence
atgagcgccactgtcgtcgatgctgtgaatgccgcacccttatcaggtagcaaagaaatgagtctcgaagaacccaagaagatgactcgagaggattggcgtaagaaaaaagagctggaagaacagcgcaagttgggcaatgcccctgctgaggtggatgaggagggcaaagacatcaatccacatattcctcagtacatttcaagcgtgccctggtacatcgaccctagtaagagaccaaccctgaaacatcagaggcctcagcctgagaagcagaaacaattttcttctagcggagaatggtacaagcgcggagtaaaagagaacagcattataaccaagtacagaaagggcgcttgtgagaactgtggagccatgacccacaagaagaaggactgttttgagcggcctaggcgggtcggtgctaagtttacgggaacaaatatagctcccgacgagcacgtgcagcctcagttgatgttcgactacgacggcaagcgggaccgctggaatggttataatcccgaggagcacatgaagatcgtcgaggagtatgctaaagtggatctggcgaagcgtacattgaaggcacagaaattgcaggaagagctggcttcagggaagctcgtggagcaggccaactctcccaaacatcagtggggcgaggaagagcccaattcccagatggaaaaggatcataattccgaagacgaagacgaagacaaatatgcagacgacatcgatatgcctggccagaattttgactctaaaaggcgaattactgtacggaacctgagaatccgtgaggatatcgcgaaatacctgagaaatttggatcctaactcagcatactacgatcctaagacccgtgctatgcgggagaatccctatgcaaacgccggtaaaaaccctgacgaggtcagctatgccggagacaacttcgttcgctatacgggcgatacaatcagtatggcacaaacgcagctctttgcctgggaagcttacgacaagggctcagaggtgcacctccaagccgatcctacaaaactggaattactgtataaaagcttcaaggttaagaaagaagactttaaagagcagcaaaaggagagtatactagagaaatacggcggacaggagcatctcgatgctcctcccgcagaattgctgctggcgcaaactgaggactatgtagagtacagccggcacggtactgtgatcaagggccaggagcgcgcagttgcctgttccaagtatgaggaagacgtgaaaatacacaatcacacccacatatggggatcctactggaaggagggccgttgggggtacaagtgttgccattcttttttcaagtattcctattgcaccggcgaagcgggtaaagagatcgtgaactctgaagagtgtattataaacgagattacaggtgaagaaagcgtgaagaaaccgcagaccctgatggaattgcaccaggagaaactgaaagaggaaaagaagaagaagaaaaaaaaaaagaagaagcaccggaaatcgtccagtgattcagacgacgaggaaaagaaacacgagaagttaaaaaaagctcttaacgccgaggaggctagactccttcatgttaaagagaccatgcagatcgatgagagaaagaggccatacaatagcatgtatgaaacaagagagccaacagaggaagaaatggaagcatacagaatgaaacggcagcgccctgacgacccaatggccagcttcctgggacaatag

SEQ ID NO: 27751 - DNA, 1185 bp, synthetic construct
  source 1..1185: mol_type = other DNA; note = Synthetic coding sequence
atggcgctggaggtgggagacatggaagatgggcagttatcggactccgactcagacatgacagttgcgccatcagatcggccactgcagttgcccaaagtgctgggcggagactcagcaatgagagcgttccaaaacaccgccaccgcttgtgccccagtttcacactacagagccgtggaaagcgtggactcatcagaggagtcttttagtgactcggacgatgattcttgcctgtggaagcgtaaacgccagaagtgttttaatccaccacccaaaccagaaccattccagttcgggcagtcttctcagaaacctccagtcgccggaggcaaaaagatcaacaatatttggggggctgtgttacaagaacagaatcaggacgccgtggcaaccgaacttggcattctgggaatggagggaacaatcgacagaagccgccagagcgagacctacaattaccttttggcaaagaaactgagaaaagaatcccaagaacacacgaaagacctcgacaaggaactggacgagtacatgcacggagggaagaagatgggctctaaggaggaggagaacggacaaggacatttaaaacgcaagcggcctgtgaaggacagattgggaaaccgtccggagatgaattacaaggggaggtatgaaattacggctgaggactctcaggagaaggtcgccgatgaaattagctttaggctgcaggaacctaagaaggacctgatagctagggtagtgagaatcattggcaataagaaggctattgagttgctgatggaaaccgctgaggtcgagcagaacggaggcctgtttatcatgaatggctcccgcagacggactccgggaggggtgttcctgaacctgctgaagaacaccccttcaatctctgaagaacagattaaagacattttttatattgagaatcagaaggaatatgagaacaaaaaggctgcaaggaaaaggcgtactcaggtcctcggaaagaagatgaaacaggcaatcaaatcgctgaacttccaggaggacgacgacacctccagggaaacatttgcctctgacactaacgaggccctggcgagcctcgacgaatcacaagaaggccacgccgaggctaagctggaagcagaggaggcgatcgaagtcgatcatagtcatgatctggatattttttag

SEQ ID NO: 27752 - DNA, 789 bp, synthetic construct
  source 1..789: mol_type = other DNA; note = Synthetic coding sequence
atgttcctgttttcccgtaaaaccaggactccaatcagtacatactctgactcatatcgcgctccaacctccattaaggaagtgtataaggatcccccattatgcgcttgggaggcgaacaagtttctaactcccggactcacccacacaatggaacgccacgttgacccagaggcacttcaaaagatggctaagtgtgcggtccaggattatacctatcgagggagcatttccggccatccctacttgccagagaagtattggttatcccaggaggaagcggacaaatgcagcccgaattatctggggagcgactggtataacacatggagaatggagccatataattcaagctgttgcaacaaatacaccacatatctccctcggctgcccaaagaagctagaatggagaccgccgttagaggcatgccactggagtgtccacccagacccgaaaggctgaatgcctacgagcgtgaggtgatggtgaacatgctgaactctctgtctcgcaatcagcagctcccgagaataaccccacgatgtggttgcgtagaccctcttcctggcaggctgcctttccacggctacgaaagcgcctgtagcggccgacactactgtctgaggggaatggattattatgcttccggtgcaccatgcacagacagaaggctgcgaccctggtgtcgggaacagcctacgatgtgtacgtctctccgcgctcccgcaagaaatgcagtgtgctgctataactccccagccgtgatactaccaatctcagagccctag

SEQ ID NO: 27753 - DNA, 4206 bp, synthetic construct
  source 1..4206: mol_type = other DNA; note = Synthetic coding sequence
atggaagagattccagtaaaagtggcggtgaggatcagaccacttttgtgtaaggaggccctgcacaaccaccaagtgtgcgtacgagtaatccccaattctcaacaggtaattatagggcgagatagggtgtttacgtttgatttcgtcttcggaaagaacagcacccaggatgaggtctataatacatgtattaagccactcgtactgagcttgatcgaagggtataatgctacagtcttcgcctatgggcaaacgggctcaggaaagacgtacacaattgggggtggccatattgccagtgtggtcgagggccagaaggggattatcccaagggccattcaggagattttccagtcgatcagcgagcatccctctattgactttaacgtgaaggtcagctacatcgaagtgtacaaggaggatttgcgtgacctgcttgagctcgagacctccatgaaggaccttcacatccgtgaggacgaaaaagggaacactgtcatcgtgggcgctaaggaatgtcacgtagagtctgccggagaagtgatgtctttgctcgagatgggaaacgctgccaggcatacagggaccacacagatgaatgaacattcgtctcgatcacacgctattttcaccatcagtatctgtcaagtccacaaaaacatggaggccgctgaagatggttcctggtactcacccaggcatattgtgagcaagttccatttcgttgacctggctggcagtgagcgggtaaccaaaacaggtaacactggagagaggtttaaagagtctattcaaatcaattccggccttttagccctcggaaacgttattagcgccctgggtgatccccgacgcaagtctagccacatcccctatcgcgatgccaagattacacgactcctgaaagactcactgggcggttccgccaaaaccgtcatgattacttgcgtgtctccatcctctagcaattttgacgagtctttgaatagtctgaagtacgctaatcgcgcacggaacatccgcaacaagcctaccgtcaacttttcaccagagtcagacagaattgacgagatggagttcgagatcaaacttttacgggaggcactacagtcacagcaagctggagtgtcacaaactacgcagatcaatcgggaggggagccctgataccaatagaatccacagtctcgaggagcaggtggcgcaactacagggagagtgtttgggataccaatgctgtgtagaggaggcttttactttcctggtggacttaaaggatactgtgaggctaaacgaaaaacagcagcacaaactgcaggagtggttcaatatgatccaggaggttcgaaaggcagtgctgacctcttttagggggattggaggcaccgcttcactagaagaggggcctcagcatgtgactgtgctgcagctgaagcgcgaactaaaaaagtgccagtgtgtgctggcagccgatgaagtcgtcttcaaccagaaggaactcgaagtgaaggaactgaagaatcaggttcagatgatggtccaggagaacaagggccacgcagtttctctaaaggaagcccaaaaagtcaatagattacaaaacgaaaaaattattgagcagcagttactggtggatcagctgtcagaagagctgacgaagctgaacctctcagtaacaagctctgccaaggagaactgcggggacggcccagatgccaggatcccagaacgaaggccctacactgtcccctttgatacacacctgggacactacatctacataccttctaggcaggattctcgaaaagtccacacatctccaccgatgtattccctggaccggattttcgcaggatttagaactaggagccaaatgttgcttggccatatcgaagagcaagacaaggtattacactgccagttttctgacaattctgatgacgaagaaagcgaggggcaggagaaatctgggactagatgccggagtcgatcctggatccagaaacccgatagcgtttgctcattggtcgaattgtctgacacgcaggatgaaacccaaaagtcggaccttgagaacgaagacctaaaaatcgactgtctgcaggagtcacaagagctaaacctgcagaagctgaagaatagcgagaggatcctcacggaagccaagcagaagatgagagagctgacaattaatattaagatgaaggaggacctgattaaggagctaatcaagaccgggaacgatgcgaagagtgtcagcaagcaatactcactgaaagtcaccaaactggagcatgacgccgagcaagccaaagtcgagttgatcgagactcaaaaacaattacaagagcttgaaaacaaggacctaagtgatgtagccatgaaagtgaagctccaaaaggaattcaggaagaagatggatgccgctaagctgcgggtgcaggtgctgcagaaaaagcagcaggactctaaaaagctcgctagtttgagcatccagaacgaaaaacgcgcaaacgaactcgagcagtcagttgaccatatgaagtaccaaaaaatccaactgcagagaaaactccgtgaagaaaatgagaagcgcaaacagctcgacgctgtgatcaagagggaccagcaaaaaatcaaggagattcagctgaaaaccggtcaggaggaagggctgaagccaaaggccgaggaccttgacgcatgtaatcttaagcgtcgaaaaggcagctttgggtctatcgatcatctccagaaactggacgaacagaagaagtggttagatgaggaggtcgaaaaggtactaaaccagcgacaggagctggaggagctggaggccgacctcaagaagcgcgaagccatagtgtccaaaaaggaggccttgctgcaggagaagtcacacctggagaataaaaaactgaggtccagccaggccctgaatacagacagcctgaagatctccacacggttaaacttgctggagcaagaattgtcagaaaaaaacgtccagctgcagacgtctaccgccgaggaaaagacgaaaatttccgaacaagtagaagtcctgcagaaagaaaaagaccagttgcagaaacgcaggcataacgtggatgaaaagctgaagaatggtagagtgctgtctcccgaggaggaacacgtactgtttcaacttgaggaggggatcgaggccttggaggctgcaattgagtatagaaatgagtcgatccagaaccgacaaaagtccctgcgcgctagtttccacaatttgagccgaggcgaggcgaatgtccttgaaaagttggcctgtctgtctcctgtggaaatccgcacaatactattcaggtacttcaataaggtcgtgaacctgcgggaggccgaaagaaaacagcagttgtacaatgaagaaatgaaaatgaaagtcctggaacgcgacaacatggtccgagaattggagtcagcactggatcacctcaagcttcagtgcgaccgacgactcacactgcaacagaaagaacacgagcagaagatgcagctgttactccaccattttaaggagcaggatggagaagggatcatggagacgtttaagacgtacgaagataagattcagcagcttgaaaaggatttatatttctataagaagacttcccgggaccacaagaagaagctgaaggaactggtgggggaggctatccgcaggcagctggccccttctgaatatcaggaagctggagatggggtgctgaaacccgagggtgggggaatgctgagtgaggaactgaagtgggcctccaggcctgagagtatgaaactgtcaggcagggaaagagaaatggactcctcagcgagttccctgcgaacacagcctaatccgcagaagctgtgggaggatattcctgaactgccccctatacactcatctctagctccccctagcggccacatgctcggcaacgaaaacaaaacagagacggacgacaatcaattcaccaagtcccactccaggctatccagtcaaatccaggtggtgggcaatgtcggaagactgcacggggtcacccctgtgaagctgtgcaggaaggaacttcggcagatctcagcattagaacttagcctgcggaggagcagcctcggagtggggattggttccatggccgctgattcaattgaggtgtccagaaaaccacgcgacttgaagacatag

SEQ ID NO: 27754 - DNA, 768 bp, synthetic construct
  source 1..768: mol_type = other DNA; note = Synthetic coding sequence
atggtcaagggagaaaagggtcctaaaggcaagaaaatcacgctgaaggtagcgcgtaactgtatcaaaatcacgtttgatggaaagaagaggctagatctgagcaagatgggcattacaaccttcccaaagtgtatcttgagattgtcagacatggatgaactggaccttagtagaaatttaattcgcaaaattccagacagtatctctaaatttcagaacttgcgctggcttgacctgcatagcaactatatcgacaagctccccgagagtatcggccagatgacctctctcctttatcttaatgtatcaaataaccgcctcacgtcaaacggattgcccgtggaactgaagcagctaaaaaacattcgcgctgtgaaccttggactcaatcatctggactccgtgccgactactctcggagctttgaaagaacttcacgaagttggactccatgacaatctgctgaataacattcctgtttctatcagcaaactccccaagctgaagaagctgaacattaagcgcaacccgttccccaagcccggagagtctgaaattttcattgactctatcaggcggctcgagaatctctatgtagtggaggaaaaggacctctgtgccgcatgtctgcggaagtgtcaaaacgctcgcgataacttaaaccggattaagaatatggcaactaccacacctagaaagactattttccccaatctcatcagtcctaactctatggccaaagattcttgggaggattggaggtag

SEQ ID NO: 27755 - DNA, 645 bp, synthetic construct
  source 1..645: mol_type = other DNA; note = Synthetic coding sequence
atgggaaggcggcctgctcgctgttacaggtattgtaaaaacaaaccctatcctaaatctaggttttgccggggagtccctgatgcgaagatccgcatcttcgatttaggcaggaagaaggctaaggtggatgaatttccgctgggaggtcatatggtcagtgatgaatacgaacagctttccagcgaagctctggaagcagctagaatttgtgctaacaagtacatggtgaagtcatgtgggcgtgacggcttccacatgcgggtgaggttgcacccgtttcatgtgatccgtatcaacaagatgctgtcctgcgcaggtgcagatcgcctgcagaccgggatgaggggcgcattcggcaagccccaaggaacagtggcgagggtgcacataggccaggtaattatgagcatccgaaccaagttacagaatgaggagcacgtgatagaagccctgaggagagctaagttcaaatttcccggacggcagaaaatccatatttcaaaaaaatggggtttcacaaaattcaatgccgacgaattcgaggatatggtcgctaaaaaatgtcttattcctgatggatgtggcgtaaagtacgttccgagtcatggcccactggacaaatggagggtgcttcactcatag

SEQ ID NO: 27756 - DNA, 3231 bp, synthetic construct
  source 1..3231: mol_type = other DNA; note = Synthetic coding sequence
atgaaatcgaggttttcaacaatcgacctgcgcgcagttctcgccgagcttaacgcctccctgttgggcatgagagtgaataatgtgtatgacgtagataacaaaacatatctgatcagactccagaagccagacttcaaggccacactgctgctggagtccgggattaggattcatacaacagagtttgagtggcctaaaaacatgatgccatcatcgttcgcgatgaagtgcaggaaacatcttaagtctcgtaggctcgtctcagctaagcagcttggggttgatcggattgtcgactttcaattcggctcagacgaggccgcatatcatctgattatcgagttatacgaccgaggaaacatcgttctgaccgactatgagtacgttattctcaacatcctacggtttcggacagacgaagcagatgatgttaagtttgcagtgagggaaaggtacccacttgaccacgcaagagctgctgagccattgcttacattagaaagactgactgagattgtggcctccgctcctaagggcgagctgcttaaacgcgtattaaacccgctgttaccttatggtcccgctctcatcgagcactgtttactcgagaatgggttctcgggcaatgtgaaggtggatgaaaagctggaaaccaaggacatcgagaaggtgctggtgtctctgcagaaggccgaggactacatgaagactacaagtaatttcagcgggaaagggtatatcatccagaaaagggaaatcaagccctcactggaggccgataaacccgtggaggacattcttacatatgaagagtttcacccttttctgttttctcagcactctcagtgcccgtacattgaatttgagagcttcgacaaggctgttgacgaattctattccaagatagagggccagaagattgatctcaaagccctacagcaggaaaaacaggccctcaaaaaacttgacaacgtcaggaaggaccacgaaaataggctcgaggcactccagcaagcccaggagatcgacaaactaaaaggagaactcattgagatgaacctgcagatcgtggatcgcgctatccaggtggtcagatcagctctggccaaccaaattgattggactgaaatcggacttatcgtgaaggaggctcaagcccagggcgaccctgttgcctccgcgatcaaggagctgaaactgcagacaaaccacgttacgatgttattgcggaacccatatctgttgtcagaggaggaggatgatgacgtagacggagatgtgaacgttgaaaagaatgaaactgaaccaccgaaggggaaaaagaaaaagcaaaaaaataaacagctgcaaaaaccccaaaaaaataagccactgttggtcgatgttgacctgagcctttccgcctacgccaacgcgaagaaatattatgaccacaaaaggtatgcggctaaaaaaactcagaagacagtggaggcagccgaaaaggccttcaagagtgccgagaaaaaaaccaaacaaaccctgaaagaagttcagacggtgacgagtattcagaaggctaggaaggtttattggttcgagaagttcctgtggtttatctctagtgagaactatctgatcattgggggaagggatcagcagcaaaacgagattatagtcaaaaggtaccttacgcctggggacatatacgtccacgctgacctgcatggagccacctcttgtgtgatcaaaaatcccacgggtgagccaattccccctcgcactctaacagaagcgggaactatggcactctgctatagcgctgcctgggacgcaagagttattacctctgcttggtgggtttaccaccaccaggtgagtaagactgccccaactggtgaatacctgacaacgggcagcttcatgatcaggggcaaaaaaaatttcttaccacctagttacctgatgatgggcttttccttcttgtttaaggtggacgagtcgtgtgtctggaggcaccagggggaacgaaaagtgagagtgcaagacgaagatatggagacccttgccagctgtacgtcagaactgatttcagaagaaatggagcagctagacgggggagataccagctcggatgaggataaggaagagcatgagacccccgtggaggtggagctcatgacacaggtcgaccaggaagatattactcttcagtctggcagggatgaactgaacgaggagctgatccaggaggaaagctctgaggacgagggggagtacgaggaagtacggaaagatcaagacagcgttggtgaaatgaaggacgaaggtgaggagactctcaattacccagacaccacaattgatctaagccatttgcaaccgcaacgatcaattcagaagctggcttccaaggaagagtccagcaatagcagcgactcgaagtcacagtcccggagacacctttcagctaaggagaggagagaaatgaagaagaagaaattgccatcagactccggcgacctggaggcactagagggcaaggataaagagaaggagagcaccgtgcatatcgaaacacaccaaaatacgagcaaaaatgtggccgctgtacagccaatgaagcggggtcaaaaatccaaaatgaagaagatgaaagagaagtacaaagaccaggatgaagaggaccgggagctcatcatgaagctgcttgggtctgcgggaagtaataaagaagaaaaaggtaaaaagggaaaaaaaggcaaaacaaaagatgagccggtgaagaaacagccacaaaagcctaggggaggccagcgcgtgagcgataatattaaaaaggaaacgccatttctcgaagtgatcacccacgagcttcaggatttcgcggtagatgatccccatgacgacaaggaggagcaggatctggatcaacaggggaatgaagagaacctatttgattctctgactggccaaccccaccctgaagatgtgctgttgttcgcaatcccaatctgcgcaccgtatactacaatgaccaactacaagtacaaggttaaacttacaccgggagtgcaaaagaagggaaaggccgctaagactgctctgaatagttttatgcactccaaggaagccacagcaagggagaaggacctattcagatctgtcaaggacacagacctgtcaagaaatatccctggtaaggtcaaggtgtccgctcctaacctgctgaatgtgaagcgcaaatag

SEQ ID NO: 27757 - DNA, 963 bp, synthetic construct
  source 1..963: mol_type = other DNA; note = Synthetic coding sequence
atgggagatatcccagcggttggcctgagttcttggaaggccagccccggaaaagtgactgaggccgtgaaagaggcgatcgatgccggatataggcatttcgattgtgcctacttctaccataacgaacgcgaggttggcgctgggatcagatgtaaaatcaaagaaggggcagttaggcgtgaagacctgtttattgctactaagctatggtgcacatgccataaaaagagcctagtagaaacagcctgtagaaagtcacttaaagcattgaagctaaactacctggatttgtaccttattcattggcccatgggcttcaagcctcctcatccggagtggattatgtcctgcagcgaattgagcttctgtctctcacatccacgggttcaggacctgcccctggatgaatctaatatggttattccatccgacaccgattttctggacacatgggaggcaatggaggacctcgtgataacaggactggttaaaaacattggtgttagcaacttcaaccacgagcagctggagcgcctccttaataagcctggattgagatttaagcctttaaccaatcagattgagtgccatccctatctcacccagaaaaacctgatctccttctgccagtcacgggacgtgtcagtcactgcatatcggccattgggaggaagctgcgagggcgtcgacctgattgacaatcccgtaatcaagagaatagccaaagagcatggaaagagtccagcccagatccttatcagattccagatacagaggaatgtcattgttattccaggctcaataacgccttcccacattaaggagaatatccaggtgtttgattttgaattgacacagcatgacatggacaatattctgtccctgaataggaaccttcggttagccatgttccccattacaaagaatcacaaggattacccatttcacattgagtattag

SEQ ID NO: 27758 - DNA, 1239 bp, synthetic construct
  source 1..1239: mol_type = other DNA; note = Synthetic coding sequence
atgagcggctaccagcgacgccctggagctaccccactgtctcgcgctcgttcccttgctatccccgacgctccagcgttctatgaacgacggtcttgcctgcctcagttgaattgtgagcggcctcacggacgcgatctggatagccccttttttggcattcggcctgccttcatgtgttatgttccaagcccagtgctggcatcggtcggcgacaccgatgatcggtttgaggacctcgaagaagccaacccttttagtttcagagaattcttaaagactaaaaatctgggactgagcaaggaggatcccgctagcagaatatacgctaaagaggcaagtcggcactctctgggtctagatcataacagcccccctagccagaccggaggctacgggttagagtaccaacagcccttctttgaagacccaaccggggctggcgacctgctggatgaggaagaagacgaggatacgggctggtctggagcgtacctaccaagtgccatcgagcagacgcaccctgagcgcgttccagccggtacctccccttgctcaacctacctttcctttttttcaacaccttcagagctggctgggccagagagcctgccttcttgggctttgtccgacacagactccagagtgtcccctgctagtcccgcaggatcaccttctgcggattttgccgtgcatggcgagagcctgggcgaccgccacctcaggactctccagattagctatgacgcactcaaggacgaaaattccaaactgcggaggaaactgaatgaagttcagagtttctctgaagcacagacagaaatggtgaggacactcgaaaggaaattagaggcaaagatgatcaaggaagagagtgactaccacgatctcgaatcggtagtgcaacaggtggagcagaatctcgaactaatgactaagagggcagtgaaagcggaaaaccatgtcgtgaagctcaagcaagagatcagcctattgcaggcccaggtcagtaattttcagagggagaatgaggcactgaggtgtggccagggagctagtcttactgtggtgaaacaaaacgcagatgtggccttgcaaaacctgcgcgtggtgatgaattccgcccaggctagcatcaagcaacttgtgagcggggctgagactttgaatcttgtggccgagattctcaaaagcatcgatagaataagcgaggtcaaggacgaagaagaggattcctag

SEQ ID NO: 27759 - DNA, 1440 bp, synthetic construct
  source 1..1440: mol_type = other DNA; note = Synthetic coding sequence
atggacgcaacgatagcaccacatcggatacccccagaaatgccacagtatggggaggagaatcacatctttgagctgatgcagaatatgcttgagcagctgctcattcatcaacccgaagatccaataccatttatgatccagcacctccacagggataatgacaatgtgccccgaattgttatccttggtcctccagcctcaggtaaaacgactatcgcgatgtggctgtgcaaacatcttaacagcagcctgcttacactggagaatctcattttaaacgagttcagctatacggctaccgaagccagaaggctctatctgcagagaaagaccgtcccctcagccttattagttcaattgattcaggagcggttggcggaggaagattgcattaaacagggttggattttggacggtattcccgagactcgggaacaagctctgcggatccagaccctaggaatcacacccaggcacgttatcgtgctgagtgcacctgatacggtgttgatcgagagaaatctcggcaaaagaatcgacccacaaaccggtgaaatataccacacaaccttcgattggcctcccgaatctgaaattcagaatagattaatggttcctgaagatataagcgaactcgaaaccgcacaaaaacttctggaataccataggaatattgtgcgcgtgattccttcctaccccaagatccttaaagttatctctgccgaccagccgtgcgtggatgttttttaccaggccctgacctacgtgcaaagcaatcacaggactaatgcaccatttactccgagggtactcctcctggggcctgtggggagcggaaaatccttgcaggctgctttactggcccagaagtataggctggtgaatgtgtgctgcgggcagctgctgaaggaggcagtggccgaccgcaccactttcggcgaattgatccagccgtttttcgagaaagaaatggctgtcccggatagtctcctcatgaaagtgcttagtcagagactagatcaacaggactgtatacagaaaggatgggtcttacatggggtgcccagagacctcgaccaggctcacctcctcaataggctcggctacaatccaaacagagtgttttttctgaacgtcccattcgactccatcatggagagattgacactgcgtcggattgatcctgtaaccggcgagcggtaccacctaatgtataagccacctcctaccatggaaattcaagccagacttctccagaatccaaaagatgctgaggaacaagtgaagctgaagatggacttgttttaccgcaacagcgcagacctggaacagctttacggtagtgctattacgctcaatggtgatcaggacccttataccgtgtttgaatatatcgaatctgggatcatcaatccactgcctaagaaaatcccatag

SEQ ID NO: 27760 - DNA, 432 bp, synthetic construct
  source 1..432: mol_type = other DNA; note = Synthetic coding sequence
atggcacatgaaatgataggaacgcaaattgtaacagagcgcctggtggccctgctagagtctggcaccgaaaaggtgttgctaattgacagccggcctttcgtagagtataacacctcccatattctggaggccattaatattaactgctcaaaattaatgaaaaggagattacagcaagataaggtacttattactgagttgatccagcatagtgccaagcataaagtcgacattgattgtagtcaaaaggtggttgtttacgaccagagttctcaagacgtggccagcctcagttctgattgcttcctgacagttcttctcggtaagttagaaaaatccttcaacagcgtgcatttattggctggcgcagatgccgcagagtgggactggctgtgcgtgaaatgtcaacagtatctgagcaaggcatag

SEQ ID NO: 27761 - DNA, 1191 bp, synthetic construct
  source 1..1191: mol_type = other DNA; note = Synthetic coding sequence
atggctagcctgagtcgggcactaagagtcgcagcagcccatccaaggcagtcaccgactagaggcatgggcccttgcaacctgagctccgccgcaggaccaacagccgagaagtccgtgccctaccaacgtaccctcaaggagggacagggaacctctgtcgtggcacaaggtccttcgcggccacttccatcaactgccaacgtggtcgtcatcggcggtggaagcctagggtgtcagaccttatatcatctggccaaactgggcatgagtggtgccgtgctgttagagcgtgagagactgacgtctggcaccacctggcacactgccggtctcctgtggcagcttagacctagcgatgttgaggttgagcttctggcccatacaagaagggtggtgagccgcgagctggaggaagagacaggcctgcatactggatggatccagaacggagggctgtttatcgcctccaaccgtcagcgcctagacgagtataagagactgatgagcctcgggaaagcctacggagtggaatcccacgttctgtctcctgcggagaccaagactctgtaccccttgatgaatgtcgacgatctctatggcaccctatatgtgcctcatgatggcacgatggacccagccggtacctgtaccaccctggcaagagccgcttctgcccgtggagctcaggtgatcgaaaactgccccgtgacgggaattcgggtatggaccgacgatttcggcgtgcggagagttgctggagtcgaaacacagcatgggagcattcaaacaccttgtgttgtaaattgcgctggggtctgggcatctgcagtcggaaggatggcgggagttaaagtgcctctcgtggccatgcaccacgcctatgtcgtcacagaacgaatcgaggggattcagagcttcactctcttacccacactggaatattcaggcaccgtcagcgcccactgcaacttaaggcttcctggatccagtaatagtcgcgctagtgccagccacgtggcaggcattaagtgcgcgaggcaccatacccgcctaattttcttctgcattctggtggaaaccgaattccatcatgtggccaaggccggattggaactgctctcgtcaggaaaccctcctatctctgattttcagtctgctcgcattacaggcgtgtctcaccacgcctag

SEQ ID NO: 27762 - DNA, 4416 bp, synthetic construct
  source 1..4416: mol_type = other DNA; note = Synthetic coding sequence
atggaacccgaacccgtggaggactgcgtacaaagcactctggctgctctgtatccacccttcgaagccactgccccaaccctccttggccaggtgttccaggtggtcgagagaacttaccgcgaggatgcgctgcggtacacccttgattttctggtgcctgccaagcacctcctggccaaagtgcagcaggaggcttgcgcccagtattcgggattcctcttcttccacgaaggatggcctttatgcctgcacgaacaggtagtggtacagctcgcggcactcccctggcagttactccgcccaggagacttttacctgcaggtagttccttcagcagcccaagcccctaggctagccctgaagtgcctggcacccggtggcggtcgcgtccaagaggtgccagtccccaacgaggcatgtgcctatctcttcacccccgaatggctgcagggaattaataaggataggccaactggtcgccttagtacatgcctcctgtccgctcctagtggcattcagcggttgccgtgggccgagttgatctgtcccaggttcgttcataaagaaggcttgatggtcggacaccagccctctaccctgcctcccgaacttccatccggaccaccaggtttgccctctccgccactgccagaggaggcactcgggacaaggagtcccggtgatgggcacaacgcacctgtcgagggacctgaaggcgagtacgtggagctgctcgaggtcactctcccggtgcggggttcacccacggacgctgaaggaagccctgggctgagcagagtgcgcaccgttcctacaagaaaaggagccggagggaaaggccgtcaccgcaggcaccgagcctggatgcatcagaaaggcctaggtccaagaggtcaggacggcgcaagaccgccaggggaggggagctcaactggtgcaagcccggaatcacctccaggcgctgaagccgtacccgaagctgctgtgctggaggtctctgagccccctgcagaggccgtaggcgaagccagcggttcatgcccactgaggcctggagaactccgaggtggcggtggaggcggacagggggctgagggcccaccgggtacgcccagaaggacaggaaaaggtaatcggaggaaaaagcgcgctgccggtagaggagcgctgtctaggggaggcgattcagctccgctttccccaggtgataaggaggacgctagccatcaggaggctctgggaaatttgcccagtccatcagagcataaacttcctgagtgtcacctggtgaaggaggagtatgaaggctcgggaaaaccagagagcgaacccaaggaactgaaaaccgccggtgagaaagagcctcaattgtcagaagcctgcggacctaccgaggagggagccggagaacgagaactggagggcccaggactcctgtgtatggcaggacatactggccctgaaggtccactctcagatacgcctactccccctctggagactgtccaggagggaaaaggagataatattcccgaggaggcgttggctgtgtccgtgtcagaccaccccgacgtggcctgggaccttatggcctccggattcctgatcctcacgggaggagttgaccagtccggaagagcccttctcaccatcacccccccttgtcccccagaagagccgccaccctcccgggacaccctaaataccacattacattacctgcacagtcttctccgacccgatctgcaaactctaggcctgagcgtgctgctggacctgaggcaagccccaccattgcccccagcccttattcctgccctgtctcagcttcaggactccggcgacccccctcttgtgcagcgactcttgatcctcatccacgatgacctgcctacagagctatgtggcttccagggcgctgaggtgctctcagagaacgatctgaaaagagtcgcgaagcctgaagagctgcagtgggagctggggggacacagggacccgtcaccctcccactgggtcgaaattcaccaagaagttgtccgactgtgtcgcctgtgccagggcgtgctaggctctgtgcgacaggccatcgaggagctggagggagctgccgagcctgaagaggaggaggccgtcggaatgccaaagcctctacagaaagtgctggctgacccgagactcactgccctccagagagatggaggtgccatactaatgcggctgaggtctactcccagctctaaattggaaggacaggggcctgctacactgtatcaagaagttgacgaggcaatccaccaactagtccgactgagtaacctccatgtgcagcaacaggaacagcgtcaatgcttgagacgactgcagcaggtcctgcagtggttgtcaggacccggagaggagcaactcgcaagcttcgctatgccaggagataccctgtccgcccttcaggaaacagaacttcggtttagagcctttagcgccgaggttcaagagaggctggctcaggcaagagaggctctggcattagaggagaacgccacctctcagaaagtgcttgatatcttcgagcagagactggagcaggtcgaaagcggactgcacagagccctccgcctccaacgcttttttcagcaagcacacgaatgggtggacgagggctttgcgagacttgcaggcgcaggacccggaagggaggcggtcctggcagcactagcactccgacgcgcacctgaaccatcagccggaacgttccaggagatgagggccctcgcactggacctgggaagcccggctgccctgcgggagtggggtaggtgccaggctcgctgccaagaactggagcgtaggatacagcaacatgtgggggaggaggcctctccacgtggttaccgcagacgaagggctgatggcgctagctccggaggcgctcaatggggcccaaggtccccttcgccgagcttgtcatctctcctgctcccctcgagtcccggtcctagaccagcgccatctcactgctcccttgccccttgcggggaagattatgaggaggagggccctgaactggctcctgaggccgaagggagacctccccgagccgtgctcatcagaggactggaggttactagcaccgaggtggttgataggacctgcagccccagggagcacgtcttactcggccgagcccgtgggcctgatgggccttggggcgttggcacccctcgtatggaaaggaagagatcgatcagtgcccagcagcgtttggtgtctgagctgatcgcatgtgagcaggattatgtggcgactttgtccgaaccagtacctccccctggacccgagctcactcctgagctgcgcggaacctgggccgctgcactttctgccagggagcggttgcgctccttccatcgcacacacttcttgcgggagctgcaaggctgtgcaacacacccgctcagaataggcgcttgctttctgcggcacggagaccagttcagcttatacgcccaatacgtcaagcaccgccacaagctggagaatggcttggccgctctgagtcccctgtccaaaggctctatggaggccggtccttacttaccacgggctttacaacaacccctggagcagctgacgcgttatggtcgccttctggaagagcttttgcgggaggccggacctgaactgagctccgaatgcagagccctcggcgctgcggtgcagctcctcagagagcaggaggcccgtggacgggatctgcttgcagttgaggcagtgcggggatgcgaaatcgacttgaaggaacagggacagttgttgcacagggacccctttactgttatctgcggaaggaaaaagtgtctgagacacgtcttcctgttcgaacatctgctgctgttctccaagctaaagggcccagagggaggatcggagatgtttgtatacaagcaggcattcaagactgcagacatgggccttaccgaaaacatcggcgattcagggctgtgtttcgagctctggttccggagacgacgggcacgggaagcgtataccctccaggctaccagtccagaaatcaaactcaagtggacatcttcaatcgcccagctgctatggaggcaagccgctcacaacaaagagctgagagtccagcagatggtatcaatgggcatcgggaacaagcccttcttggatattaaggcactgggcgaaaggaccctctccgctttgctgaccgggagagcgccagaaaccctggatagctcaggggatgtctcacccggacctcggaattcaccgtctttacagccgccacatcctggttcctcaactccaacactggctagccggggaattctcgggctgtccagacagagccatgcacgggctctctccgatccgactaccccattgtag

SEQ ID NO: 27763 - DNA, 4560 bp, synthetic construct
  source 1..4560: mol_type = other DNA; note = Synthetic coding sequence
atggaaccggagcccgtggaagattgcgtgcagtccactctggccgctctgtatccacccttcgaggcaaccgccccaaccctgcttgggcaagttttccaggtggtcgagcgaacctaccgcgaggacgctttgcgttacactctagactttctggttcccgctaaacacctgctggcgaaagtgcagcaggaagcctgtgcacagtattccgggttcttatttttccacgaaggctggcccctgtgcttacacgaacaagtcgttgtgcagttggccgcattaccatggcagctgctcagaccgggagacttttatttacaggtcgtgccctccgcagctcaagcgccacgcctagccttaaaatgtctcgcccctggaggcggaagggtacaggaggttcccgtgccaaatgaagcctgtgcatatctgtttacacccgaatggcttcagggtatcaacaaggatcgaccgaccggtcgactgtccacctgtctgctgagcgcaccgtccggcattcagcgacttccctgggctgaattgatctgtccacgttttgtccacaaggaaggccttatggttggccatcagccaagtaccctgcctcctgaactgccatcaggcccacctggtctcccatcacccccactgccagaggaagcactgggaacccgctctcccggtgacggccacaatgcacctgtggagggcccagagggggagtacgttgagctgctcgaggtcactcttcctgttcgcggatctcctacagatgccgagggatcccccggattatcgcgcgtgaggactgtaccaacgcggaagggggcaggtggtaagggccgacatcgtcgacaccgagcctggatgcaccagaaaggtttgggcccacgcggacaggatggagccaggcctccaggtgaaggttcctctaccggcgcatcccccgagtctccaccaggagcagaagcggttccagaagcagctgtcctggaggtgtcagagccacccgctgaggccgttggagaggctagtgggagttgtcccctgcgccctggcgaactgcggggagggggaggcggtggtcagggagccgagggacccccaggcactccgagacggacagggaaggggaatcggagaaagaaacgggctgctggcagaggcgcactcagcagagggggagattctgcacccctttctccaggggataaggaagatgcgagccatcaagaggcactgggtaacttgccaagcccctcagagcataagcttcctgagtgtcatctggtaaaggaagagtacgagggctccggcaagccggagtccgagccaaaggagcttaaaacagcaggcgagaaagagcctcaactcagcgaagcttgcgggcctactgaggaaggcgcaggagaacgcgagttagaaggtcccggtctgctttgtatggctggccacacaggccctgagggaccgctgagtgacaccccaactcccccactggagactgttcaagaaggaaagggcgataacatccctgaagaggccctcgccgtgagtgtatccgatcatcctgacgtggcctgggacctcatggcatccggttttttaatccttacagggggtgttgatcaatctggtagggctctcctgaccataaccccgccatgtccacccgaagagccaccaccctccagggacactttaaataccacattgcactatcttcattccctgctgcggccagatttacaaacgcttggactgtcggtgctgttggacctgaggcaagcccctccactgccgccagcactcattcctgctctctcacagttacaagactctggcgatcctccccttgtccagagattacttatcctcatacacgatgatctccctacagagctttgcggcttccagggcgcagaggtgctgagcgaaaacgatctgaaacgtgtggctaaacctgaagagctgcaatgggaacttggtgggcaccgcgacccttccccgtcacactgggtggagatacatcaggaggttgtgagactttgccggctctgtcaaggagtactgggtagcgtgagacaggctattgaggaactggagggtgccgctgagccagaggaggaggaagccgtgggcatgcccaaaccgctgcagaaggtgttggcagaccctcggctcaccgcgctgcagagggatggtggcgctattcttatgaggctcagatccacccccagcagcaaactggagggccagggcccagctaccctttaccaggaggtggatgaagccatacatcaattggtgcgcctcagcaatctccatgtgcagcaacaggagcaacggcagtgcctgcggagactacagcaggtacttcagtggcttagcggtcctggggaagaacaactcgcgtcattcgcgatgcccggagatacactctccgcccttcaggagaccgagctgcgcttccgggctttctctgccgaggtgcaggagagacttgcccaagcccgagaggcactggccctggaggaaaatgcgacctcccagaaagttctggatatctttgagcagcgattagagcaagttgaaagtggactgcaccgcgcacttcggcttcagcggttcttccagcaagcccatgaatgggtggatgaaggctttgccaggctcgccggtgccggtccaggaagggaagcagttctagcggcactcgccctgcgacgagcccctgaacccagtgcagggacatttcaagagatgagggccttggcattggatctcgggagcccagcagcattgagggagtggggacgttgccaggcacggtgccaggagttagagagacggatccagcaacacgtcggagaggaggctagccctagggggtaccgaaggaggagggctgatggtgccagctccggcggagcccagtggggccctcgaagtccctcaccttccttaagcagcctgttgctgccctcttccccaggccctaggcctgctccgagccactgtagcctggcgccatgtggcgaagactatgaggaagagggccctgaactcgctccagaagctgagggacgaccccctcgggctgtgttgattcggggtctcgaggtaactagtactgaagtggtcgatcgtacctgcagccctagggagcacgtactattagggcgagcccgaggcccagacggaccatggggtgtagggacgccacgaatggagaggaagcggtccatctcagcacaacagcggctcgttagcgaacttatcgcctgcgagcaggactacgtcgccaccctctctgaaccagtgccaccccctggaccggaactgactcctgagctcagggggacttgggctgctgctttaagcgctcgggagcgcctccgcagttttcaccggacacatttcttgagggagctgcaagggtgcgccacccaccccctcaggattggggcttgctttttaaggcacggggaccagtttagcctatacgcacagtatgtcaagcaccgccacaaattggagaacggactcgctgccctgtctcctctaagtaagggaagtatggaggcaggcccatacctgccgcgagcccttcaacagccacttgagcagcttactcgttacggaagattacttgaggaactgcttcgagaggccggacctgaactgtcctccgagtgtagggccctaggggctgcagttcaactgctccgagaacaagaggccagaggtagagatctgttggcagtggaggcagtccgcggttgcgaaatcgacctcaaggagcaaggccagttgctacaccgagacccattcacagtgatctgcgggcgtaagaaatgcttgcggcacgtatttctcttcgagcacctgctgctgttttcgaagctgaaggggcctgaagggggatccgaaatgttcgtgtacaagcaagccttcaagactgccgacatggggctgaccgagaacatcggcgacagcgggctgtgcttcgagctctggtttcggaggaggcgcgcacgagaagcctatactcttcaggccaccagccccgagattaagctgaagtggaccagcagcatcgctcagttgctttggcgtcaagctgcccataacaaggaactgcgggtacagcagatggtgtcaatgggcattggcaacaaaccgttcctggacataaaagccctcggcgaaagaactctgtccgccctcctgacagggagggccgctcgtacccgtgcctctgtggcagtctcctcttttgagcacgctggcccttcgcttccgggactaagtcccggagcatgctctctcccagcccgagtggaggaagaggcctgggatcttgatgttaagcagatcagcctggctcctgagacacttgactctagtggcgacgtctcaccaggtccgaggaatagcccaagcctccagcccccacatccgggttcatctacccctaccctggcttcgagggggattctgggcctgagtcgccagtcacacgccagggccttgtctgatcctacgacaccactgtag

SEQ ID NO: 27764 - DNA, 2709 bp, synthetic construct
  source 1..2709: mol_type = other DNA; note = Synthetic coding sequence
atgtttcccgctctcgaaactcatttgaaacagaccataccggatccctatgaggatttcatgtacaggcacctgcagtactatgggtatttcaaagcacaaagaggctctctccctaattccgctactcaccaacatgttaggaagaacaatccccagtgtctgttgaacggtagcctaggagagaaggacgatcttatcccagacacactgcagaaggagaagttgctttggcccatctctctgtctagtgctgtgcaccgacagattgaagcaattaaccgcgatttccacagctgtcttggctggatgcagtggaggggtttgtccagtcttcagccccctccacccagattcaaggactcaccagcctcagcatttcgggtggcagggataactgatagccacatgctatccctgccgcacctgcggtctagacagctgctgtacgatgagcttgacgaagtgaacccacgactgagggaaccccaagagctgttttctatcctgtctacaaagagaccgttgcaggctccacgctggcccattgaatgtgaggtgatcaaagaaaacattcatcatatcgagtgggcccctccacagccagagtatttttatcaaccaaagggaaacgaaaaggtccctgagattgttggagagaagaagggtacagtggtatatcagttagattcagttccgattgaaggcagttacttcaccagctccagagttggcggtaagcgcggaatcgtcaaagagctcgcagtgacactccagggccctgaggataacacacttctgtttgagtccaggttcgaatctgggaacctgcagaaagcggtccgggtggatacctatgagtatgagttgactttacgaacggatctatacaccaacaaacacacgcagtggttttattttagggtgcagaatacacggaaggacgctacttaccgttttacaatcgtgaatctgcttaaacccaagagtctctacaccgtgggcatgaaaccccttttatacagccaactggatgccaatacaagaaatatcggatggcggagagaaggaaacgaaatcaagtactacaagaacaatacagatgacggccagcagcctttttattgcctgacttggacaattcagttcccctacgaccaggatacttgcttttttgcccatttttacccgtatacttacacagacctgcagtgttatctcctgtccgttgcaaacaatccaatccagagtcagttctgcaagctccagactttgtgccgatcactggctggcaacactgtgtatctgctcacgattaccaatccttctcagaccccacaggaggcagctgcaaagaaagctgtggtcctcagcgctagggtccatccaggagaaagcaacggaagctgggttatgaaaggattcctggactttatcctgtctaatagtcccgatgctcagctgctccgagacatattcgtttttaaagtgcttccaatgcttaaccctgatggggtgatcgtgggtaattacagatgcagcctggcgggacgcgatctgaatagacactataagacgatcctgaaggaaagcttcccatgtatatggtacacaaggaatatgattaagaggctgcttgaggaacgggaggtactgctgtactgtgactttcatggacactcccgtaaaaataatatattcctgtatggctgcaacaacaacaatcgcaaatactggctgcatgagagggtgttccccttaatgctgtgcaaaaatgccccagataagttctcttttcactcttgcaacttcaaggtacagaagtgcaaggagggaacaggccgtgtcgtgatgtggagaatgggtattctcaactcgtatactatggagtctaccttcggcggttctactctgggcaataagcgggatacccacttcaccattgaggacctaaagagcctgggctatcatgtttgcgataccctccttgatttttgtgatcccgaccagatgaagttcactcaatgtttggccgaactgaaggagctgctcagacaggaaatccacaagaaatttcatgagctgggccaggatgtggacttagaaggaagctggtccgatataagcctgtccgacatcgagtcctccacgtctggaagcgactcctctctttccgacggcctccccgtccatcttgcgaatatcgccgatgaactgacccagaagaagaaaatgtttaagaaaaagaagaagaaatccctgcaaactcggaaacaaagaaacgaacagtaccaaaaaaaaaacctgatgcaaaagctgaagttgacagaggacacctcagagaaggccggtttcgcatcaactcttcaaaagcaacccacgtttttcaaaaactcagagaattcaagttttcttcccatgaaaaacgagaatcccaggctgaatgagactaatttgaaccgaagagacaaagataccccactggatccatctatggccaccttgatcttacctaagaacaagggcagaatgcagaacaagaaaccaggattcacggtgtcttgtagtccaaaaagaactatcaattcctctcaagaacccgcaccgggtatgaaacctaactggccacgctcgcgataccccgctacaaagcggggttgtgccgctatggcagcctatccatcgctacacatctacacctacccatag

SEQ ID NO: 27765 - DNA, 3234 bp, synthetic construct
  source 1..3234: mol_type = other DNA; note = Synthetic coding sequence
atggaggttcaggtttctcaggccagcctggggtttgagctaacttcagtggagaaatctttaagagagtggtcaagactttccagagaagttatcgcatggctttgtccaagctcaccaaacttcattcttaatttcccccctccgccttctgcatcctccgtaagtatggtgcaattgtttagcagccctttcggctaccagtccccttccgggcattcagaagaggagcgtgaaggaaacatgaagtctgctaagcctcaggtgaaccactcacagcacggcgaatcccagcgggcactatcgccgcttcaatctacattgtctagtgctgcctcacccagtcaggcttacgagacgtacattgaaaacgggctgatctgtctgaagcacaagatccgtaatatcgagaagaaaaagcttaaacttgaggattacaaagatcgcctgaaatctggtgagcacttgaaccccgatcagctagaggcggttgaaaaatacgaggaagtgctgcacaacttagaatttgcaaaggagcttcagaagacgttttcagggttgtctctagacctcctcaaagcgcagaagaaggcacaaagaagggagcacatgcttaaactggaggcagaaaagaaaaagttacgtaccatcctgcaagtccagtacgtgctgcagaacttgacacaagagcatgtgcaaaaagacttcaaaggcggactcaacggggctgtttacctaccctcaaaagaactggactacttaatcaaattttccaaactaacgtgcccagaacggaacgaatcactgagtgtggaagaccagatggagcagagttcattgtacttttgggacctgttagagggttccgaaaaggccgtggtggggacgacatacaagcacctcaaagacttgcttagtaagttgctgaactctggatacttcgagtctattcccgtgccgaagaatgctaaggaaaaggaggtacccctggaggaggaaatgctgatccagagcgagaagaagacccagctgtcaaagaccgagtctgtgaaagagagtgagtctcttatggagttcgcccagcctgaaatacagcctcaagagtttcttaatagacgctatatgacagaggtggattacagcaacaagcaaggcgaggagcagccgtgggaagccgattacgctagaaaacccaacctgccgaaaagatgggatatgctgacagagcccgacggccaggaaaaaaagcaggagagctttaaatcttgggaggccagcggaaaacatcaggaggtatccaagccagcagtttcactggaacagcgaaagcaggataccagtaagctcaggtcaactttgcccgaggagcagaagaaacaggaaatctccaaatcgaagccctccccttcgcagtggaagcaggacactccaaagagtaaggccggttatgtacaagaggagcagaagaagcaggaaactcccaagctgtggccagtccagttacaaaaggaacaggacccaaagaagcagacaccaaagtcatggacaccaagcatgcagtcagagcagaataccaccaaatcttggaccaccccaatgtgtgaggagcaggatagcaagcagccggagacaccaaagtcatgggagaacaacgtcgagtctcagaagcacagtttgacaagtcagtcacagatatctcctaagtcttggggcgtggcgaccgcatccctgatccccaatgatcaactgttgcctaggaaactcaatacagaacccaaggatgtgcctaagccggtgcaccagccggtgggatcatccagcacccttccgaaagatcccgtcttgcgcaaggaaaagctgcaggacttgatgactcagatacagggcacctgtaattttatgcaagagagcgttcttgacttcgataaaccatctagcgccatccctacgtctcagcctccctccgccacaccaggttcacctgttgcctcaaaggaacagaatctcagcagtcaatccgattttctccaggagcctctccaggcgacatccagccctgttacgtgcagtagcaacgcctgcctcgtgacaaccgaccaagcctcgtctggatccgaaaccgagtttatgacaagcgaaacccctgaggtgtttaacgtcaatgcaccgttgccaccacggaaagaacaggagattaaagaatcaccctactcccccggatataatcagagctttacaaccgcctccacccagacaccaccgcaatgtcagctgcctagcatacacgtggaacaaaccgtacattcccaagagacagccaattaccacccagatggaacgatccaagtgtcaaatggctctttagccttttacccggctcagacgaatgtgttccctcgaccaactcaaccctttgtgaactctcgagggtctgttcgtggttgcactagaggcggtaggctcattactaattcttatcgatctccgggagggtacaaggggttcgacacatatagaggcttgccatcaattagcaacgggaattacagccagctgcagtttcaggcccgtgagtatagtggagccccttactcgcaacgggataattttcagcaatgctacaaacgcggtggcacgtccggcggacctcgagctaattcccgcgctgggtggagtgatagcagccaagtatccagccccgaaagggataatgaaacattcaacagtggggactcaggtcaaggggattcgaggtcaatgacccccgtggacgttcccgtgaccaatcccgctgctaccatactaccagtgcacgtttacccactccctcagcagatgagggtggccttttctgccgcacgaacttcaaatctagctcccggaactctggaccagcctattgtgttcgacttattgttgaataatctgggggagacctttgacctccagctcggcaggttcaactgccctgtgaacggaacgtatgtgttcatattccacatgctgaagctcgcggtgaacgtacccttgtacgtgaatctgatgaagaacgaagaagttctagtgagcgcatacgccaacgatggcgcaccagaccacgaaaccgcctccaatcacgccattctccagctgttccagggcgaccagatctggctgcgattgcatagaggagcaatatatggttcctcttggaagtactcaacattcagcggttatttactgtaccaggactag

SEQ ID NO: 27766 - DNA, 1056 bp, synthetic construct
  source 1..1056: mol_type = other DNA; note = Synthetic coding sequence
atgactcttagactgcttgaagactggtgtcgcggtatggacatgaacccccgaaaggccctccttatagccggaatttctcagagttgcagtgtggcagaaattgaggaagcactccaggcaggactggcccctcttggagagtacagattacttggtcgcatgttcaggcgagacgagaataggaaggtcgcactagtggggctgacagcagaaacatcacatgctcttgtgccaaaggagatcccaggaaaaggaggcatctggagggtgatctttaaacctccagatcccgacaacacttttttgagccgtttgaatgagtttttagcaggcgaaggaatgactgtgggcgagctcagccgggcattaggccatgaaaatggctcactagacccagaacagggcatgataccggagatgtgggccccaatgctcgcgcaggctctggaggctctgcagccggcactccagtgtctcaagtataagaagctacgggtgttttctgggcgagaaagccccgaaccaggtgaggaggagtttggtcggtggatgttccacacaacgcagatgatcaaagcttggcaggtgccggatgtggagaaacgccgaaggctgttagagtcactgcgtggaccagccctggacgtgattagggttctgaagatcaacaatcccctcattactgtcgatgagtgcctgcaggcgctggaggaggtgttcggagtcacggataacccgcgagaactgcaggtcaaatatctgaccacctaccagaaggacgaggaaaagctgtcagcttacgtgctccgacttgagccccttcttcagaagctggtccaacggggagcaatcgaacgcgatgccgtcaatcaggctcgtttggatcaggtgatcgctggagccgttcataaaaccatcaggcgcgaactcaatttgcccgaagacggacctgcgcctggattcttgcagttgctggtgctcattaaagattacgaagccgcagaggaggaagaggctctgctccaggctatactggagggcaatttcacatag

SEQ ID NO: 27767 - DNA, 2559 bp, synthetic construct
  source 1..2559: mol_type = other DNA; note = Synthetic coding sequence
atgtctggaagggccagagtcaaagccaggggcattgctcgcagcccttcagctacggaggtgggtaggatccaggcaagtccactgcctcggtcagtggacctatccaacaatgaggcgagctcgtctaacgggtttctcggcacatctcggatttccactaacgataagtacggaatcagcagcggcgatgcaggctcaacattcatggaacggggtgtgaaaaataagcaagatttcatggatctgagcatctgtacgagagaaaaactcgcccatgtacgcaactgcaaaactggttcttctgggatcccagtgaagctcgtgaccaatttattcaatctggacttccctcaggactggcagctgtatcagtaccacgtcacgtacattccagatctggccagccgccgattaagaattgcattgctttatagtcacagtgaattgtcaaacaaggcaaaggcttttgacggggcaatcttgttccttagccagaagctggaggagaaagtcaccgaattgtcttctgaaacacagcggggtgagacaataaagatgaccataactctgaagcgcgagctaccctcgagttcacccgtatgcatccaggtgtttaatatcatctttagaaaaatcttgaagaagctgagcatgtaccagataggcaggaacttctataatccctctgagccaatggagataccccagcacaagctgtctctgtggcccggatttgcaattagcgtttcatacttcgagcgcaagctgttgtttagcgccgatgtatcttacaaggtgctgagaaatgaaaccgtgttggaatttatgactgcactgtgccagcggaccggactatcctgctttacccaaacttgtgagaagcagctgatcgggttaatcgtcctgacccggtacaacaatagaacctactcaatcgatgatattgactggtcagtgaaacccacccacacatttcagaagagggatgggacagaaatcacatatgtcgactattataagcaacaatatgacatcaccgtgagtgacctgaaccagccgatgcttgtgagccttttaaagaagaaacggaatgataattcagaggcccagctcgcccacttaattcctgaattatgttttctgacaggactcacagaccaggccacttcggacttccagttaatgaaagccgtcgctgagaaaactcgcctgtcccccagcggccgacagcagaggctggccagactcgtggataacattcaaaggaacacgaacgcccgattcgaactggaaacttggggtctccacttcggcagccagatcagtctgacaggcagaatagtcccatctgagaaaatcctcatgcaggaccacatctgccagccagtaagtgctgcagattggtccaaagacatcagaacctgtaaaatcctgaacgctcaatcccttaatacctggctgatcctatgctcggaccggaccgagtatgtggcagagtctttcctgaactgtctgaggcgagttgcagggtccatgggctttaacgtggattaccccaagattattaaggttcaagaaaaccctgctgctttcgttcgcgctattcagcaatacgtggatcctgacgtgcagctggttatgtgcatcttaccttccaatcagaaaacttactacgacagcataaagaagtacctgagtagcgattgcccagttccttcccagtgtgttctggccaggacactcaacaaacagggcatgatgatgtccattgccacaaaaatcgccatgcaaatgacctgtaaactgggcggtgagctttgggccgtcgaaattccattgaaatcactcatggtggtgggcatcgacgtctgcaaagacgctctgagcaaagatgtcatggtggtaggttgtgtagcctcggtgaacccccgtatcacacgctggttttcccggtgtatcctgcagcgtactatgactgatgtggcagactgcttaaaggtatttatgacaggcgctctaaacaagtggtataagtacaatcacgatctgccagcacgaataattgtgtaccgagcaggagtgggggacggccaactaaaaacccttattgagtacgaggtcccacaacttctatcctccgtggctgaaagcagctcaaacaccagttctcgcctaagtgtgatagtggtgagaaaaaagtgtatgccccgattcttcaccgagatgaaccgcactgtgcagaaccctcccctaggcaccgtggtggacagtgaagcaacacgcaacgaatggtacgatttttacttgatctcacaggtggcttgtaggggcaccgtttcaccgacctattacaacgttatctatgacgacaacggtttaaagcctgaccacatgcagcgtctgacgtttaaactgtgtcatctctactataattggccaggtatagtgagcgtgccggctccttgtcagtacgctcacaagctgaccttcctggtggcacagtccattcacaaggagccatcgctggaactggcaaaccatcttttttatttatag

SEQ ID NO: 27768 - DNA, 2163 bp, synthetic construct
  source 1..2163: mol_type = other DNA; note = Synthetic coding sequence
atgtatgggtctgcgaggtccgtggggaaggttgagcccagttcacaatcccctggcagatcaccaagacttcctaggagcccaagacttggccacagaagaacaaacagcaccgggggaagctccggcagctctgttggaggcggatctggcaaaactcttagcatggagaatattcaatccctcaacgctgcgtatgcaacaagcggacctatgtatctgtccgaccatgagaatgtaggcagtgagacccctaagagtacgatgaccttggggagatctggtgggagattgccctacggggtcaggatgacggctatggggagttcgcccaatatcgcatcaagtggggtggccagcgataccattgccttcggcgaacatcatttacctcctgtcagcatggctagcacagtcccacacagcctccggcaggcaagagacaacactattatggacttacagacccagctaaaggaggtgttaagagagaacgacttgttgagaaaggatgtcgaagtgaaggagtccaagctgtcgtcctcgatgaattccattaagaccttttggtctccggaactaaagaaggagcgcgctttgagaaaggacgaggcatctaaaatcaccatttggaaggagcagtatagagttgtgcaggaggaaaaccaagtggacgccctgcgcctacggttggaagaaaaggagactatgctcaacaagaaaacaaaacagattcaagatatggccgaggagaagggcacacaggccggagagattcatgacctgaaagacatgttggacgtaaaagaaaggaaggtgaatgtcttacaaaaaaaaatcgagaacctgcaggagcaactgcgagacaaggagaagcagatgtcatcgctaaaggagcgggttaagtctcttcaggcggataccactaatacagataccgctctgactaccctggaggaggcacttgcggagaaggagaggactatcgagcggttaaaggagcagagggatcgggatgaacgagagaagcaggaagagatcgataattacaagaaggaccttaaggacctgaaagaaaaggtgtccctgctccagggagacttgtcagaaaaggaagcgtcgctactcgaccttaaggaacacgcgagctctcttgcgtcgtctgggcttaagaaggattctcgtcttaaaaccctggagattgcactggagcagaagaaagaagagtgcctgaagatggagtctcaactcaaaaaggcccatgaggcagctctcgaggccagggcctctccggagatgagtgatcgaattcaacacctggagagggaaattaccaggtacaaggatgagagttccaaggcgcaggccgaggtggacaggctcctggagatcctgaaggaggtcgaaaacgagaagaatgataaagacaagaagatcgccgaacttgaaagtttatttagtcgccaggtgaaagaccagaataaaaaggtcgctaatttgaagcataaggagcaagtcgagaagaaaaagagtgcccagatgctcgaagaagcgagacgtagagaagacaatctgaacgactctagtcagcagctccaagacagtctacggaaaaaggatgatcgaatcgaggaattagaagaagcactacgtgagtctgtgcagattactgccgagcgagagatggtgctggcccaagaggaatcagctcggacgaacgctgagaaacaggtggaggagctgctgatggcaatggaaaaagtaaaacaggagctagagagtatgaaggctaagctgagcagcacacaacaaagtctcgcagagaaagagacacatcttactaatcttagggcagagcgtaggaagcatctcgaagaggtcctggagatgaaacaagaagcattactcgccgctatttcggaaaaagacgctaatattgcactgttagaactttcaagctctaaaaagaaaacacaagaggaagtggctgcacttaagagagagaaggatagactggtgcaacaactgaagcagcagacccaaaatcgcatgaagctaatggcagacaactatgaggacgaccatttcaaaagttcccactccaatcagactaatcataagcctagtccagaccaggatgaggaggaggggatttgggcctag

SEQ ID NO: 27769 - DNA, 1344 bp, synthetic construct
  source 1..1344: mol_type = other DNA; note = Synthetic coding sequence
atggatatggggaaccagcatccctccattagccgactccaggaaatccagaaagaggtgaagtctgttgagcaacaggtgattggcttttcgggcctctctgatgacaaaaattacaaaaaactggaaaggatacttactaaacagctgtttgagatcgactctgtggacacagagggtaagggagatatccagcaggctcgcaagcgcgcagcccaagagacagagaggctgctgaaagagttggagcaaaacgccaaccacccacatcgcatcgagattcagaacatctttgaggaagctcaatccttagtgagagagaagatcgttcccttctacaacggcggaaactgtgtgaccgatgagtttgaggaagggattcaggacatcatcctgcggctcacccacgtgaagactgggggaaagataagcctgcgtaaggctagataccatacactcactaagatctgtgccgtccaggagattattgaagattgcatgaaaaagcaacctagcctgcccctttccgaggatgcccatcctagcgtagccaagataaacttcgtcatgtgtgaggtgaacaaagcgagaggggtactcattgccctgctgatgggagtgaacaacaacgagacctgtcgccatctatcctgcgttctgagcggactcattgcagatctagacgctctggatgtctgtgggagaacagagatccggaattaccgtcgtgaagtggtagaagatatcaataagctgctcaagtacctggacctggaagaggaggctgacacaactaaagccttcgatctgcggcagaaccactcaatattaaagatcgaaaaggtccttaaaaggatgcgggagatcaaaaacgagctgctgcaggcacagaacccatccgagctgtatctttcctcgaaaaccgagctacaggggcttatcgggcagcttgatgaggtgagcctggagaagaacccctgtatacgcgaagcccgtcgcagagccgtcatagaggtacagaccctgatcacctatatcgaccttaaggaggctctggagaagcgcaaactgttcgcatgcgaagaacatccctctcataaagccgtgtggaacgtcctcgggaacctatcagaaatccagggagaggtgctgtcatttgacggaaacaggacggataaaaattacattagactcgaagagctcctgacaaagcagctgctggctctggatgcagtggacccacagggggaagagaagtgcaaggccgctcgtaaacaggcagtacgtctggcccagaacattctgagctatctggatctgaaaagcgacgagtgggagtactag

SEQ ID NO: 27770 - DNA, 1476 bp, synthetic construct
  source 1..1476: mol_type = other DNA; note = Synthetic coding sequence
atggcccaaagcggcggagaggccaggccagggcctaagactgctgttcagatcagagttgccatccaggaagctgaggatgtggacgagctggaggacgaggaggagggggctgagacaaggggcgcaggggacccagcccgatacttgtctcctggttggggttccgctagcgaggaagagccatcgcgcggacactctggaactactgccagcgggggagagaacgagagagaagacctggaacaggagtggaagccaccagacgaggaactcataaagaaactggttgaccagattgaattttatttctctgatgagaacctggaaaaagacgcgttcctcctgaaacacgtgcgcagaaataaactggggtatgttagcgtcaagttacttacaagcttcaagaaggtaaagcatctaaccagggactggcggacgacagcacacgcgctgaagtactcagtggtgctggagctgaacgaggaccacaggaaagtccggaggacaacacccgtgcctctttttccaaacgagaatcttcctagcaaaatgcttctggtgtatgatttgtacctaagcccaaagctgtgggctctcgcgactccccaaaagaacggcagggtccaggagaaagtgatggaacatttgctgaaactgtttggcacatttggtgtcatttcatccgtgcgcatattgaagcctgggagagaactaccacccgacataaggaggatatcatcccgctactcacaagtgggtacccaggaatgcgcaattgtcgaattcgaggaggtggaagcagctatcaaggcccatgagttcatgatcacagagagccaaggcaaggagaatatgaaggctgtgcttataggcatgaagccacctaagaaaaaaccagcaaaggacaaaaaccacgatgaggagcctactgccagcattcaccttaataaatcactcaacaagagagtggaagaactacagtacatgggtgatgaatcttcagctaacagctcaagcgaccctgagagcaatcccacctcacccatggcaggcaggcggcacgccgcaactaacaagctctcaccctctggccaccagaacctgttcctgagccctaatgcgagcccatgcacaagtccatggagcagtcctttagcgcagcgcaagggcgttagccgcaaaagcccactagctgaagagggcagattgaactgcagcacaagtcccgaaatcttccgtaaatgtatggactattccagtgacagcagcgttactccttctggaagcccatgggttagacgtaggcgtcaagcagagatgggaacccaagagaagtcgcctggtacctcccctttgctgagtcgcaaaatgcagacagcagacggactgcccgtgggtgtcctgcggctgcccagaggcccagacaacactcgcggatttcacggccatgagagatccagagcctgcgtgtag

SEQ ID NO: 27771 - DNA, 315 bp, synthetic construct
  source 1..315: mol_type = other DNA; note = Synthetic coding sequence
atggccggaaaagctcatcgcctgtccgcagaggagagggatcagttgcttccaaacctccgggcagtgggttggaatgagctagaagggcgtgacgcaatatttaaacaatttcattttaaggactttaatagggctttcgggtttatgacacgagtggcacttcaagcagagaaattggaccatcatcccgagtggttcaacgtctacaataaggtgcacattactctgtcaactcacgagtgcgctgggctcagcgagagagacatcaacctcgcttcatttattgaacaggtggcagtgtctatgacctag

SEQ ID NO: 27772 - DNA, 738 bp, synthetic construct
  source 1..738: mol_type = other DNA; note = Synthetic coding sequence
atgatcggcgtttcatttgaagaagctaaaagcataataacgggcgctaagctttctacccggctcgagtcagcgtgggagatcgcttttatcagacagaagagtgataatatccagccagagaacctctcctgcacctccctcatcgaggcttcaggggagtatggccctcaagcatccaccctttctcttttttcatccccccctgaaatcttgatacctaagacgtcatcaaccccaaagacaaataacgacatactgagctcatgtgagatcaaaaccggatacaataagacagtgcaaattcccatcacttcagaaaactccactgttggtctttctaacaccgatgttgcttccgcctggaccgagaactatgggctccaagaaaagatctccctcaacccctcagtcagatttaaggcagaaaaattagagatggccctcaactatctcggcatccagcccactaaggagcagcatcaggccctacgccagcaggtgcaagccgactctaagggcacagttagttttggcgacttcgtgcaggtggcccgtaaccttttctgcctgcagctcgatgaggtgaacgtcggtgctcatgagatcagcaacatactcgattcccagctactgccctgtgattcaagcgaggccgatgagatggagcggttgaagtgtgagcgagacgacgcattgaaagaggtgaacacccttaaatggccaggccagaattag

SEQ ID NO: 27773 - DNA, 849 bp, synthetic construct
  source 1..849: mol_type = other DNA; note = Synthetic coding sequence
atgggcggagcagtatcagccggagaagataatgatgaactaattgacaatctgaaagaagcacagtatatcaggaccgaactggtggaacaggcgttcagagcaattgatcgagccgactattacctggaggaattcaaggagaacgcttataaagaccttgcatggaagcatggcaatatccacttgtcagctccatgtatatactcggaggtgatggaggcattggacttacagcccggattgtcgtttctgaacttaggctctgggacaggttacctctcgtcgatggtcgggctaattctaggaccattcggtgttaaccacggcgtcgaattacattccgatgtaatcgagtacgccaagcagaagctcgatttttttattaggacaagcgactcattcgacaagttcgatttctgcgagcccagcttcgtaaccgggaactgtttggagatctctcctgattgttctcagtatgaccgcgtatattgcggagccggagtgcagaaggaacacgaagagtatatgaagaatttgctcaaagtgggtggcattctcgtaatgccattagaggagaagcttaccaaaattacaaggaccggaccatccgcatgggaaaccaagaagatactggcggtctctttcgcacctttaatccagccatgtcatagtgaaagcggtaagtcacgcctggtgcaacttaggagccccagctttgtgcaaggctggagcgtcgtggtgctttctcagctgaccgcagctagtactttccaggctgaggccatcctgcctagtcagtccccaacctggctaaccttacaggtgttagccactatgccaaactag

SEQ ID NO: 27774 - DNA, 612 bp, synthetic construct
  source 1..612: mol_type = other DNA; note = Synthetic coding sequence
atggccaggcctcgaccacgcgaatataaggccggtgacttagtgttcgcaaagatgaagggttacccgcactggccagctcgaattgacgaactccccgaaggcgctgtgaagcccccagccaacaagtatccgatttttttcttcgggactcatgagaccgcctttctcgggcctaaggacctctttccatacaaagaatacaaagacaagtttgggaagtccaacaaacgcaaggggttcaatgagggactttgggagatcgagaataatcctggagtcaaatttacaggttaccaggcaatccagcaacagagcagttccgagaccgagggagaaggaggaaataccgcagacgcctcctccgaggaagaaggagacagggttgaagaggatggcaagggcaaacgcaagaacgaaaaagccggtagtaagcggaaaaagtcctatacaagcaagaagtcatccaagcagtccagaaaatctcctggcgacgaggacgataaggactgcaaagaggaagaaaacaagtcgtcctctgaggggggtgacgcaggcaacgatacgcggaataccacaagcgacctgcagaagactagtgaaggcacatag

SEQ ID NO: 27775 - DNA, 540 bp, synthetic construct
  source 1..540: mol_type = other DNA; note = Synthetic coding sequence
atgaaaacacccgtggaactcgccgtctccggaatgcaaacactgggtctgcagcaccgttgccggggaggatacagggtgaaagcccgaacgtcatacgttgatgagacgctgtttgggagcccagccggaacacgcccaacacccccagactttgaccccccttgggtcgaaaaagccaatcggacccgaggggtggggaaggaagctagtaaggctttgggagccaaaggctcttgtgagaccacgccctctaggggctcaacacccacgctgactccccgaaaaaagaacaagtacaggcccatttcacatacgccatcctattgcgacgaaagccttttcggcagtaggagtgagggggctagtttcggcgctcccagaatggccaagggggatgcggcaaaactcagggccctgttgtggacccccccaccaactcccaggggttcgcactcaccacgtccacgagaggcaccgccacctgtaccacccactcagatgggtctgagaatcagcgggcttcctcgccaaggttag

SEQ ID NO: 27776 - DNA, 1104 bp, synthetic construct
  source 1..1104: mol_type = other DNA; note = Synthetic coding sequence
atggatggtgaggacatcccagatttctcatcactcaaggaggaaaccgcttattggaaagaactgtccttgaagtataagcagtcattccaggaggcaagggatgagctggtggaatttcaagaaggaagcagggagctggaggcagaactcgaagcccagcttgtgcaggctgagcagcgaaatagagacctgcaggctgacaaccagcggctgaagtatgaggttgaggcactgaaggagaagctagaacatcagtatgcacagtcttataaacaagtgtctgtcctggaggatgacctttcccagacacgagccattaaagaacagcttcataagtatgtcagagagttggaacaagcaaatgatgacctagaacgggctaaacgtgccacaatcgtgtcattggaagattttgagcagagactgaatcaggcaatcgaaaggaatgcttttctggagtccgaactcgacgagaaggagtctctgctggttagcgtgcagcgcctcaaggacgaggcccgagatctacggcaagaactggccgtgcgcgagagacagcaggaagtgactcgcaagtccgctccctcatcccccaccctggattgcgagaaaatggattccgctgtgcaggcctccctgagccttcctgccactccagtcgggaaggggacagagaacactttcccatcaccgaaggccattcccaacggattcggtacttcgcctctgaccccctctgcacggatctccgctctgaatatcgtgggagatctactgcgtaaggtcggggctttggaatctaagctggctgcatgccgcaactttgcgaaagaccaggcatctcgcaaatcatatatcagtgggaacgtgaactgtggggtgttgaacggcaacgggacgaagttttcaaggtccggacacacctcttttttcgacaagggctcatcaagcagctgcgccatacgagcaagcagaaggcggttttcctcctctagtgctgacttagccggtcgagggggaggggacgggtctatccccgcacagcacagtacgggcgcaagtggcaaggccccacctcccacccttctccttgagacttag

SEQ ID NO: 27777 - DNA, 591 bp, synthetic construct
  source 1..591: mol_type = other DNA; note = Synthetic coding sequence
atgggctctcggtctagccatgctgctgtgatcccagacggcgactccatccgacgagagacaggattctcccaggcctccctgttgcgattacaccaccggtttcgggctctagatcggaacaagaaagggtacttaagccgaatggacttacagcagattggggcattggccgttaacccgctcggagatagaattattgaatccttcttccctgacggctcccagagagtggatttcccaggattcgtgcgggtgttggcacacttcagacccgtcgaggatgaagacacagaaacacaagaccccaagaaaccagagcctctcaatagccgtagaaataaattacactatgcattccaactgtatgacctggatcgggatgggaagatcagccgacatgaaatgctacaagttctgcggctgatggttggagtgcaggtgacagaggaacagctggagaatatagctgatcgaaccgtgcaagaagccgacgaggatggggatggagctgtatcatttgttgaatttacaaaaagtctggaaaagatggatgtcgagcagaagatgtcaatcaggatacttaaatag

SEQ ID NO: 27778 - DNA, 2313 bp, synthetic construct
  source 1..2313: mol_type = other DNA; note = Synthetic coding sequence
atgttccgatacgaatcactggaagattgtcctcttgatgaggatgaggacgccttccaagggctgggcgaggaggatgaagagatagatcagttcaatgacgacacgttcgggtcgggcgcagtggacgacgattggcaagaagcgcacgaacgacttgccgaactggaggagaagctgccagtggccgtcaatgagcagacgggaaatggcgagagagacgaaatggacctgctcggtgaccacgaggagaatctagcagagaggctgtccaagatggtgatcgaaaatgagctagaagatccagctattatgagagcagtgcaaacccgtcccgtgctgcaaccacagcctggatctctgaacagttctatctgggacggcagtgaagtgttgcggaggatccgcggtcccctgctggctcaggagatgccaaccgtctccgtgcttgagtacgccttgccccagagacctccccagggccctgaggatgatcgggacctgtccgagagggcactgcctagacgatcgacatcacctataatcggcagcccaccggtcagagcggtccctatcggcacccccccaaagcaaatggccgttccttctttcactcagcagatcctgtgccctaagccagtccatgtgagaccacctatgccccctcggtaccccgctccttacggcgagagaatgagtcctaaccagttgtgctcggtgcccaattccagcctgctgggacatcccttcccccctagcgtgcctccggtactcagccccctgcagcgcgcacagttactcggaggggcacagctgcagccaggcaggatgtctccctcccagttcgctagggtgcccggattcgtcggtagcccgttagccgctatgaatcccaaactcctccagggccgtgtgggccagatgctcccccctgcccctggcttccgcgctttctttagcgctcccccttccgccactcctcctccccaacagcacccaccaggaccagggccacacctgcagaatctcaggtcacaggcccctatgttcaggccagacacaacccatctccatccccagcaccgcagactgctgcatcagcggcagcagcagaaccggtcccagcataggaacttgaacggcgctggcgatcgaggttcacatcggagcagtcatcaggatcatttgcggaaggacccatatgccaacttgatgttgcagcgcgaaaaggactgggtttctaagatccagatgatgcagctgcagtctaccgatccatacctggatgacttttactatcagaattacttcgaaaaactggaaaaactctctgctgctgaggagatccagggagatgggcctaaaaaagagagaacaaagctgattaccccccaggtggccaaactggagcacgcctataaacctgtgcaattcgagggttcccttggaaagctcaccgttagttctgtcaataatccacgaaagatgatcgatgcagtggtgacctctcgctctgaagacgacgaaacgaaagagaagcaggtcagagataagaggcgtaagaccctagtgataatcgagaagacatattctctgctgcttgacgtcgaagattacgaacggaggtatctactttctttggaggaagaaaggcccgctctcatggatgaccggaaacacaaaatctgcagcatgtacgacaacctccggggtaagctgcctggccaggaaaggccttctgacgatcactttgtgcagatcatgtgcatcaggaaaggaaagaggatggtagcgaggatcctgcccttcctgagcaccgagcaagcggcagacatccttatgactaccgctcgtaacctgcccttccttatcaagaaagatgcacaggatgaggtgttaccctgtctgctgtcaccgttcagtctgttactgtatcacctgccaagcgtgtctattacctctctgctgcgacagctgatgaatctgcctcagagcgccgctactccggcactgtccaatccacatttgactgccgttctgcaaaacaagttcgggctgagtcttctactcattctgctcagtcgtggtgaggatttgcagagtagtgaccctgctactgaaagcacacagaataatcagtggaccgaagtgatgtttatggccacccgcgaactgctgaggattccccaggctgccctggctaagccgatttccattccgacgaatttggttagcctgttttcgagatacgtggacaggcaaaagctgaatctgttagagaccaagctgcaattggttcaggggatacggtag

SEQ ID NO: 27779 - DNA, 1518 bp, synthetic construct
  source 1..1518: mol_type = other DNA; note = Synthetic coding sequence
atgcgcctgcgacgtctggctcttttccccggagtagctctcctgttagccgcagcacggttggcagcagcaagcgacgtgctggaattaacggacgataattttgaatcacggattagtgataccggttcagcgggtcttatgttggtcgaattcttcgcaccctggtgtggccattgcaagagattggctcctgaatacgaggccgcagctacacgcctcaagggaattgtccccctcgctaaggtggattgcactgccaatactaacacatgtaacaagtatggagtaagcggctacccgacgctcaagatattccgtgacggcgaggaagcaggcgcttacgacgggccacgcactgcagatggcatagtctcacacttgaaaaagcaggcgggtccagcctcagttcccctgcggaccgaggaggagttcaaaaaattcattagcgataaggacgctagtatagtcggtttcttcgatgactcattctctgaagcccactctgaatttctgaaagccgctagtaacctgagagacaattacagattcgcccacaccaacgtggaatctttggtgaatgagtatgatgacaatggggagggaatcattctgttccgcccaagtcatctgaccaacaaattcgaggacaagaccgtggcctacacagagcagaagatgacgagcggcaagattaaaaaattcattcaggagaacattttcggcatctgtccgcatatgacagaagacaacaaagatttaatccagggcaaggacttgttgatagcctactacgatgtcgattacgaaaaaaacgcaaaagggtctaactattggcggaatagggtgatgatggtggctaagaagtttttggatgccggacacaaactgaactttgcagtggccagccgcaagactttctcacacgaactgtctgattttggcctcgagtcaactgctggagagattccagtcgtagcgatcagaaccgctaagggtgagaaatttgtgatgcaggaagaattctcccgtgacgggaaagctcttgaacggttcctgcaggactactttgacgggaacctgaagcgctacctaaaatcagaaccaatccccgaaagcaatgatggccctgtaaaggtcgtggtggccgagaattttgacgagatcgtgaataatgaaaataaagatgtcctcatagaattctacgcaccctggtgcgggcactgtaagaacctggagccaaaatataaagagctgggggagaagctgagtaaagatccaaacattgtgatcgcaaaaatggacgcaactgccaatgacgtacccagtccctacgaagttcggggattccctaccatttatttctcacccgcaaataaaaaactcaatccaaagaaatatgagggaggaagagagctttcagattttatcagctaccttcagcgagaagcaacaaatccacctgtgattcaggaagaaaagcctaaaaagaaaaagaaggcacaggaagatctgtag

SEQ ID NO: 27780 - DNA, 684 bp, synthetic construct
  source 1..684: mol_type = other DNA; note = Synthetic coding sequence
atgagcgtggtgccaccaaacagatctcaaaccggttggcctaggggtgtgacccaatttgggaacaaatacatacaacagaccaagcctctcaccttggaacggactattaatttgtaccctttaactaattacacctttggaactaaagaaccactatatgagaaggacagctccgtggcggcacgatttcagcgcatgcgtgaagagtttgataaaatcggaatgcgccgaacagtcgagggggtcctgatcgttcacgagcaccggctgcctcatgttctgctattgcagttaggaaccacgtttttcaagctcccaggcggagaactcaatcccggagaggatgaggtggaggggcttaagcgactgatgaccgagatcctgggcaggcaggacggcgtgctccaggactgggtgatagacgactgtattggcaactggtggagacctaacttcgagccaccccagtatccttatatacctgcccatatcacaaagcctaaggaacacaaaaaattgtttttagttcaactccaggaaaaggccctcttcgctgtgcctaagaactacaaactggtcgccgctcccctattcgagctttatgataatgctccgggatacggtcctattatttcctccctgccccagcttctatcacgcttcaatttcatctacaattag

SEQ ID NO: 27781 - DNA, 2244 bp, synthetic construct
  source 1..2244: mol_type = other DNA; note = Synthetic coding sequence
atgagccaggtcaagtcgagctactcctatgatgccccttcagactttataaattttagtagtttagacgacgagggcgacactcaaaacatcgacagctggttcgaagagaaggctaacctcgagaataagctcttgggaaagaatggcaccgggggactgttccagggaaagacacctctgcgcaaagccaacctgcaacaagccatcgtgacaccactgaagcccgttgataacacttactacaaagaagccgagaaagagaatctggtggaacagtctattcctagcaatgcctgcagctccctggaggtggaggccgctataagccggaagacgcccgctcagccgcagcggaggtcactacgcctttcagcgcaaaaagaccttgaacagaaggaaaaacaccatgtgaagatgaaggctaaaaggtgtgccacgccagtcatcatcgatgaaatccttccctccaagaaaatgaaagtgtcaaataataaaaaaaagcctgaggaggaaggatccgcgcatcaggatacggcagaaaagaatgccagctcacccgaaaaggcaaaagggcgtcatactgtcccatgtatgccccctgctaaacaaaagttcctgaagtccactgaggagcaggagctggaaaagtctatgaagatgcagcaagaagtggtagagatgaggaaaaaaaacgaggagtttaagaaactggccctggccggtattggccagccggtgaagaagtcagttagccaggtgaccaaatctgtggacttccatttcagaacagacgagcggatcaagcaacacccgaagaatcaggaggaatataaagaggtgaattttacatccgagctgcgtaaacaccctagcagccccgctagagtaacaaagggatgtaccatagtgaagccatttaatttatctcaaggaaaaaagaggacctttgacgaaaccgtgtctacgtacgtacctctggcacagcaagtcgaggattttcataaaaggactccgaaccggtaccatctgcgttccaagaaagacgatattaacttactgccatccaagagctccgtgacaaagatttgcagagacccgcagacacctgtactgcaaaccaaacaccgtgccagagccgtgacctgcaaaagcactgctgaactcgaggctgaggaactagagaagttgcagcagtataagttcaaagccagagaacttgatcctagaatcctggagggcggtccgattctgccaaagaaaccaccagtgaagccacccactgagccgattggctttgatctcgaaatcgagaagcgtatccaggagcgggaatctaaaaagaagacagaggacgaacattttgaattccactcgaggccatgtccaactaaaattctggaggacgtcgtcggagtgccagaaaagaaggtgcttcccatcacagtccctaagtctcctgcttttgctctcaagaatagaataagaatgccaacgaaagaggacgaggaagaagatgaacccgtcgttataaaggctcagcctgtgccccattatggtgtgccatttaaacctcaaatccctgaagcaaggaccgtcgagatctgtccatttagctttgacagtagagataaggagcgacagctgcagaaagaaaagaagattaaggaactgcagaagggggaggtcccaaaattcaaggcattgcccctcccccatttcgataccatcaatcttcctgaaaagaaggttaagaatgttacacaaatagagccgttctgtcttgagacagatcggaggggggctctgaaggcccaaacctggaagcatcaactcgaggaggaattaaggcaacaaaaggaggcagcctgtttcaaggcgcgtcccaataccgtgatcagccaggagccgttcgtgcctaaaaaggagaagaaatccgtggccgagggtttgtctgggagtcttgtccaagaaccttttcaacttgcgacagaaaagcgggctaaggagaggcaagaactcgaaaagcgcatggcagaagttgaagcccagaaagctcaacaactagaagaagcgaggctgcaggaggaggagcagaaaaaagaggaactggctaggctccggagagagttagtgcacaaagccaatcccatcagaaagtaccaaggactggagatcaagtcatcagatcaaccgttgaccgtgccagtctcacccaagttctctacccgcttccactgttag

SEQ ID NO: 27782 - DNA, 360 bp, synthetic construct
  source 1..360: mol_type = other DNA; note = Synthetic coding sequence
atgaaactcgttaggtttttgatgaaactgtcgcatgaaacggtgaccattgagctgaaaaacggaacgcaggtacatggcaccatcacaggcgtcgacgtgtccatgaatacccacctgaaagctgtcaagatgactcttaaaaaccgtgaaccggtccagctggagaccttgagtatcagaggcaacaatatacggtactttatcctcccagactcactgcccctggacacccttctggttgacgttgaaccaaaagtgaagtccaagaagcgggaggcggtcgcaggtcggggacgcggaaggggcagaggcagagggagaggtcgcggacggggacgcggaggtccgagaaggtag

SEQ ID NO: 27783 - DNA, 555 bp, synthetic construct
  source 1..555: mol_type = other DNA; note = Synthetic coding sequence
atgatgggggcatccacccttcaggagccagctctgtcccctgggcgatgtcctagacagcccctgcgaagtaaattcgggcatcaagggtccacggtgcagcgcaaatgcagcaaaactaatgctctcaatgtaagccagaagatgatcgaaatgttcgtgaggacaaagcataagattgataagagccatgagttcgccctggttgtcgtgaacgacgatactgcatggctgtccgggctgacgagcgacccgcgtgaactatgcagttgcctctatgatctcgagacagcctcatgtagtacattcaatatttccggggcttctccagctagacagcagaagaccgagttaccagttaccgaaaatgttcagaccataccacccccttacgttgttcgtactatacttgtatacagcagacccccatgccagccacagttttctttgactgaaccgatgaaaaaaatgttccagtgcccctacttcttttttgatgtggtgtacatccataacgggactgaagagaaggaggaggaaatgtcgtggaaatag

SEQ ID NO: 27784 - DNA, 1203 bp, synthetic construct
  source 1..1203: mol_type = other DNA; note = Synthetic coding sequence
atggcttccgaaaaacccctagccgcagtcacgtgtacagcacccgtcaatatagccgtgattaaatactggggaaagcgcgatgaggagctggttcttccaataaactcaagtctaagtgtaacgctgcaccaggaccagctgaaaactaccacaaccgcggtgatttctaaggactttacagaggatcggatctggctgaacgggagggaagaggacgtgggccagccccgattacaggcctgcctccgagagattcgatgcctagctcggaagcggagaaactctagggacggggaccctctgccctccagcctgagttgcaaggttcacgtggcatccgtgaataactttccgacagcagccggactggcttcctcagccgcaggatatgcatgtctagcttatacgctggctcgagtgtacggagttgaatccgatctgtccgaggtcgctcggcgagggtccggaagtgcatgcaggagcctctacggtggatttgtggaatggcagatgggagagcaagcggacggtaaggattctattgcccgacaggtggctccagagagtcattggccggaactgcgtgtgctgatactcgtcgtgtctgccgagaaaaaactgactggatccactgtaggaatgcgggcatccgttgagacatctccactgcttagatttcgcgcagagtccgtcgtgccagcaaggatggccgaaatggcccgttgcatccgcgagcgagattttccatcattcgcacagctgacaatgaaggattccaaccagtttcatgccacctgtcttgatacattcccgccaatcagttatttaaatgctatcagttggaggatcatacacctggtccatagattcaacgctcaccacggggataccaaggtggcttacacctttgatgccggtcctaacgccgttatctttactctagacgatacagttgctgagttcgtagctgcagtctggcacggttttcctccgggatccaatggcgatacatttctcaaaggcctgcaggtgcgcccagctccactcagcgccgagcttcaggcagccctggcaatggaacccaccccaggaggagtgaaatatattattgtcacacaagtcggtcctggtccccagattttggacgatccttgtgcccacctacttgggcctgacggactccccaaacctgctgcgtag

SEQ ID NO: 27785 - DNA, 1350 bp, synthetic construct
  source 1..1350: mol_type = other DNA; note = Synthetic coding sequence
atgagggaatgtatcagtattcacgtgggccaggccggtgttcaaatcgggaacgcctgctgggagctatattgcttagaacacggcattcaaccagacggtcagatgccctcagataagaccatcggcggaggagatgactcctttaatactttttttagcgagaccggcgctggaaaacacgtgcccagggctgtgtttgtggatctggaacccaccgtcatcgacgaggtcagaacaggcacttacaggcaactctttcacccagagcagcttattaccggaaaagaggatgcggcaaataattatgccagaggccattatactattggcaaggaaatcatcgacctcgtcctcgaccgtattcgcaagttggccgatcagtgtacagggctgcaaggattccttgtttttcactcatttggcggaggaaccggctcaggctttacttcgctgctgatggaacgccttagtgttgattatggcaagaaatccaagttagaattcagcatctaccccgctcctcaggtgagtacggcagtggtagagccctataacagtatcttaaccacccataccaccttagagcattccgattgtgcttttatggtcgacaatgaggcaatctatgacatctgtagacgtaatctagacattgaaagacccacttacacaaatctgaaccgcttaatatctcagatcgtaagcagtatcaccgcgagccttcggttcgatggcgctttaaacgtagatttaactgagttccaaacgaacctcgttccctaccctcgcatacattttcccctagccacatacgctcccgtcatatcagctgaaaaggcatatcatgagcaactaaccgttgcagaaattactaatgcctgctttgaaccagccaaccagatggtgaagtgtgacccaagacatggtaaatacatggcgtgctgcttgctatacaggggcgacgtcgtgccgaaggacgtgaatgcagccatcgccacaataaagacaaaaaggactatacagttcgtcgattggtgccctactgggtttaaggtgggaattaactaccagcccccaacggtcgtccccggaggtgacctggctaaggtgcaaagggcagtctgcatgttgtccaataccacagccgtcgccgaagcctgggcaagacttgaccacaaattcgatttaatgtacgcgaagcgagccttcgtccactggtacgtgggtgagggcatggaggaaggggagttttccgaggcgcgagaagacatggcagccttggagaaggactacgaggaggtcggtgctgactcagccgacggtgaagacgagggggaggagtattag

SEQ ID NO: 27786 - DNA, 1365 bp, synthetic construct
  source 1..1365: mol_type = other DNA; note = Synthetic coding sequence
atgagtacgtttaggcaggaggacgttgaagatcattacgagatgggcgaagagcttggctctggacagttcgcaatcgtccgcaagtgcaggcaaaaaggtaccgggaaggagtacgcagctaagttcattaagaaaaggagactgtcatcctccagaaggggcgtgagccgcgaggaaattgagcgagaggtgaacattttgagagagatacgacacccaaatattatcaccctgcatgatatattcgagaacaagaccgatgtggtgttgatcctggaattggtatccggtggcgagctgttcgactttctcgctgagaaggaatcactcactgaagacgaggctactcaattcctgaaacagattttagacggcgttcactatctccacagcaaacgaatcgctcatttcgacctgaaacctgaaaacataatgttacttgataaaaacgttcctaacccccgtatcaagcttatagattttggtattgcccataagattgaagccggtaacgagtttaagaatatttttgggactcctgagttcgtggcccctgagatcgtgaattacgaaccactgggcctggaggcagacatgtggtccattggggtgatcacatatatattattgtccggcgcttctccctttctcggcgagacgaaacaagagacgctgaccaatattagtgccgtgaactatgattttgatgaagaatatttctccaatacttcagaattagcaaaggattttatccgaaggctgctggtcaaagatccaaaaaggcgcatgactattgctcagtcactcgagcatagctggattaaggctataagacgccgtaatgttcggggtgaagacagcggccgaaaacccgaaagaagacggctgaagacaacgcggctcaaggaatacacaattaaatcacactccagcctgcctccaaacaattcttacgctgacttcgaacgattttcaaaagttctggaagaagccgctgccgcagaagagggcctgcgggagctccagcggtcacgccgtctctgtcacgaggatgtcgaagcgctggccgctatctatgaggagaaagaggcctggtacagggaggaatctgactccctgggccaggacctgaggcggctgcggcaggaactgctgaagaccgaagccctcaagcggcaggctcaggaggaagccaaaggtgccctgctcgggaccagcgggctgaagagaagatttagccgcctggagaaccggtatgaagcgctggctaaacaggtcgctagcgagatgaggttcgttcaggatttggtgcgcgctctagaacaggaaaagctgcagggtgttgagtgtgggctgcggtag

SEQ ID NO: 27787 - DNA, 1326 bp, synthetic construct
  source 1..1326: mol_type = other DNA; note = Synthetic coding sequence
atgaaaaaattcttccaagaattcaaggccgacataaagtttaagtcagcaggaccaggccagaaactcaaggaatcagtaggagaaaaagcccataaggaaaaacccaatcagcctgctccaaggcccccaaggcaagggcctacgaacgaggcccagatggccgcagcagccgcactggccagactggaacagaagcagtctcgcgcatggggacccacctcacaggacactatccgaaatcaagtgcgcaaggagctgcaggccgaggctaccgtatctgggtctccagaagcccctggaacaaacgtagttagcgaacccagagaagaaggaagcgcgcacttggcggtacctggcgtgtattttacttgccctctaactggtgccaccctgaggaaggatcagagagatgcatgcatcaaagaggcaatattactgcacttcagcacagacccagtggctgctagtataatgaagatctacactttcaataaggatcaggatcgggtcaagcttggcgtcgacaccatagccaagtatctcgacaatatacacttacatcccgaggaggagaaatataggaaaatcaaattgcagaataaggtcttccaggagcggatcaactgcctagagggcactcatgaattctttgaagccatagggtttcagaaggtcttgctcccagcgcaggatcaagaggatccagaggaattctatgtgctcagcgagacgacgctcgcacagccgcagtccctagagcggcataaagaacagctcctcgccgcagagcccgttagagccaagctagatcgacaaaggcgggtgttccagccatcccctctagcgagccaattcgagctgcccggagacttttttaacctaactgcagaggagatcaagagggagcaacgacttcgctccgaagctgtggagagactctccgtcctccgaaccaaggcgatgcgagagaaggaggaacagagaggcctcagaaagtacaactacacactccttagagtgcgacttccagacggatgcctgctccagggcacattctacgccagggagaggctgggagctgtatatggattcgtccgcgaggcacttcaaagcgactggctgccctttgaactactggcttctggtggtcagaagctttctgaagatgaaaacttggccctgaacgagtgcggtttagtcccctctgccttactcaccttctcctgggacatggctgtgctggaggatatcaaagcagctggagctgaacccgattctattctgaagccagagcttctgagcgccatcgagaagctcctttag

SEQ ID NO: 27788 - DNA, 900 bp, synthetic construct
  source 1..900: mol_type = other DNA; note = Synthetic coding sequence
atgcgggatcttctacttcactggggacctggccctccaattagagccccacaggaggaggccgaggccttgctcgagctccaaggcaggttgcaggaagcccaggatacaacagaagccctgagagcccagctgggtgtccaagaagtccagctccagggcctccagggtgccctgcagcagctgcaacaagaaacagagcagaactgccgaagagagcttcagcaaatgcacgggcaactcgccggactgagggctcggatggcctccctacgccaaggctgtggagacttgagaggcctggtttccaccttcactcaatcgtgtcaagggtccctgtctgaggctcgcggacaggtgagctgggctctgggagctttgagcagcgggggtcccggaacccaactccctgaaggccagcagggtcctccagccggatgccctggaagactacctgagctgaagggcaatattcgtgttctatgtagactacgtccagggacatccagctctctggtatccgtggagccaggtccaggtggtaccgtgactacctgctaccgcggacgacaccgtcgatttcgcttggactgggtgttcccccctgatgcttctcaagaggaagtgttcagagagctggaacccgctgtactgtcatgtctgagaggatactctgtctgcatcttcacgtacgggcagaccggaaccggaaagacctattccatggaggggccacccgaagacccagggatcgtgccaagagccttgcagtctttatttcgtgaaatgggggctgggagacaacatagacgctaccacggcagatgcctcagccccgctgagtcacccgagcatccgagacctgggctgccaccatgccgcgcacgctccccattatag

SEQ ID NO: 27789 - DNA, 2517 bp, synthetic construct
  source 1..2517: mol_type = other DNA; note = Synthetic coding sequence
atgtacgccttctacagcctgctcatctatatattttatagcttgttccggcgagatgggggtgccgcagccgctgccgaacccggtgacccagcacagcgtgccaggaagcccagaggcagaaggagaccagacctgccagcccctgaattgtggaccgaacttaccgggttggccgcaagctccgaacctgaagacggatctgaaggcgctgcagaggggcgtgccgcagccgtttcgttagaagaggctctcttgcggctggccgagtttctgtctgtgcagttgggtgccgaggaatcttgcgggggtccagcagatttggggcagtccggcgaggtgccctccctgctgacagtcactagtcagctccttgcactcctggcctggttacgatcgccgagaggccgacaagccctgttgcagggcacacaaccggcaccaagagtccggcctccgtctcctgacggttccacttcgcaggaggagagcccaagtcacttcacggccgtgcccggagaaccattaggcgatgagacccagggccaacagccactgcagttggaagaagaccagcgcgcttggcaacgtctggaacagttgattttgggtcaactggaggagcttaagcagcagctggagcagcaggaagaagagctgggaaggctgcgactcggggttggcgctacagactccgagaagagggtgcagcatcttaccctagagaatgaggccctgaaacagagcttaagtctgatgagagatctgctcctgcattggggacctggcccacctatcagagctccacaagaagaggctgaggcactgctagagctgcaggggcgactgcaggaggcccaggatactaccgaggctttacgagcgcagcttggggttcaggaagttcaactacagggtctgcagggcgctttacagcagctgcagcaggagactgagcagaactgcagacgggagcttcaacagatgcatgggcaactcgcgggtctcagggcgaggatggcctctcttcgccaaggatgtggcgatctccgcggacttgtgtcaacgttcacacagagctgtcagggctcattgtcagaagcaaggggccaggttagttgggctttgggagctctgtccagcggcggtcctggcacccagttgcccgaaggtcagcagggaccgccagcgggatgccctgggcgtctgcctgagctgaaaggcaacattcgcgtgctatgtcgactgcgccctgggacatctagctctctcgttagtgtggagccgggacctgggggtactgtaacgacctgctatcgcggtcggcatcggaggttcagactcgactgggtgtttccaccagatgcctcacaggaggaagtgtttagggaactggagcctgcagtgcttagctgcctcagaggatactcggtctgtatctttacatacgggcagacaggcacagggaaaacctacagtatggaggggcctccagaagatcctggaattgtaccaagagctctgcagagtctgttccgggaaatgggcgctggtagacagcatcgcgtcaccctgagtatggtggagatttacaacgaggccgtccgtgatctgcttgccccagggcctcctgaacgcttagcggtgcgtcaagggccagagggccagggaggtatccaggtcgcaggactcacacactgggacgtgcccaatttggaaacattgcatcaaatgctgaaactcggaaggtccaaccgagcgactgccgctactgctatgaatcaaaggtctagccggagtcatgcgctggttaccctgaccctccgcgctgcgtcccctcctagggccccaggcactgccggaaccctgcacctggtggatctagccggaagcgaacgcgctcggaaggccggtgccgcaggtcctccgcgtggggaccccgacggagcaaggcgactgagagaagcgcagacgataaatcgaagtctgcttgccttgggaggcgtcatggcagctctccgggcacacagaccgcacgttcccttccgggattctcagttgactcgcctgctgcaacccgcactgggccctggtaccactgcagtcctgctgcttcaggtgggtgccggtgctggccaagtgtgtgcctgccgctcgcctccaacgagggctagacctcccgctcccctcgcacgccgatcccccagaggcaggcggatatcaggccgtcaaagtgccccttcgtcttctccaactgagtgggtcaagtggtcatgggggcaacccggtgccgctggttctagagctccccctggaagattattgcccagcgcacctactcttagatctccagggccacctgccccactgcggaggcccctggccgtgcttcatgctccggtcccaactactgccagagctaggctgagtcgcccacagagagcatgtccttcgagcccgggatctcgtccttgtccatggggacttcggcctggcttgtgttggcaacggagatag

SEQ ID NO: 27790 - DNA, 597 bp, synthetic construct
  source 1..597: mol_type = other DNA; note = Synthetic coding sequence
atggcttctgggaacgcccgtataggcaagcctgcacctgatttcaaggccacggcggtggtagacggtgcttttaaagaggtcaaactgtctgactacaaaggcaaatacgttgttttgtttttctaccccctagatttcactttcgtgtgcccgacggagattatcgcttttagcaaccgcgcagaggatttccggaaactcgggtgcgaggttctgggagtgtcagtcgactcacagttcacacaccttgcttggatcaatactcctcggaaagaagggggattgggccctctgaatatccccctcctggccgacgttacaaggaggctgagtgaggattacggagttctcaagaccgatgaggggattgcttatcgcggattgttcatcatcgatggcaaaggggtgctgcgccagatcactgtgaatgacctcccggttgggagatctgtggacgaagctctcagattggtgcaggcttttcagtacaccgatgaacacggcgaggtatgccccgctggttggaagcctggctcagatacaattaaacccaatgttgatgattctaaggagtatttctcaaaacacaattag

SEQ ID NO: 27791 - DNA, 1380 bp, synthetic construct
  source 1..1380: mol_type = other DNA; note = Synthetic coding sequence
atgtctgtgcgcttctcctcaacaagcaggagactggggagttgtggcggtacaggcagtgtgagactgtcatctggtggtgccggttttggagccggaaatacatgcggagtgccgggtatcggtagtggattttcctgcgccttcggcggtagcagcagcgccggtggttatggaggcggtctaggagggggaagtgcctcctgcgccgcttttaccggaaacgagcacgggctcctctcagggaacgagaaggtaacgatgcaaaatctgaatgacagactagcctcctacttagaaaacgtaagagccctggaagaggccaacgccgacctggagcaaaagattaagggctggtatgagaagttcggcccaggcagctgtcgcggactcgaccacgactactcgagatatttccccataatcgacgaactcaagaatcagatcatatcagctaccacctccaatgctcatgtcgtccttcagaacgataacgcgagactgactgcggacgactttcgattaaagtttgagaacgaactggctctgcatcagtccgtggaagccgacattaatggtctgcgtcgggtgttggatgaacttacactctgcaggacagaccttgagatccagctggaaactctgagcgaggaactggcctacctgaagaaaaatcatgaagaggagatgaaagccctgcagtgtgctgctggcggaaatgtgaacgtcgaaatgaacgctgctcccggagtggatctgaccgtgctgcttaacaatatgcgagcggaatacgaggcactggcagagcagaatcggcgtgatgccgaggcatggtttaacgagaaatcagccagtttacaacagcagataagtgacgacgctggggctaccacttcagctcggaatgaactgatcgaaatgaagcgcactttacagacattagagatcgaactacaaagcctgttggccactaaacattctttggaatgctcactgacggaaaccgaaagtaattactgcgcccagctcgcacaaatacaggcgcaaattggggctctggaagaacagctccaccaggtgaggactgaaaccgagggccagaagctggagtacgagcagttgttagatatcaaggtgcatctggaaaaggaaattgaaacttactgccttctgattgatggcgaagatggctcctgctccaagtccaagggatacggcggtccaggtaatcagactaaggatagctcaaagactaccatcgtaaagacagttgtggaagagatagatccacggggtaaagtgttatcctcccgtgtgcacacagtggaagaaaagtctacaaaagtgaacaacaaaaacgagcagcgagtttctagttag

SEQ ID NO: 27792 - DNA, 834 bp, synthetic construct
  source 1..834: mol_type = other DNA; note = Synthetic coding sequence
atgccttctgtgtcaaaggccgcagccgctgccctttctgggagcccgccacagacagaaaagcctacacactacaggtatctgaaggagttccggactgaacagtgcccgctgttcagccagcacaagtgcgcgcagcatcggccatttacatgtttccattggcacttcctcaatcagaggagacggcgacctttaagaagaagggacggcacatttaactacagtccagatgtttattgcagtaagtataatgaggccactggcgtgtgccctgacggcgacgaatgtccatacctgcatcgaacaacgggggacactgaacgcaagtaccacctccggtattacaagacaggcacgtgcatacacgagaccgacgcgcgaggccactgtgtaaagaacggcctgcactgtgctttcgcgcatggccctctcgatttacgcccacctgtgtgtgacgtgcgagaactccaggcccaagaagcactgcagaatggtcagctgggcggtggggagggggtgccagacttgcagcccggtgtcctagcatcgcaggccatgattgagaagatcctgtcggaagatcctcgctggcaggatgcgaatttcgtcctgggctcttataaaactgagcagtgccccaaaccccctaggctgtgccgccagggatacgcttgcccgcattaccacaattcacgggatcgacggaggaatccccgaaggtttcagtactcttggcagctcggacgtcgggtgttgcggttaagtccacgagctaacaatcctcgggtggcactccccagagtacatactggaccatcttccactgcttag

SEQ ID NO: 27793 - DNA, 918 bp, synthetic construct
  source 1..918: mol_type = other DNA; note = Synthetic coding sequence
atggacttatccggggttaagaagaaatcactgctgggtgtgaaggagaacaacaagaagagctccaccagggcgccatccccaactaagcgcaaagaccgttccgacgagaaatccaaagacagatcaaaagacaagggggctaccaaagaaagcagtgaaaaggatcgaggaagggataagacacgcaaaaggcgaagcgcttcatccgggagctccagtacacggtcacgaagctccagtacgagctcctctggaagttccacttccaccggatccagtagcggatcttcgtcgtcgagcgcatcttccaggtccggtagttcctcaactagccggtcttcctccagctccagcagttccggatctcctagtcccagcaggcggcgtcacgacaaccggagacgctcgaggtccaagagcaaacccccaaagagagacgagaaggagcgcaaaaggcgcagcccctctccaaagccaacgaaggtgcacatcgggcgattgacaagaaacgtcacaaaagatcacatcatggagatcttctcgacttacgggaagatcaagatgattgacatgcctgtggagcggatgcacccacacttaagtaagggctacgcttacgtggaatttgagaaccctgatgaggcggagaaggccctcaagcatatggacgggggtcaaatcgacgggcaggaaatcactgccacagcagtacttgccccatggccccgacctccaccgagacggttctctccccctcgacgaatgctgccgcctcctcccatgtggagacgtagcccacctaggatgcggcgtcggtcgcggagcccaaggcgccgaagccctgttaggaggcgcagcaggagtcctgggcgacggagacaccgttctcgcagcagcagcaacagctcgcgttag

SEQ ID NO: 27794 - DNA, 3198 bp, synthetic construct
  source 1..3198: mol_type = other DNA; note = Synthetic coding sequence
atgagaaagcaggaagtaaggaccggcagagaagctggtcagggccacggaactgggtcaccggcagagcaagtcaaggccctgatggacctgctggcagggaaaggcagccaggggagccaagcacctcaggcactggatcgtacccctgacgcacctctgggcccttgttcgaacgactcccgaatccagaggcaccgcaaagccttgttgtcaaaggtgggtgggggaccagagctgggcggtccatggcatcgcctggcgtcactgctgctggtcgagggcctgactgacttacagctgcgcgaacacgacttcacgcaggtggaagcaaccagagggggaggccatccagcacgtacagtcgcactcgaccgcttattcctgccgctgagccgggtgagtgtaccaccaagagtttctattactatcggcgtggccggaatgggtaagacaactcttgtgagacatttcgtcagactttgggcccacggacaggttgggaaggacttttcgctggtgctgcctttgaccttcagagatctaaacacccacgagaagctgtgtgccgacaggctgatatgtagcgtctttcctcacgtgggcgaaccctccctcgccgtcgcagttccggctagagctctgctcatactcgacggactggacgaatgtcggacccccctcgatttcagcaacaccgtggcatgtactgatcctaagaaggagattccagtggaccaccttattacaaatattatcagaggcaatctgttccccgaagtctcgatttggattacttcgaggccttctgccagtggacagattcccggaggcctggtggatagaatgaccgagatccggggttttaacgaagaggagataaaggtctgcttagaacagatgtttcctgaggaccaagccctgcttggctggatgctgtcacaagttcaggccgaccgcgctctgtacctgatgtgtactgtgcccgcattctgtaggctcacggggatggcactgggtcacctctggcgctcccgaacgggaccccaggatgccgaactgtggccacccagaaccctgtgcgagctgtattcctggtactttaggatggcactgtcaggggagggacaggagaagggaaaggcctcccccagaatcgagcaggtagcccatggcggacggaaaatggtaggcaccctgggaaggctggcattccatggcctgctaaagaagaagtatgtgttctacgaacaagacatgaaggccttcggtgtggatttggccctgctccagggtgccccatgttcttgcttcctgcagcgcgaggagactctggcctccagcgtcgcctactgcttcacccacctcagtctgcaggagttcgtggcagcagcttactactatggggcaagccggagggcgatctttgatctgttcacagaatcgggcgtgagctggccaagattgggcttcctaactcacttcagatccgcagcccagcgggctatgcaggccgaagacggcaggttagacgtgttcctgaggtttcttagcggcttattgtcacccagagtcaatgccttgcttgctggaagtctcctggcacaaggtgaacaccaagcctaccgcacacaagtagcagaactgctgcaggggtgtttaagacccgatgccgcagtgtgtgccagggcgattaacgtgctacactgtttgcatgaactacagcatactgagctggccagatccgtggaggaggcaatggaatccggcgctctcgctcgacttacaggtccagcccatcgcgctgctttagcctacctgctgcaagtctcggatgcctgtgctcaggaggcaaatctttcactgtctcttagccagggcgtgctgcagagcctcctgccccagcttctgtattgtcggaagctgcgcctggacacaaaccagttccaagatcccgttatggaactgttggggtccgtgttaagcggaaaggactgtagaattcagaagatcagtcttgcggaaaatcagatttccaataaaggggcaaaggccctcgctcggtctctgctggtgaataggtctctgaccagcttggacctgcgcggaaacagcattgggccacagggagccaaggcactagcggacgccttaaaaatcaacaggacattgacatccctgtcactgcaaggaaacaccgtccgggatgacggggctagatccatggcggaagctctagcatccaataggactctttcaatgctacacctacagaagaattccataggacccatgggggcacagcgcatggctgacgccctgaaacagaatagatccttgaaagaactgatgttttcatcaaacagtattggagatggaggtgccaaggcacttgctgaggccctcaaagtcaaccagggattggagtccctggacctgcagtccaattcgatcagcgatgcaggtgtggctgcccttatgggagcactctgtaccaaccaaactctgttatccctaagtctgcgggagaatagtatatcccccgaaggcgctcaggctattgcacatgccctgtgcgcgaactctacgctgaagaatttggacttgaccgctaacttactccacgatcaaggagcaagggctatcgctgtcgccgtgcgggagaatagaacactgacttcactccacttgcagtggaacttcatccaggctggcgctgcccaagccctgggccaagccctacagctgaatcggtcgttgacttcgctggacctccaggagaacgccattggcgacgacggggcatgcgccgtcgctcgggcactgaaggtcaacacagccctgaccgcactgtatcttcaggtcgccagtattggggctagcggcgcacaggtgcttggcgaagcgctagcagtgaatagaacactggagattctggacctcaggggaaatgctattggggtagcaggagccaaggccctggctaacgccctgaaagttaacagttcattgcgcaggcttaacctgcaagagaattcgttgggaatggacggagccatttgtatcgctaccgcactctccggaaaccacagactgcaacatattaacctgcagggaaatcacataggggattccggtgcgcgtatgataagcgaagcaataaagactaacgctccaacgtgcacggtggagatgtag

SEQ ID NO: 27795 - DNA, 927 bp, synthetic construct
  source 1..927: mol_type = other DNA; note = Synthetic coding sequence
atgaacccaatagtggtggtgcatggcggaggggcaggacccatctctaaggatcgcaaagaacgagtccaccagggcatggtccgcgcagccacagttggctacgggattcttcgggagggcggatctgccgtagatgccgtggagggcgcagtagtggcactcgaagatgatcctgagttcaatgcagggtgtgggtccgttctgaacacaaacggcgaggtagagatggatgcatccattatggacggcaaagacctgagtgctggcgcagtcagtgctgtgcagtgcatagcaaacccaattaaactcgccagactagtgatggaaaagaccccacactgtttcctgactgatcaaggggcagcccagttcgctgccgcaatgggcgtgcctgagatcccaggggagaagctcgtcacagagcggaacaaaaagagactcgagaaggagaaacacgagaagggcgctcagaaaacggattgtcaaaagaacctaggaaccgtgggggctgtcgccctggattgcaaaggcaatgtggcctacgccacaagcaccggagggattgtcaacaagatggtcggcagggtgggagacagtccctgcttgggcgctggcggatatgcggacaacgatatcggggcagtgtcaaccaccggtcatggagaatccattctgaaagtcaatttagcacgcctgactttgtttcatattgaacaaggaaaaacagtagaggaggccgcagacctgagtctggggtacatgaagtctagagtgaaaggactgggaggcttaatagttgtgtcaaaaaccggggactgggtggccaaatggacaagtacttcgatgccatgggcagctgctaaggacgggaagctccacttcggaattgacccagacgatactacaatcaccgatctgccatag

SEQ ID NO: 27796 - DNA, 1212 bp, synthetic construct
  source 1..1212: mol_type = other DNA; note = Synthetic coding sequence
atggccggacgtcgggcacagaccggtagtgcgccaccgaggccagctgcgcctcaccccccagctagtagggctttcccacagcattgcaggcctagagatgcggaacgacctccgagccccaggtcccccttgatgccgggatgtgagctccccgtgggaacttgcccggatatgtgcccagcggctgaacgagcacagcgcgagcgagagcatcgcttgcatagacttgaagtagtgcccggatgtagacaagatccaccaagagccgatccacaaagggccgtaaaggagtatagtcgtcccgcagcaggaaaaccaaggccacccccaagccagcttagacccccatcagtgttgcttgccacagtacgttacctggccggagaagtggctgaaagtgctgatattgccagagcggaagtggcctcattcgtggccgatcggctgagggccgtcttgctcgatctggcactccagggggcaggagacgcagaagctgccgtggtccttgaggcagctctcgctaccctgttgaccgtcgtcgctagacttggacccgatgccgctcggggaccagcagacccagtgctgttacaggcacaggtacaagaagggtttggaagccttcggcgatgttatgcaaggggggctggaccccacccccgacagccagcttttcaggggctcttcctcctttataatctggggtccgttgaagctctgcatgaagtcttacaactgcccgctgcactcagggcctgccctcctcttcggaaagctctggccgttgacgcagcctttcgggaggggaacgcagctcgtctctttaggctgctccagacattaccgtatctgccatcttgtgcggtgcagtgccatgtgggccatgcacgccgagaggcactggcaagattcgcacgggctttctctacgcccaaaggccagacgctcccccttgggttcatggtgaacctactagctctggacggattgcgggaggctcgcgatctgtgccaggcacacgggctgcccttagacggagaggaacgggtggtgtttcttcgaggacgatatgttgaagagggcctccccccagcaagtacatgcaaagttctggttgagtctaagctgcgtggacgcaccttggaagaagtggtgatggccgaagaggaagacgagggcacagatcgacccggatctccggcatag

SEQ ID NO: 27797 - DNA, 894 bp, synthetic construct
  source 1..894: mol_type = other DNA; note = Synthetic coding sequence
atggccgaactgacagccctggagagcctgattgagatgggctttccgcgaggtagggcggagaaagcactggctctgacaggtaaccagggaatcgaggctgcaatggattggctcatggagcacgaggacgaccctgatgtggacgagcccttggagactcctttgggtcacatattgggcagggagccaacatcctcagagcaaggcggactcgaaggtagcggcagcgctgctggcgagggcaagcctgctctgagcgaagaagagcgtcaggagcagaccaagcgtatgctcgagcttgtggcccagaaacagagggaaagagaggagcgggaggagcgggaggctttggaaagagaaagacagcggagaaggcagggacaggagctttccgcagcaaggcaaagactgcaagaagacgagatgaggcgagcagctgaggagaggaggagggaaaaggctgaagagctggccgcaagacagcgtgtcagagagaaaatcgaaagagataaagctgaacgtgcaaaaaagtacggaggaagcgtggggtcacagcctccccctgtggcgccagagccaggccctgtcccttcctccccctcccaggagccgccaacgaaaagggagtacgaccaatgtaggatacaggtcagactaccggatggtaccagcctgacacagactttccgcgctagggaacaactggccgctgtgagactgtatgtggagcttcataggggtgaggagctggggggaggacaagaccccgtccagttgctcagcggatttccaaggagggcattcagtgaggcagacatggagcgtccattacaagaactcgggctggtgccctcagcagtgctgatcgtcgcaaagaagtgcccttcttag

SEQ ID NO: 27798 - DNA, 570 bp, synthetic construct
  source 1..570: mol_type = other DNA; note = Synthetic coding sequence
atgcgactgagtctgcctttactattactactcctgggagcctgggctataccaggaggactgggggaccgcgctcccctgaccgccaccgcccctcagctagacgacgaggaaatgtactcagctcatatgcccgcacacttaaggtgcgacgcatgccgggctgtcgcatatcagatgtggcagaatttggctaaggcagagacaaagttacatacaagcaacagtgggggtaggcgagaactatctgagttagtgtacacagatgtgctggaccggagctgcagcaggaattggcaggactacggggtgcgggaggtcgaccaggtgaaaagactaaccgggcctggactttcggagggaccggagccttccatctctgtcatggtcaccgggggaccatggccaacccgactgtctcgaacctgcctccattatctgggcgagttcggcgaggatcaaatttacgaagcgcaccagcaggggcgtggtgccttggaggccttgctttgcggtggcccacagggggcatgctcggaaaaggtgagcgctactagggaggaactttag

SEQ ID NO: 27799 - DNA, 3129 bp, synthetic construct
  source 1..3129: mol_type = other DNA; note = Synthetic coding sequence
atggcaaatgattctcccgctaagtctctcgttgacatcgatctgagcagtctcagggacccagctggaatctttgagctggttgaggttgtgggaaatggaacatacgggcaagtatacaaagggagacacgtgaaaaccggacagctagctgcaattaaggtcatggatgtgacagaagacgaagaagaagagatcaagctggaaattaatatgctgaaaaaatatagccatcacagaaatatcgcgacctactacggggcttttatcaaaaagagccctcctgggcacgacgaccagttgtggcttgtgatggaattttgtggcgctggcagcataacagacctggttaagaatactaagggaaacacacttaaagaggactggatcgcctacataagcagagaaattctacgtggcttagctcatctgcacatacaccacgtgatccacagggatattaagggacaaaacgttctactgactgaaaacgctgaggtcaagctggacgagacggaatatgaatactctggtagtgaggaggaggaggaagaggtgcctgaacaggagggggagccatcatctattgttaatgtccctggagaatccaccctgagaagggactttcttcggctccagcaagagaataaggaacggagcgaggctttaagaaggcagcagcttttgcaagaacaacagctaagagagcaggaagagtataaaaggcagttgttggcagagagacaaaagaggattgaacagcagaaggagcagagaaggcgcttagaggagcagcagcggagggaaagggaggccagacggcagcaagagcgagagcagaggaggcgtgagcaagaagaaaagcgacgtctggaggaacttgaaaggcgaagaaaggaggaagaagagagaaggagggccgaagaggagaagcgaagagtcgagagagaacaagagtatattcgtaggcagttagaggaggagcaacgtcaccttgaagtactgcaacagcaactgctccaggagcaagccatgcttctggaatgcaggtggagggagatggaagaacaccgccaggctgaaagactgcaacggcaactccagcaggagcaagcatatttacttagtctccagcacgaccacagaaggccgcacccccagcacagtcagcagcctcccccaccacaacaagagaggagcaaaccaagttttcacgcgcctgaaccaaaggctcattacgagcccgctgacagggcaagggaagtgcccgtgagaaccacctccaggagccctgtgctgagccgtcgggattcacctctgcaaggatccggacagcagaacagccaggccggtcagcggaactcaacaagctctattgagccgcgattgctgtgggaacgggtggaaaaactggtgcctcggccaggttcaggctcgtcttccggcagctcaaactcaggtagccaaccagggagtcatcccggttctcaaagtggctcaggtgaacgcttccgagtcagaagctcctctaagtccgaggggagcccctcgcagcgtctcgagaatgctgtcaagaagcctgaggacaagaaagaagtgttcaggcctctgaagcctgccgtgaggattgacctcacggctctggcgaaggagctgagagcggttgaggatgtgcggccaccacacaaagtgactgactattcttcgtcctctgaagaatcagggacaaccgatgaagaagatgacgatgtcgaacaggaaggagctgatgaatccacatccgggccagaggatacgcgggcagccagttctctgaacctgtctaatggagagacagaaagcgttaaaacaatgatcgtgcacgatgacgtcgaatcagaacccgctatgaccccgagtaaggaaggcactctgattgttagacaaacccaatccgctagtagtacactccaaaagcataaatcatcgagcagtttcactcctttcatcgatccaaggctcttacaaatctctccatcctccggaactacagtgacctctgttgttggattctcatgcgacgggatgcgaccggaggctatcaggcaagaccctacacgaaaaggcagtgtggtgaacgtgaatccaactaatactaggccccagtccgacacaccagagattcgaaagtacaagaagcgcttcaattccgagatcctgtgcgcagcactctggggcgtgaacttgctggttggaacagagagcggattaatgcttctagataggagcggtcaggggaaagtgtacccattgatcaaccgcagacggtttcagcagatggatgtcctggaaggtctcaacgtgcttgtgacaatcagcggcaaaaaagataagctaagggtgtattaccttagctggctgcgaaacaagatattacacaatgacccggaggtcgagaaaaagcagggctggacaaccgttggcgacttggaaggttgcgttcattataaagtagtgaagtacgagagaataaaattcctggtcatcgctttgaaaagtagcgtcgaagtctacgcatgggcaccaaagccctaccacaagttcatggcctttaagtctttcggtgaacttgtccataagcctctcctagtagaccttacggtcgaagagggtcagagactaaaggtcatatatggctcttgcgctggctttcatgccgttgacgtagattccggctcagtgtacgacatctacctccctacacacatccagtgcagtataaagcctcacgcaatcattatccttcccaacacggatgggatggagcttctggtctgttatgaagacgagggagtctacgttaatacgtacggtcggataaccaaagacgtcgtgctgcaatggggagaaatgccaacttctgtggcctatattcggagtaatcagacaatgggttggggcgagaaggctattgaaatcaggagcgtagagacaggccacctggacggggtattcatgcataagagagcacagaggctcaagttcttgtgtgagcgcaacgataaggtgttcttcgccagtgtgcgcagtggcggttcatcccaggtgtactttatgaccctgggaaggacaagcctcctcagttggtag

SEQ ID NO: 27800 - DNA, 1113 bp, synthetic construct
  source 1..1113: mol_type = other DNA; note = Synthetic coding sequence
atggggttcaaccgtcccagcaaaatacaagagaatgctctgcctatgatgttggcggagccaccacagaatctgatagcacagtctcaaagcggaactgggaaaaccgcagctttcgttctggcgatgctttcgagggttgaaccaagcgacaggtacccacaatgtttatgcctgagtcctacatatgaactggctctgcagactgggaaagtcatagagcagatgggaaaattctatcctgagttaaaactcgcttatgccgtgagggggaataaactagaaagaggacagaaaattagcgaacagattgtgatcgggactcccggtacggtgctggactggtgcagcaaacttaaatttattgatcccaagaaaattaaagttttcgtcctggatgaggccgatgttatgatagctacacagggccatcaagaccaaagtattagaatacagaggatgctgccacggaactgccagatgctccttttctcggccacttttgaggatagtgtgtggaaatttgcccagaaggtggtgcccgaccccaatgttataaagctgaagcgtgaggaagagactctggatacgatcaagcagtattatgttctgtgttcaagccgggatgagaagtttcaggcactgtgcaacctctatggggctataacaatcgctcaggctatgatcttctgccatacacggaaaaccgcgagttggcttgctgctgagctaagcaaggaaggccatcaggtggcactgttgagcggtgaaatgatggtagagcaacgcgcagctgtcatcgagcggttccgcgagggaaaggaaaaagtattagttacaactaacgtatgcgccaggggtatcgacgtggagcaagtgtcggtagttatcaactttgaccttccggtggacaaggatgggaatcccgacaacgaaacatacttgcatcggattgggagaaccggcagattcggcaagagggggctcgctgtgaatatggtggacagtaagcactccatgaacattctaaacaggatccaggaacacttcaacaagaagatcgaacgcctggatactgacgacctcgatgaaattgagaaaatcgcaaactag

SEQ ID NO: 27801 - DNA, 1437 bp, synthetic construct
  source 1..1437: mol_type = other DNA; note = Synthetic coding sequence
atggccaccgactcttgggctctggctgtggacgagcaggaagcggcagttaagagtatgaccaatctgcagatcaaagaggagaaggtgaaggcagacaccaacggcatcattaaaacatccacaacagccgagaaaaccgacgaggaggagaaggaagatcgggctgctcagtccctgctaaacaagctgatccgcagcaacctcgtggacaatactaaccaagtggaagttctgcagcgcgaccccaacagtccactttattccgtcaagtcctttgaggagttgcgtttgaaacctcagttactgcagggagtttatgctatgggctttaacagacccagcaagatccaggagaatgctttacctatgatgctggccgaaccaccccaaaacctcattgcccaaagccagtccggtacgggtaagaccgctgcctttgtcctggctatgttaagccgggtcgaaccctctgacaggtatcctcagtgcttgtgtttgtcccccacctacgagctggcattacaaaccgggaaagtgatcgaacagatgggcaaattctatccagagctgaaattggcctatgcagtaaggggcaacaaattagagcgtggccagaaaattagtgagcagattgtcatcgggaccccgggaactgtgctggactggtgttccaagttgaagtttattgatcccaaaaagataaaagtctttgtgctagacgaggctgatgtgatgatagccacccagggccatcaggatcagtcaatccgaatccagcggatgctcccaagaaattgccagatgctgcttttcagtgctaccttcgaagattcagtctggaaatttgcccagaaggtggtgccagatccgaacgtcattaagctcaagcgggaggaagagaccctggacacgattaagcagtactacgtgctctgttcaagcagagacgaaaagttccaggctctgtgcaatctgtacggcgctattaccatagctcaagctatgattttctgccacacacggaagactgcatcatggcttgccgcagagctgtctaaggaagggcaccaggtagccctcctgtcaggagagatgatggtggagcagagggctgccgtgattgaaaggtttagagaaggtaaggagaaggtccttgtaacaaccaatgtatgtgcacgtggaatcgatgtggagcaggtatcagttgtgattaacttcgacctgcctgtcgataaagatggaaatcccgacaatgagacctacctgcatagaattggtcgaacaggacggttcggcaaacgcggactggccgtgaatatggtggatagtaaacattctatgaatatcctgaaccgcatccaggagcactttaataaaaagattgagcgcctggacaccgacgacttggacgaaatcgaaaaaatcgcaaattag

SEQ ID NO: 27802 - DNA, 2238 bp, synthetic construct
  source 1..2238: mol_type = other DNA; note = Synthetic coding sequence
atggtggggccagggccaacagccgctgccgctgtcgaagaacgacagagaaagctccaggaatacctggcagctaaaggcaagctgaagtctcagaacacgaagccttatttaaagagcaagaacaactgtcagaaccagcctcctagcaagtcaaccatacgcccaaagaacgatgtcacgaaccacgtcgtactcccggtcaaaccgaagagaagtatcagtattaagctgcagccgcgacctcctaacaccgccggttcacaaaagccaaagttggagcctccgaagctgttaggcaaacgactgacctcagagtgtgtttcctcaaacccttattcaaagccatctagcaaatctttccagcaatgtgaggcaggaagttctacgacgggggagctttctaggaaacctgtggggtcccttaacatcgagcaattaaagacaaccaaacagcagctcacggatcagggcaacggcaaatgtatagattttatgaataacattcacgtggagaacgaatccctggataacttcttgaaggagacgaacaaggagaatctcctggatatcctcacggagccagaacggaaaccagacccgaagctttacacaaggtccaagccaaagacggacagctacaatcagacaaaaaatagccttgttccaaaacaggcattagggaagtcgtccgtgaactcagctgtgcttaaggatagagtgaacaaacaatttgtcggagaaacacagtcacggaccttccccgtcaaaagccagcaactgagccgcggagcggatctggcgagacctggagtaaaaccctcccgaaccgtgccgagccattttatcaggactctatcaaaggttcaatcgagtaagaagcccgtcgtaaaaaacataaaagatattaaagtaaaccgaagtcagtacgagaggcccaacgaaaccaagattaggagttatcccgttacagaacagagagtgaaacatactaagcccagaacatacccttctttgctacaaggggagtacaataaccggcatcctaatataaagcaggaccaaaaatccagccaagtgtgcatcccccaaacttcctgcgtgttgcagaaatcaaaggccatcagccagagaccaaacctgacagttggcagattcaacagcgccatcccctcaacgccatccatccgtcccaacggcacctctgggaacaaacacaataacaatggatttcaacagaaggctcaaactctcgactccaaactgaaaaaggccgtgccccagaaccacttcctgaacaagaccgcccctaagacacaggctgacgtgaccactgtaaatggcacacagactaaccctaatatcaagaaaaaagcaacggcagaggatagacgcaaacagctagaggaatggcaaaaaagtaagggtaaaacgtataagaggcctcccatggagcttaagacaaaacgaaaggtgattaaggagatgaacatctctttctggaagtctatagagaaagaggaagaggagaagaaggcacagcttgagctgtccagcaaaattaacaacactctgacagagtgcctgaacctgatagaagggggagtcccatcgaatgagatcttaaacattttgtcgagcatccctgaggccgaaaagtttgctaagttttggatctgcaaagctaaactgctggcgagcaaggggacattcgatgtaatcgggctgtacgaagaggctattaaaaatggcgcaactccgattcaagaattacggaaggttgtgctcaacattctccaggactcaaatcgcaccacggagggaattacctcagacagtctggtcgccgaaactagcattactagtgtagaggagctggcgaaaaagatggagtccgttaaaagctgcctctcgccaaaagaacgggaacaggtgacggctacccctagaattgcaaaagctgaacaacacaactacccaggcatcaagctccagattggaccgattcctcggataaacggcatgccagaagtgcaggacatgaaatttataacccccgtcagaaggtccagtaggatagaaagggcagtcagccgatatcctgagatgcttcaggagcacgatctagtagtggcctctttggatgaacttctagaggtggaggagactaagtgtttcatctttaggcggaacgaggctctgccagtgacactggggtttcagaccccagaatcttag

SEQ ID NO: 27803 - DNA, 378 bp, synthetic construct
  source 1..378: mol_type = other DNA; note = Synthetic coding sequence
atgtcttcaaccctgggaaaactcagcaaccaggtggaggagaccctgcctttgctgaagaaagttcctgccaattacttccatatctgctccgccatcctcatgggattcagcctgagtaaatcagcaacgcaagtgtcagcgattcatatggacagcaaagtagacgaccaccttattagaggaacagagaaatccagacttgagccagccactcaactctttcagaacacgaagaagattcggttagaggataccaaccaggagaactttacaagaattgaaggcaccggaaccggcagcctctccggtaaggcgttgggaagcgtggtttacgtaaaagagagcgacggactcgagatgaccgatgtggagtag

SEQ ID NO: 27804 - DNA, 4284 bp, synthetic construct
  source 1..4284: mol_type = other DNA; note = Synthetic coding sequence
atgtcgatgcttaaaccctcaggcctcaaggcacctaccaagattctgaaacctgggagcacagccctgaaaacccccacagccgtcgtggcacctgtggagaaaaccatctcttctgagaaggcatctagtacaccttccagcgaaacccaagaggagttcgtcgatgatttccgggttggggaacgagtgtgggtcaatggaaataaaccaggcttcattcagttcctcggtgaaacacagtttgccccaggccagtgggcgggtattgtcttggatgaacccataggaaaaaatgatgggtcagtggccggtgtccggtactttcaatgtgaacctctcaagggcattttcacaagaccatcaaaactcactaggaaagtccaggccgaagatgaggccaatggactgcagacgactccggctagccgggcaacttcccctctgtgcacctcgaccgctagcatggtatcatcttctcccagtacacctagcaatattccccaaaaaccatcccagccagccgctaaagaaccctctgccacacctcctatatctaatctcaccaagaccgcatccgaaagcatcagtaatctgtcggaggcaggcagcataaagaaaggcgaacgggagctgaagataggggatcgcgtcctcgtcggaggtactaaggccggtgtcgtgagatttttaggggagaccgactttgcgaagggggagtggtgtggagtagaactggacgagcccctgggaaaaaacgacggcgcagtcgctgggactagatactttcagtgccaaccaaaatatggcctgttcgcccctgtgcacaaggtaacgaaaataggattccccagcactactccagctaaagccaaagctaatgccgtgaggagagtgatggcgaccacatccgccagtctgaaaaggagcccgagcgcttcctccctaagctccatgtcctctgttgcatcctcagtctccagtcgaccctctagaacagggttgcttacggagacctcaagccggtatgcgagaaaaatttctggaacaacagccctccaggaggcactgaaagagaagcaacagcatattgagcaactgttggccgaacgggacctcgagcgtgctgaggtagcgaaggcaacatctcatgtcggtgagatagagcaggagctcgccttggcacgcgacggtcatgatcagcatgtgttagaactggaggctaaaatggaccagctgcgcacaatggttgaagctgctgatcgggagaaggtcgagttactgaatcagttggaagaagaaaagaggaaagtcgaggacctacaatttagagttgaggaggaatccatcaccaagggcgatctggaaactcaaacgaaactagaacatgcccgtataaaagagctggagcagagcctgctgtttgaaaaaacaaaggccgataagctccagagagaactcgaggacacgagggtggcgacggtatctgagaagtcgagaattatggaactagaaaaggacctagcactaagggtgcaggaagtggcggagctccgacgaaggctagaaagcaacaagcctgccggagacgtggacatgtccctgtcactccttcaggaaattagctcactgcaggagaaactggaggttacaaggacagaccaccagcgcgaaataacctctctcaaagagcacttcggcgcacgggaggagacgcaccagaaggagattaaagcactttatacggccacagagaagttatccaaggaaaatgaaagtctcaagtctaagttggaacatgctaataaggaaaatagcgacgttatcgcgctgtggaagtctaagctagagactgcaatcgcatcacaccagcaggctatggaggagcttaaagtctctttctccaaaggcctgggtactgaaactgccgagtttgccgaactcaaaactcaaatcgagaaaatgcgattggactatcagcacgaaatcgagaatctgcagaaccagcaagactccgagagagccgctcacgctaaagaaatggaagctctcagagctaaacttatgaaggtaatcaaggagaaggaaaattctctggaagctatccggagtaagctcgacaaagccgaagaccaacatctggtggaaatggaggacacgctcaacaaactccaggaggcagagattaaagtaaaagaactggaggtattacaggctaagtgcaatgagcaaacaaaagttatcgacaattttacctctcagctaaaggccactgaggaaaagcttctggatttggacgcactacgaaaagcctcctccgagggaaagtcggagatgaaaaagttgcggcaacagctggaagctgccgaaaagcagattaagcatctggagatcgagaagaacgcagaaagcagtaaggcctcaagcataaccagggagctccaggggagggagttgaaactcaccaatttacaggaaaatctctctgaggtgtcgcaggtgaaggagaccctggagaaggagctacagattctgaaggagaaatttgccgaagcctctgaagaagccgtgagtgtccagcgctccatgcaggaaaccgtcaacaagttgcaccaaaaagaagagcagttcaacatgttatcctccgacctggaaaaactgagagaaaatctagcagacatggaagctaaattccgcgagaaagatgagagagaggagcagcttataaaagccaaagagaagctcgagaacgacatcgcggagattatgaagatgtccggcgacaacagttcacaactcaccaagatgaatgacgagctccgactgaaggagcgggatgtggaggagctccaactgaagctcaccaaagccaatgaaaacgcctcattcctccaaaagtctatcgaagacatgactgtgaaagccgaacaatcacagcaggaagccgcaaagaagcacgaggaggagaagaaggagttggagcgtaagctgtccgacttagagaaaaagatggagacttcacacaatcaatgccaggagctgaaggccagatatgagcgagccacctcggagactaaaactaaacacgaggagattctccagaacttgcagaagactctgctggacactgaggacaaattaaaaggcgcacgcgaagaaaactccggtctgttgcaggaactggaggaacttcgcaaacaggctgataaggctaaggcagctcagacggccgaggatgccatgcagattatggaacagatgacaaaggaaaagactgaaaccctggcgtctctggaagataccaagcagaccaatgccaagctgcaaaatgaattggacaccctcaaggagaacaaccttaagaatgtggaggagctcaacaaaagtaaagaactgctgactgtagagaatcaaaaaatggaggagtttcgcaaggaaattgagacccttaagcaggccgctgctcagaagtcacagcagttgtctgccctgcaagaggaaaatgttaaattggccgaagaactcggtcgctctagggacgaggtgacatcacatcaaaagctcgaggaggagcgctcggtcttgaataaccaactactggagatgaaaaagagggagtccaaatttattaaggatgcggacgaggaaaaggcttccctgcagaaaagtatttccatcacttccgctttacttaccgaaaaggacgccgagctggagaaactcaggaacgaagtgaccgttctgcgcggtgagaacgcatccgctaaatctctacactccgtggtgcagacgctcgaatccgacaaagtcaagctggaactgaaggtgaaaaacctagaactacaactgaaggagaacaaaagacagctgagtagctccagcggaaatacagatacacaggccgatgaagacgagcgggctcaggaaagccagatagacttcctcaattcagttatcgtggatctccaacgcaaaaatcaggatttaaagatgaaggtagaaatgatgtccgaagcagccttgaatggtaatggtgatgacttgaacaactacgacagcgacgatcaggaaaagcagagcaagaagaagcctaggctgttctgtgacatctgcgattgtttcgatcttcatgatactgaagattgccccacacaggcacagatgagcgaggatccacctcattctacacaccacgggtctcggggagaggagcgcccttattgcgagatatgtgaaatgttcggtcactgggcgactaattgcaacgatgatgagactttttag

SEQ ID NO: 27805 - DNA, 975 bp, synthetic construct
  source 1..975: mol_type = other DNA; note = Synthetic coding sequence
atggcctcttccaacaccgtgcttatgcgcctggtggcgagcgcctattccatcgcccagaaggccggaatgattgtgaggagagtaattgcggaaggagacctaggaattgtggaaaaaacatgtgccacagacctgcagacaaaggcggacagattggctcagatgagcatatgctcatcacttgcgaggaagttccctaagctcacgattattggagaggaggatcttccgtctgaggaggtggatcaggagcttatcgaggactctcagtgggaggagatcctcaaacaaccgtgtccctcccaatacagcgccattaaagaggaagaccttgtcgtatgggtcgatcctctcgatggcactaaagagtacaccgaagggctgctggataacgttacagtattgataggcatagcctatgagggcaaggcaatcgctggagtgatcaaccagccatactacaactacgaagcagggccagacgcggtgctcgggcgaactatttggggggtgttaggcctaggagcatttggctttcaactgaaggaagtccccgcaggcaagcatatcattactactacaaggtcccatagcaacaagctcgtgaccgattgcgttgcagcaatgaaccccgatgctgttctaagggtaggaggggcaggtaataagattatccagctcatcgaaggcaaagcatctgcatacgtgttcgccagccctgggtgcaagaagtgggacacatgcgcacccgaggtcatcctacacgctgtcggtgggaaactcacagacattcatgggaacgtgctgcaataccacaagggtgtctctcatcggacatggcccaagcccgactttttccgtgcgcagttcttcctggaatctcattcttgcttcagtaacttcaaaaacgtgtccacaccaattaagaatatttacgatgttattatctatgcctacgagactgatttatag

SEQ ID NO: 27806 - DNA, 270 bp, synthetic construct
  source 1..270: mol_type = other DNA; note = Synthetic coding sequence
atgggaacgaagagagaagctatcttaaaggtgctcgaaaacttgacacctgaggagctgaaaaaatttaaaatgaagctgggcacagtgcctttgcgtgagggttttgagcgaatcccgaggggagctctgggccagctggatattgtcgaccttacagataagcttgtggctagttactacgaggactacgcagccgagcttgtagtcgcagtgctcagggacatgcgaatgctagaggaggccgcaaggctgcagagggccgcatag

SEQ ID NO: 27807 - DNA, 867 bp, synthetic construct
  source 1..867: mol_type = other DNA; note = Synthetic coding sequence
atgactgtggggaaatcttccaaaatgctccaacatattgactatagaatgcgatgcatcctgcaggacgggaggatttttataggaacatttaaggctttcgataagcatatgaatctcatcttgtgcgattgcgacgaattcagaaaaatcaaacctaaaaatagcaagcaggctgaaagagaagagaagcgcgtcctgggattagtcctgcttcgcggtgaaaacttggtgtccatgaccgtggaaggcccaccccctaaagataccggtatagccagggtgcccttggcaggtgctgcaggtgggcctggcatagggagagcggcaggacgcggaatcccagcaggcgtgccaatgccacaggcccctgccggactcgccggtcccgtccgcggtgtcggcggaccctcccaacaagtcatgacaccccaaggcagagggacagttgcagctgccgcagctgccgctacggctagcatcgctggtgcccctacgcagtatccccctggccgaggaggacccccacctcctatggggaggggcgcacctcctcccggtatgatgggtccaccccctggaatgcgccctcccatgggccctcccatgggcatccccccaggccgaggtactcccatgggcatgccacccccagggatgagacccccacctccgggatgcgaagctttctttgacccttggccccaatccatggaagttgctcctcaacgacggggattggatagctctgggcctcggtaccacaggcccgtttgtttcctatgctgttgtagttggtccctcatggggctgtcgggtttcctaactggaccaccaccccctggaatgagaccgccacggccatag

SEQ ID NO: 27808 - DNA, 3300 bp, synthetic construct
  source 1..3300: mol_type = other DNA; note = Synthetic coding sequence
atgcacataaagtcgatcatcctggagggcttcaaatcctatgcgcagaggactgaagttaatgggttcgacccactcttcaacgctataacaggcctaaatggctccgggaaatccaatatactggactccatctgtttcttgctgggcatttcaaatttatcacaagttcgggctagcaacctgcaggatctggtgtacaagaatggacaggcaggcataaccaaagcttctgtgtcaattacattcgacaacagtgataagaagcagtcaccactgggcttcgaggtccatgacgagattacagttacaaggcaggtggtgatcggaggaaggaacaaatacctgattaatggcgtgaatgcgaacaacacgcgggtgcaggacttattctgcagcgtgggtcttaatgtcaacaacccccactttttgatcatgcagggcaggatcaccaaagtactgaatatgaaacctccagagatcctgtcaatgattgaggaagcagctggaacccgtatgtatgagtacaagaaaatcgctgcgcagaaaaccattgaaaagaaggaggccaagctcaaggagattaagacaattctggaagaggagataactccaacaatccagaaactgaaagaagagcgctccagttatctagagtaccaaaaggtaatgcgggagatcgagcatctatctaggttatatatcgcctatcagtttctactagcagaggacacaaaggtacggtccgcggaagagctcaaggagatgcaggacaaagtcattaagctacaggaggagctgtccgaaaacgataaaaagatcaaagctttaaaccatgaaatagaggagctagagaaacgcaaagataaagagactggaggaatcctgaggagtctggaggatgcgctcgccgaagcccagcgagtaaataccaagtcccagtcagcatttgaccttaaaaaaaagaatctggcttgcgaggaatcgaagcggaaagaactggagaagaacatggttgaggattctaagaccttggccgcaaaggagaaagaggttaagaagataactgatggtttacacgccctccaggaggcctcaaataaggatgcggaagccctggctgcggctcagcagcattttaatgccgtgagcgctgggctgtccagtaatgaagacggcgcagaggcaactcttgccggtcagatgatggcctgtaagaatgatatctcaaaggcgcagacagaggctaaacaggcacagatgaaactcaaacacgcccagcaggagttgaagaacaagcaggccgaggttaagaagatggatagcggctacagaaaggatcaggaagcattagaggcagttaagcgattgaaggaaaaactggaggctgagatgaaaaaactgaattatgaagaaaataaggaagagtctttactggagaaaagaagacaactttcgcgcgacataggtaggctgaaggaaacgtacgaagctctcttagcacgattccccaaccttcgatttgcgtacaaggaccccgaaaaaaactggaataggaactgcgtgaagggcttagtggcgtcattaatcagtgttaaagacacatctgctaccaccgcgcttgagttggtggccggagaacgcctgtacaacgtagtggtggatacagaagtgactggtaaaaagctgctcgagcgaggcgagctcaagcgcagatataccatcattcccctgaataaaatctctgccaggtgcattgccccagagaccttacgcgttgctcagaatctggtgggtcccgataacgtccatgtagccctatccctggttgaatacaaacccgagttacagaaggccatggaattcgtgtttggcacaaccttcgtttgtgacaacatggacaacgcaaagaaggtggccttcgacaaaaggataatgacaagaacagtaacattaggcggagacgtgtttgatccccatggcaccctgtctgggggagctaggagccaggcggcatcaattctgacaaagtttcaggaattaaaagacgtccaagacgaactacggattaaggagaacgaattaagggcattagaggaagagctcgcaggcttgaagaataccgctgaaaagtatagacagctcaaacagcagtgggaaatgaaaactgaggaagccgacctccttcagacgaaattacagcagtcttcctaccacaagcagcaagaggaactcgacgccctgaagaagaccattgaggagagcgaggaaacattgaaaaataccaaggagatccagagaaaggcagaagaaaagtatgaagtgctggagaacaaaatgaaaaacgccgaagcggagagagaacgcgaactgaaggatgcccaaaaaaagctcgattgtgctaagactaaggccgacgcaagttctaaaaagatgaaagagaagcagcaggaggtggaagctatcacccttgagcttgaagagctgaagcgagagcacaccagttacaagcagcagcttgaagccgttaatgaagccattaagtcctacgagtcccagatcgaagttatggccgcagaagtagccaagaacaaagagtcagtgaacaaggcacaggaggaggtgaccaagcagaaagaggtgattactgcgcaggacactgtgattaaggccaagtacgcagaggtggccaaacataaagagcaaaacaatgactcccaattgaagatcaaggagcttgaccataacatttcaaagcataaaagagaggcagaagatggggctgccaaagtttctaaaatgcttaaggactatgactggattaatgctgaaaggcacctgtttggacagcctaacagcgcatacgattttaagacaaataacccaaaagaggcgggacaacgcctccagaaactgcaggagatgaaagaaaagctgggtcgaaatgtgaatatgcgagcgatgaacgttctgacggaggctgaggagcgctataacgacctgatgaaaaagaagcggattgtcgaaaacgacaagtccaagatcctaactaccatcgaggacctggaccaaaagaagaaccaggccctgaacattgcttggcagaaggtcaataaagatttcggctcgattttctccacactgctacctggcgctaatgcgatgctagcccctcctgaaggccaaacagttcttgacggattagagtttaaggtggccctcggtaacacttggaaagagaatctgaccgagctgagcggaggccagagacagaagcagcagaaccatacaacaggctag

SEQ ID NO: 27809 - DNA, 381 bp, synthetic construct
  source 1..381: mol_type = other DNA; note = Synthetic coding sequence
atgttccagaaagacgaatattgcatcctcatcttaggccttgataatgctggtaaaactacatttttagagcagtcgaaaaccaggtttaataagaactataagggtatgtcactaagtaagattacaacaacagtgggtctgaacatcgggacagtcgatgtgggtaaagccagactcatgttttgggacctggggggtcaggaagagctacagtccctgtgggacaaggacaaaacaaaatgtggggatctcggcacactgcattcttccaaggtcagcgcgtccttcagattgcgggatctcgctgctgaccatcatcggactcaaaagtggcaacgtcccgacgtggggacagcaggctggctgcccctcccatag

SEQ ID NO: 27810 - DNA, 1119 bp, synthetic construct
  source 1..1119: mol_type = other DNA; note = Synthetic coding sequence
atgactttccaatttaacttcacgattgaagaccatctggaaaacgagcttacaccaataagagatggtgctctgactttggacagtagtaaggagctctcagtgtccgaatcccagaagggagaggagcgtgataggaagtgcagcgctgagcaattcgacctcccccaggaccacttgtgggagcataagtccatggaaaacgctgccccatcgcaggacaccgactctcctctgagcgcagcttcctcatctagaaacctagagccccacggaaaacaaccatccctgcgggcagccaaggagcacgccatgcctaaggacttgaagaagatgcttgaaaataaagtgattgagacgctccccggtttccagcatgtgaagttgtccgtcgtaaaaaccattttattgaaggagaacttccctggagagaacattgtgagcaagtccttttcctcacacagcgaccttattacaggagtctatgagggcggactgaagatctgggaatgtaccttcgacctgctcgcatacttcacaaaggcgaaggtcaagttcgccggtaagaaggtgctcgatctcggatgtggatccgggttgctcgggatcacagcttttaagggcggaagcaaggagattcactttcaagattacaacagtatggttattgacgaggtcacactgccaaacgttgtggccaatagcacactcgaggacgaagagaacgacgtgaacgaaccggatgttaagcgctgccgcaagcctaaagtcacgcagctgtacaaatgtcgttttttctctggagaatggtcggagttctgcaagctggtcttgtcttcggaaaagcttttcgttaagtatgacctcatactaaccagcgagacgatttacaatcctgactattactctaacctgcatcagaccttcctaaggctgcttagcaaaaacggacgggttctactcgcctcaaaggcccactacttcggggtgggcggaggcgtccacctgttccaaaaatttgtggaagagagagatgttttcaagacaagaattttaaagatcatcgacgaggggctaaaacgattcataattgagatcaccttcaaatttccaggctag

SEQ ID NO: 27811 - DNA, 1635 bp, synthetic construct
  source 1..1635: mol_type = other DNA; note = Synthetic coding sequence
atgaagtgccattacgaagcgttaggagtcaggcgggatgctagcgaagaggagttaaagaaggcataccggaagctggccttgaaatggcacccggacaagaatctcgataacgcagcagaagcggctgagcagtttaaactgatacaggcagcctacgatgtactatccgacccccaagagagggcctggtatgataaccacagggaggccttgctcaaaggcggatttgatggagagtaccaggatgacagtctggacctgctgagatatttcactgtgacctgttattctggttacggtgatgatgaaaaaggcttctataccgtgtatcgcaatgtattcgaaatgatcgccaaagaagaacttgaaagcgtcttggaggaggaagtcgatgattttccaacatttggcgatagccagagtgattatgatactgtggtgcaccctttttacgcctactggcagagtttctgcactcagaagaattttgcctggaaagaggaatatgacacgaggcaggccagcaaccgatgggaaaaacgggctatggaaaaggaaaataagaagatccgggataaggcaaggaaggaaaaaaatgagctggtgagacagctggtggcctttatacgaaagcgcgacaagagggtccaggcccaccgcaaactcgtggaagaacaaaatgctgaaaaggctcggaaagccgaagaaatgcgcagacagcagaagttaaagcaggctaagctggtggagcagtacagagagcagagttggatgactatggccaaccttgaaaaagaactgcaggaaatggaagcaagatacgagaaggagttcggggatgggtccgacgagaatgaaatggaggaacatgagttaaaggacgaggaggacggcaaagatagcgatgaggctgaggacgccgagctctacgatgatctgtactgccccgcatgtgacaagtcattcaaaaccgaaaaggcaatgaaaaatcacgagaaatccaaaaagcaccgggaaatggtggccctgctcaaacagcagctggaagaggaagaggagaacttcagtcgccctcagatcgatgaaaatccgttggacgacaattctgaagaggaaatggaggacgctcccaagcagaaggtgaaatatctaacctttcgattcatcttcgctcttcgactttccaaaaagcaaaagaagaaaaaacagaagccagcacagaactacgacgacaactttaacgtcaacggcccaggcgaaggtgtgaaagtagacccagaggatacaaatctgaatcaggactcagcaaaagagcttgaggatagcccgcaggagaacgtctcagtgacggagatcatcaaaccctgtgatgacccgaagtccgaggcaaaatctgtgccaaagccaaaaggaaagaaaactaaagatatgaaaaagccagtgcgcgttccagcagagccccagacaatgtctgttttgatcagttgtactacttgtcattccgagttcccatcccgaaataagttgtttgatcatctgaaagccacaggccacgctagggctcctagtagcagttcattaaacagcgcaacgagctcacagtcgaagaaagagaagagaaagaaccgttag

SEQ ID NO: 27812 - DNA, 945 bp, synthetic construct
  source 1..945: mol_type = other DNA; note = Synthetic coding sequence
atgcccggattcacttgctgtgttcccggatgttacaataatagccacagagataaagccctgcacttttatacctttcccaaggatgctgaactccggaggttgtggctgaagaacgttagccgcgcaggagtatcgggctgcttctcgacgttccagcccacaaccgggcatagactgtgtagcgtgcactttcagggcggacggaagacgtacaccgtgcgcgttcctaccattttccccctgcggggagttaacgaacgaaaggttgccagaaggccagcgggtgccgctgccgcacggaggcgccagcagcagcaacagcagcagcagcagcagcagcaacaacaacagcagcagcaacagcagcagcagcagcagcagcagcagcagcagtccagtccatcagcttctacggcccagactgctcaactgcagccgaacctcgtttctgcgtcagccgctgtcctgctcactctgcaggccactgtagactccagtcaggccccagggtctgttcagcctgccccaatcactccaaccggagaggacgtgaagcctatagaccttactgtacaggtggagtttgcagctgcagaaggcgctgcagcggcagccgcagctagcgagttgcaagccgctacagccggactcgaggctgccgagtgccctatgggcccacaactggtcgtcgtgggtgaggaaggattccctgacaccgggagtgatcattcttactcgctgagtagcggaactactgaagaggaactgctgcgcaagcttaacgaacagcgcgacatactggccctcatggaggttaagatgaaagagatgaagggaagcatcagacacctgcggctgactgaggcaaagctcagggaagagttgcgcgagaaggaccgactgctcgcaatggctgtgattcgaaaaaagcacggcatgtag

SEQ ID NO: 27813 - DNA, 645 bp, synthetic construct
  source 1..645: mol_type = other DNA; note = Synthetic coding sequence
atggctggcgagaactttgccacaccatttcacgggcatgtgggccgaggggcattcagcgacgtctacgagccggcagaggacacctttctgctactcaatgctctggaagccgctgcggcagagttggcaggcgtggagatttgcctagaggtgggcagtggtagtggcgtggtctctgctttcctggcatcaatgatcggtccgcaagcactgtatatgtgcacggacatcaacccggaggcagcagcctgtaccctcgaaactgctaggtgcaacaaggtacatatccagccagtgatcacggatttagtgaaaggacttctccccagactgacagagaaagtcgacctgctggtattcaacccgccttatgtcgttactccccctcaagaggtaggttcccacggcatcgaagcggcatgggctgggggaaagaacggacgagaggtcatggacaggtttttccccctggtgccggatctcctgagcccgaagggtcttttttacctggtgaccatcaaggagaataatccagaggagatcctgaagatcatgaaaaccaagggtttacaaggcactaccgcactttctcggcaggcaggccaggaaactctaagcgtcctgaaattcacaaagtcctag

SEQ ID NO: 27814 - DNA, 1536 bp, synthetic construct
  source 1..1536: mol_type = other DNA; note = Synthetic coding sequence
atgagtgggggattcgaactgcagcccagagatggcggaccaagggtggcacttgctccaggcgagacggtgattggcaggggtcctctgttgggaattacagacaaacgggtaagccgcagacacgccatactcgaggtggcagggggacaactaagaatcaagcccatccatacaaatccttgcttttatcagtcctccgagaagtcccagctgctgccccttaagcccaacctgtggtgctaccttaatcctggagattccttttctctgctggtggataagtatatattccggatactttcaattccatccgaagtggagatgcagtgcaccctacggaatagtcaggtgcttgatgaggacaacattctgaatgagaccccaaagtctcctgtgatcaacctaccacacgaaactaccggggcttcgcagcttgaaggcagcaccgagatagccaagacccagatgacccccaccaactctgtctccttcctgggggagaacagagattgtaacaagcagcaacccattctcgcggagagaaaaagaatcctccccacctggatgctggccgaacacctttcagaccaaaatctgtccgtgccggctatcagtggtggaaacgtgatacagggatctgggaaagaggagatatgcaaggacaaatcccaactgaatacaactcagcaagggcgtagacagctgatatcaagtggctcgagtgagaatacgtccgctgagcaagacacgggcgaggagtgtaagaacactgaccaagaagaatccacgattagcagcaaggagatgccccagtcctttagcgccatcactctgtccaacaccgagatgaataacatcaagactaatgctcagagaaataaactgcctatcgaagagctggggaaagtgtctaagcacaagattgctactaagcgaactcctcacaaagaagatgaggccatgtcatgcagcgagaactgttccagcgcacaaggcgactccctgcaggacgaatcccagggatctcactctgaaagtagctcaaaccccagtaatcccgaaactcttcacgcgaaagctaccgatagcgttcttcagggctctgaagggaacaaagtcaagcgcacgagctgcatgtacggggcaaactgctacaggaagaatcccgtgcattttcagcacttcagccaccccggtgacagcgattatggtggagtgcagatcgtcggtcaagacgagacagacgacaggcccgagtgcccgtacgggcctagctgttataggaagaacccacagcataaaatcgaataccgacataatacactgcctgtgaggaatgtgctggacgaggataacgacaacgtcgggcagcctaacgaatatgacctgaatgactccttcttggacgatgaagaggaagattacgaacccacggacgaggatagcgattgggaacccggtaaggaagatgaagagaaggaggatgtggaagagctgcttaaagaagccaaacgattcatgaaacggaagtag

SEQ ID NO: 27815 - DNA, 984 bp, synthetic construct
  source 1..984: mol_type = other DNA; note = Synthetic coding sequence
atggccgctgctgcggctgccgctgcggcaacaaatggcaccggaggcagttcaggcatggaggtagacgccgcagtagtgccaagtgtgatggcctgcggggtgacggggtcagtaagcgtagcgctgcatccactggtgattttgaatatatctgatcactggatcaggatgagatcccaggaaggacgcccagtgcaggtgattggcgctttgattggtaaacaagagggcaggaacatcgaagtcatgaattcatttgagctgctctcacacaccgtggaggaaaagattatcatagacaaggagtactattacacaaaagaagaacagtttaagcaggtctttaaggagctggaatttttaggatggtatacaacaggaggccctcctgatccctcagacattcacgtgcataagcaagtttgtgaaatcattgaaagtcctctgttcctcaaacttaaccccatgactaaacacaccgacctgcccgtgtctgtctttgagtcagtgatcgacataatcaacggggaagccacaatgctatttgccgagctgacctacaccctggccaccgaggaagccgaaaggataggtgtggatcacgtagcccgtatgacagccaccgggtccggagaaaacagcacagtcgctgagcacctgattgcccagcattccgctataaagatgttacacagccgcgtgaaattgatcttggaatatgtgaaagcctccgaagccggtgaggtgccgtttaatcatgagattctgagagaggcatacgcgctctgtcattgcttgcccgtgttatctaccgacaagtttaagacagatttctatgaccaatgtaatgacgtgggactgatggcctatctcgggacgattacgaagacttgcaacaccatgaaccagtttgtgaataaattcaacgtcctgtacgatcgtcaggggattgggagaaggatgcggggtctttttttttag

SEQ ID NO: 27816 - DNA, 2574 bp, synthetic construct
  source 1..2574: mol_type = other DNA; note = Synthetic coding sequence
atgaattaccaacagcagctcgccaatagcgcggcaattcgtgcagagatccagcgcttcgaatccgtgcaccccaacatatacagcatctatgaattactggaacgagtggaggagccagtgctgcaaaatcagattcgagaacacgtaatcgctattgaagacgcctttgttaatagccaggagtggactctctctcggtctgttcccgaactaaaggttgggatcgtgggtaacctggcctcgggcaaaagcgccctggtccacagatatctcaccggtacctatgtccaggaagaaagccctgaaggcggtagatttaagaaagagatcgtagtcgatggtcagagttacctcctgttgattcgggacgaaggtggcccacccgaggctcaattcgctatgtgggtagacgcagtaatcttcgtgttttcgcttgaggacgagatctcattccaaactgtgtatcactactactcaaggatggccaattatagaaacaccagcgaaatcccactggtactggtgggtacacaggacgctattagtagcgccaatccgagggtcatcgatgacgctcgagctcgaaaacttagcaatgatctgaagcgctgtacttattatgagacctgtgccacgtatggacttaatgttgagagggtgtttcaggacgttgcccagaaaatcgttgctactagaaagaagcaacaactgagcatcggcccttgcaagtccctgccgaactctccctcacacagtagcgtttgttctgcgcaggtatcagccgtgcacatcagccagacctccaatggcggaggaagcctgtcagactactcttcaagcgtgccctctacacccagcacctcccagaaggagcttcggattgacgttccgccaaccgcaaatacgcccacgccggtgcggaagcagtccaagagaaggagtaacctcttcacatcaagaaagggatcagacccagataaggaaaagaaaggcttggagtctcgcgctgattccataggatctgggcgtgctattcctattaagcaaggcatgttgttgaagagaagtggaaagagtctgaataaagaatggaagaagaagtacgtcacactctgcgacaacggtgtgctgacctaccacccaagcctgcacgactatatgcaaaatgttcacggaaaggagatcgatctgctgaggactacagtaaaggtccctggcaagaggcctcccagagcgacatccgcctgtgcacccatcagcagcccaaagacgaatggactctccaaggacatgtcctctcttcacatctcacccaattccggaaacgtgactagcgcttctggctcacagatggccagcggcatttcccttgtgtcattcaattcgagaccagatgggatgcaccagaggagttactccgtcagttccgcagaccagtggtctgaggctacagtgattgcaaatagtgcaattagcagcgacaccgggttgggcgatagcgtgtgctcctccccctcaatctcctccacaactagccccaaactcgacccacctcctagcccgcacgcaaacagaaaaaaacatcgcagaaaaaaatccacgagcaacttcaaggcagacggcctgtctggcaccgccgaggaacaagaagaaaattttgaattcataattgtgtcgctcacgggacagacctggcattttgaagccactacatatgaagagcgcgatgcatgggtgcaggcaattgagagccaaatattggcatccttacaatcatgcgaatccagtaaaaataaatcccggcttactagccaatccgaggctatggcgctccaaagcattaggaatatgagaggcaactcccattgcgtggactgtgagacccaaaatcccaactgggcgtcactcaacctgggagccctgatgtgcatcgagtgttccggcatccacaggaatctcggcacccatctcagtagagtgcggtctttagatctggacgattggcccgtggagcttattaaggttatgagctctatagggaatgaactggccaacagcgtgtgggaagagagttcccagggacggactaaaccaagtgtggactcaacaagggaggagaaagaacggtggatccgggctaagtacgagcaaaaactgttcttggctccactaccatgtaccgaactctcactcgggcagcatctcctccgagccacagcagacgaagacttacgaactgcaatcttactgctggcacacggtagcagggacgaagtgaacgagacttgtggggagggcgacggacgtactgcgctacacttggcatgcaggaagggcaatgtggtgttagcccagctgctcatatggtatggggttgacgtgaccgcccgagacgcccacggtaatacagccttggcctatgctcggcaggcgtcatctcaggaatgcatcgacgtattactgcagtacggctgtcccgatgagcggttcgttcttatggctacgcccaatctctcccggagaaacaataataggaacaattcatcaggccgagtgccaacaatcatctag

SEQ ID NO: 27817 - DNA, 1653 bp, synthetic construct
  source 1..1653: mol_type = other DNA; note = Synthetic coding sequence
atgtctcagacatctcttaagcagaagaagaatgaacccggaatgcggtcatccaaagagtcactggaggctgaaaagaggaaagagtcagataagaccggtgttcgtctttcaaatcagggtagccaagagtcgagtctacgcaagacggactcaaggggctatctcgtcagaagtcagtggagccgaatttctaggtcaccctccacaaaggcccctagcatcgatgagccgagaagccgaaacacttccgcaaagctcccctcgtcatcaacctctagccggactccgtcaactagtccttctttgcacgacagcagccctccaccattgagcggccaaccgtctctgcagcctcccgcttccccacagctgcccagatccctggattcgaggccgccaacacctccagaacccgatccagggtcccgaaggtctactaagatgcaggaaaaccctgaggcatgggcccagggcatagtaagggaaatccgtcagactcgagattctcagccactggagtatagtcgcacgagccccactgagtggaagagctcaagccagagaagaggaatctaccccgcttcaacccagttggacagaaactccctctctgagcaacagcagcaacagagggaggatgaggacgactacgaggcagcttactgggcctctatgcgatctttttatgagaagaatcccagttgttcgagaccttggcccccaaagcctaaaaatgcgataactatcgccttgtcgagctgcgcactgttcaacatggtagatggacgcaaaatttacgaacaggagggcttagaaaagtatatggagtaccaattaacaaacgaaaacgtgatcctgaccccgggacctgcattccgcttcgtcaaagcactgcagtacgttaatgcacgtctgagggacctctaccccgacgagcaagacctgtttgatatcgtgctcatgacaaataatcatgcccaggtgggagtccgcctcattaattccgtaaaccactatggtctcctaatcgaccgcttttgtttaactggcggaaaggatcctatcgggtacttgaaagcttaccttaccaatttgtatatcgctgcagatagtgagaaggtgcaggaggccatacaggagggaatcgcttctgcaactatgttcgatggggctaaggatatggcctattgtgatacccagctacgcgtcgccttcgacggcgatgctgtcctgtttagcgatgagagcgaacatttcacgaaggagcacggtctggacaaattcttccagtacgacactttatgcgaatctaagccgttggcgcaggggcctctgaaaggtttccttgaggacctcggccgtcttcagaagaaattttacgccaagaatgagcgcctcttgtgccccatccggacatacctggtgacagcacggtccgcggctagttccggcgctagggtgctgaaaacacttcggagatgggggctcgaaatagatgaggctctgttcctggctggcgcaccgaagagtccgattctggttaaaatacgcccacacattttcttcgatgatcatatgttccacatcgagggagcgcagcgactcggatcaatagcagcgtacgggtttaacaaaaaattctcttcctag

SEQ ID NO: 27818 - DNA, 888 bp, synthetic construct
  source 1..888: mol_type = other DNA; note = Synthetic coding sequence
atgcctgtccatacgctctccccaggagccccttccgctccagcgctgccatgccgcctgcggacgcgtgtgcccggatacttgctcagggggccagccgatggcggtgcacggaaacccagcgcggtggaacgtctggaggcagataaggccaaatacgttaaatccctgcacgtggccaatacaagacaggaaccggtccaaccacttcttagcaaacagcccctctttagcccagagaccagacgcacggttctgaccccgtctcgtcgggcactgcctggcccatgcaggcgaccacagctcgacttggatatcttatcatcgctaatagacctttgcgacagtccagtgagccctgccgaggcatcccgcaccccgggaagagccgagggtgcaggtcgccctcccccagcaactcccccacggcctcctccctctaccagtgcggtaagacgcgtggatgtccgtcccctgccagcctctccagctagaccctgcccttcgcctggccctgcggcagccagttcgcctgctagacctccagggttgcaacgttcaaaaagcgacctgtctgagcgtttcagtagggcagccgcagacttagaaagattctttaatttctgcggattagatccagaggaggccaggggcttgggagtcgcacacctggctcgggcatcctccgacatcgtaagccttgctggcccttcagcaggtccaggctcttctgaaggcggttgttctcgacgatctagcgtgactgttgaggagagagctcgcgagcgcgtcccatatggagtcagcgtcgtcgagcgaaacgcaagggtgataaagtggctctatggcttgcgccaggccagggagagcccagctgctgaaggttag

SEQ ID NO: 27819 - DNA, 549 bp, synthetic construct
  source 1..549: mol_type = other DNA; note = Synthetic coding sequence
atgtcaggtcgaagtgtgccacatgcccatcctgctacggccgagtacgagttcgccaacccttctagacttggggagcaacgtttcggcgaaggcctgctgcccgaagaaatcctcacacccacgctataccatggatactatgtcaggcccagggctgccccagcaggcgagggttcacgggctggggcaagcgagctccgtctgtcggagggaaaatttcaggcatttctggacgtcagtcactttacgcctgatgaagtgacagtgcgaacagtcgataacctcctggaggtgtccgctcgtcatcctcagagactggatagacacggctttgtgtctagggaattctgtcggacttatgtgctccccgctgacgttgacccctggcgcgtgcgggctgcactgagccacgatggtattctcaacctcgaagcccctcggggaggcaggcacctagatacagaggtgaacgaggtctatattagtctgttgccagctcccccagaccccgaagaggaggaagaggcagccattgtggaaccatag

SEQ ID NO: 27820 - DNA, 636 bp, synthetic construct
  source 1..636: mol_type = other DNA; note = Synthetic coding sequence
atgagcaccgcggcagtccccgagctgaaacagatctcccgggttgaagcaatgaggctcgggccaggttggagccattcttgccatgcaatgctttacgccgctaatcccggacaattgttcggtaggatacccatgcggttctctgtcctgatgcagatgcgctttgacggcctgcttggtttcccagggggatttgtggaccgcaggttctggagtcttgaggacggcttgaacagggtcctcggattaggcctggggtgccttcgactaaccgaggccgactatctgagttcccacctcaccgagggcccacatagagtcgttgctcatctgtacgcccgacagctgacactcgaacagctgcatgcagtagagatatctgctgtccacagtagggaccacggcctggaggttctaggcctcgtgcgagtcccgctgtacacacaaaaggatagggtagggggtttccccaactttctgtccaacgcatttgtgtcaactgcgaaatgtcagctcctgtttgccctcaaggtgctgaatatgatgccagaagaaaaactagtggaggccctggctgcggcaaccgagaagcagaagaaggcgctggaaaagctgctcccggcatcttcttag

SEQ ID NO: 27821 - DNA, 2622 bp, synthetic construct
  source 1..2622: mol_type = other DNA; note = Synthetic coding sequence
atgcatccaccgcctcctgctgcagctatggactttagtcaaaactcactgtttggttacatggaggacctacaggagctgacaataatagagaggcccgtgcgacgctcgctaaaaactcccgaagaaatcgaaagactcaccgtggacgaggatttgtcagatatagaacgggcagtttatctactgtcagcagggcaggatgtgcaaggtaccagtgtaatcgccaatctaccttttctgatgcggcagaaccccacggaaactcttcgtcgggtgttgcccaaagtgcgggaagcgcttcatgttgcgggtgttgagatgcagttaactgcagcaatgtcattcctgacaatccttcaggacgaatccgtctccatacacgcctatacacactcatttttgcaggtcatactactgcacctagaacaccgagacacgggagtgtccaacgcctggctggagacattgctgtccgtgattgaggtgcttcctaaagaaacactgcgccacgagatcctgaacccgctcgtgagcaaggcccagctctcacagacagtccagagtcgactggtttcctgcaaaattctcggcaagctcacaaacaagtttgatgcacatactattaaacgggaaattctgcctttggttaagagcctgtgtcaggacgtggagtacgaggtgagaagctgcatgtgtcgacaactggagaatatcgctcagggtataggcaccgagctgaccaaaagcgtcgtcctgcccgaattgatcgagctcagcagagacgagggatcttctgtgagactcgcggcatttgagactctggtcaatctcctagatatctttgacaccgatgatcgtagccagactattttgccactcgtgaagtccttttgcgagaaatcttttaaggccgacgaatccatcctcatctccttgtcattccaccttggcaagctctgccacgggttgtacggaattttcacacccgaccaacatctgagatttctcgaattctataaaaaactatgtacactgggattgcaacaggagaacggacacaacgagaatcagattccacctcagatcctcgagcaagagaaaaaatatatctcggtgcggaaaaactgcgcatacaatttcccagccatgatagtgtttgtagaccccaagaattttcatatggaactttactctacctttttttgcctgtgtcacgaccctgaggtgccagtccgctataccatcgccatctgtttctatgaagtatccaagctgctgaatagcggcgtatatttgattcacaaggaactgattacacttctccaagacgagtccctggaggtgttggacgcactgatagaccatctgccagagatcctcgagcttatgagcaccggaggtgagtcgagcgttcaagagaataagctcagttcgctccctgacctaatacccgctctgactgccgctgagcagcgcgctgccgctagcttaaagtggaggacacatgagaaacttttacagaagtacgcttgcctgccacatgtaatctcaagtgaccagatctactacagattcctccagcggatgtttactattatgatgactaacaacgtgttacctgtccagaaagcggcatcccggacattatgtatttttctccggtacaatcggaaacaggagcaacggcacgaggtgatacagaagctgatcgagcagctgggacagggcaagagctactggaaccggttaagatttttggacacttgtgaatttatcatcgaaatattcagtaaatccttcttctgtaagtacttctttttacctgcaattgagctaactcatgaccctgttgccaatgtgagaatgaaactttgttacctattgccgaaggtaaagagcaccctaaaaatccccgctgacaagcatctgctgcagcagttggaaatgtgcgtcagaaagttactctgccaagagaaagacaaggacgtgcttgctatcgtgaagcggaccgtgcttgaactagaccgcatggaaatgtctatggacgcattccagaagaagttctatgagaaggacctgctggatcaagaaaaagagcgtgaggagttgctcctcctggaaatggagcaactggaaaaagaaaagcagcagaatgacgggcgacctatgagtgacaaaatgttcgagaagaagcgcagagacacgaaaacacctacacagtctctgcctaagaacattcctatctcggtgcccggtcccagctcagtcactccttctactagcaaggagataaaaaagtccaaactgattaggagccagagcttcaacaatcaggccttccacgcaaagtatggaaatctggaaaagtgtgcctcaaagtcttcaaccactggctataccacctccgtcagcggtctcgggaagacctccgtgctgtcccttgcggacgactcctttagaaccaggaacgcatcaagcgttcctagttcttttagccccaatactcccctcccttccacctccaggggcactggaaacagtgtcgatccaaaatcatccgggagtaaggacacacagcctcgcaaagcgacactcaaatccaggaaaagtaacccctag

SEQ ID NO: 27822 - DNA, 951 bp, synthetic construct
  source 1..951: mol_type = other DNA; note = Synthetic coding sequence
atgcgtcagccactgagctggggtcgttggagggccatgttggccaggacctacggaccagggccaagcgcagggtatagatgggcatctggggcacagggatatgttcggaaccctcccgttggagcttgtgatctccagggggagctcgatagatttggaggtatctccgtgcgactagcacgactcgatgcactcgaccggctagacgcggctgcgttccaaaagggcctccaagccgctgtacagcagtggcggtcagagggtagaaccgcagtctggctccatattccaatcctgcagtcccggtttattgcacccgctgcatcgcttggcttctgtttccaccacgcagagtccgatagtagcaccctgaccctttggctgcgcgaaggcccatctaggctcccgggttacgcttcgcaccaggtaggcgtggcgggagcagtgttcgacgagtcaaccagaaagatcctggttgttcaggaccgcaataaattgaaaaacatgtggaagtttccaggtggattgtccgagcctgaggaggatatcggtgacacggcagtacgggaggtcttcgaggaaacggggataaagagcgaattccgaagtgtgttgtctatccgacagcagcatacgaatcccggtgcctttggtaagtccgacatgtacatcatttgcaggctaaaaccctatagctttactattaatttttgtcaagaggaatgcctgagatgcgaatggatggatttaaatgatcttgccaagactgagaacacaacgcccattaccagtcgtgttgcgaggctcttgttatatggctacagggaggggtttgacaagatcgatctgactgtagaggaactgcccgctgtatacacggggctgttctacaagctgtatcataaagagctgccggaaaactataagacaatgaaaggcattgactag

SEQ ID NO: 27823 - DNA, 537 bp, synthetic construct
  source 1..537: mol_type = other DNA; note = Synthetic coding sequence
atgggggaaacatggaagaacatttgttccactgttaggcatggctggtggctgcgcgaccaccgcatggccggacttcccatccctccagagattgttaaggaagcagaagtgccacaggccgcacttggtgttccggctcagggcaccggggataacgggcatacacctgtcgaggaagaggtgggcggtatcccagtgccagccccaggtctcctgcaggtgactgaacgcagacaacctctctctagtgtctcaagcctagaggttcattttgaccttctagacctcaccgagctgacagacatgagtgatcaagagcttgcagaagtgtttgccgattcagacgacgaaaaccttaacactgaaagtcctgccggtctgcacccactgccccgtgccggatatctgcgcagtcctagctggaccagaaccagggcagaacaatcacatgaaaaacagccactgggcgatccagagcgacaggcgactgtgctggatacatttctaaccgtcgaacgaccacaggaagactag

SEQ ID NO: 27824 - DNA, 741 bp, synthetic construct
  source 1..741: mol_type = other DNA; note = Synthetic coding sequence
atggccgagcaggagcagagaaaaatacctctcgttcccgaaaacctgcttaaaaagcgcaaggcgtatcaggcactgaaagcaacacaggccaaacaagcactcctggcaaaaaaggagcagaagaagggcaaaggtctgaggtttaaaagactggagagttttctgcatgacagttggcgtcagaagcgggataaggtcaggctgcgaaggttggaggtgaagccccatgctctcgagctccccgacaagcacagtctagcctttgtggtcagaatcgaaaggatcgacggagtcagtctgctggtgcagaggaccattgcaaggttgcgtttgaagaaaatcttctccggtgtatttgtgaaggtgaccccccaaaacttgaagatgttaaggattgtggagccatacgtcacttggggatttcctaatcttaagtcagtgagagagcttatattgaagcgcggtcaagcaaaagtaaaaaataaaacaatcccattgacagataacacagtaattgaggagcatctaggaaaatttggcgtcatctgtttggaggatctcattcacgagattgcctttcctggtaagcattttcaggagatctcctggtttctgtgccccttccacctctccgtagccagacacgccacaaagaaccgcgttgggtttctgaaagagatggggacgcctgggtaccggggtgaaaggatcaatcagttaattcgacaactgaactag

SEQ ID NO: 27825 - DNA, 2442 bp, synthetic construct
  source 1..2442: mol_type = other DNA; note = Synthetic coding sequence
atggcatggccctgtatcacccgggcttgctgcattgctaggttttggaaccaactggataaagcagacattgccgtacctcttgtgtttaccaaatactcagaggctacagagcatccgggagcaccaccacagcctccccctccacagcaacaggctcagcccgctctcgcacccccatctgctcgcgctgttgcgattgaaacccagcccgctcagggagaattggatgccgtcgccagggctacaggaccagccccaggccctaccggagagcgtgaaccagcagctgggccaggacgctcaggaccaggtcccggactcggcagcggttcaacttcaggcccagcagactctgtgatgcgtcaggattatcgcgcatggaaagtccagagacccgaaccctcttgtcgcccacgttctgaatatcagccttcagacgcacccttcgagcgggagacccagtatcagaaggactttagggcatggccactgccacggagaggcgaccacccatggatcccaaagccagtccaaatcagcgccgcttcacaagctagcgctccaatactgggagcccctaaaagacggccacagtcacaggaaaggtggccggtccaggccgcagctgaagctcgtgagcaggaagccgctcccggtggagcaggcggtttggccgcaggcaaggcgtccggggctgatgagcgtgacacccggaggaaagctggtccagcttggatcgtgagacgcgctgaggggctgggccatgagcagacacccctgcccgctgcgcaggcacaagtacaggctaccggtccagaggctggacgaggacgagctgccgctgacgctctgaaccggcagattagagaggaagtggcctctgctgtgtcctcatcttatcggaatgagtttcgcgcatggaccgacattaagcctgtgaagccaattaaggcaaagccacagtacaagccacctgacgataagatggttcacgagacgagctatagcgcacaatttaaaggcgaagcaagcaagccgaccaccgccgataacaaggtgatcgataggaggcggatccggtcactatatagtgagcccttcaaagagcctccgaaggtggaaaagccatctgttcagtcatccaagccaaagaagacctccgccagtcacaagcctacacggaaagctaaggataagcaggccgtgtctggccaagcagcaaaaaagaagtcggctgagggtccgagcactaccaaacccgacgacaaggaacagagcaaagagatgaacaacaaattggccgaagcaaaagaatcgctggcccaacccgttagtgatagtagcaagacccagggccctgtggccacagaacccgacaaggaccagggatccgtagtccccggtctacttaaggggcagggccctatggtgcaggagcccctgaaaaaacaggggagtgttgtgccgggtccccctaaggatttgggccctatgattccactgcccgtgaaagatcaagaccacaccgtgccagagccacttaaaaacgagagccctgtgatttccgccccagtaaaagatcagggacctagcgtgcctgtcccccctaaaaatcagtccccaatggtgccggcaaaggttaaggaccagggaagtgtggtaccagagtctcttaaagatcaggggccacggatccccgagccagttaaaaatcaggccccaatggtgccagcacccgtcaaggatgaaggcccaatggtttccgctagtgttaaggatcaaggtcctatggtctccgctccagtaaaggatcagggtcccattgtccccgctccagttaaaggcgaggggccaatcgtacccgcacccgttaaggatgagggaccgatggtgtctgccccaattaaagaccaggaccctatggtgcctgaacatcctaaggatgagagtgcaatggctacagccccaattaagaaccagggctcgatggtgagcgagcccgtgaaaaaccagggcctcgttgtttccggcccagtgaaggatcaggacgtagttgttcccgaacatgccaaggtccacgattcagccgtggtcgccccagtgaaaaaccagggcccagtggtaccagaaagtgtaaaaaatcaggacccaatcctcccagtgctagtgaaggatcagggaccaaccgtgctacagccacccaagaaccaggggaggatagtccccgagccactcaagaatcaagtgccaattgtgcccgtacctttaaaggaccaagacccgttggtacccgtcccggctaaggaccagggacctgctgttcctgagcccctgaagactcaaggaccaagggacccccaacttcctacagtatccccactccccagggttatgatacccaccgccccacacaccgaatatatcgaatcatccccttag

SEQ ID NO: 27826 - DNA, 261 bp, synthetic construct
  source 1..261: mol_type = other DNA; note = Synthetic coding sequence
atgccacagtaccagacatgggaggagttcagcagagcagcagagaagttatatctggcggatccaatgaaagcgagagtggtgcttaaataccgccactcagatggtaacctctgtgtgaaggtgacggatgatcttgtctgcctggtttacaaaactgatcaggctcaggacgttaaaaagattgagaagtttcattcacagctgatgaggttgatggtcgccaaggaggcaaggaacgttaccatggaaaccgaatag

SEQ ID NO: 27827 - DNA, 1206 bp, synthetic construct
  source 1..1206: mol_type = other DNA; note = Synthetic coding sequence
atggcccatgtttccagcgaaacccaagatgtaagtccaaaggatgaattaactgcaagtgaggcctctaccaggtcccccttgtgtgagcatacttttccaggcgactctgacctccgatcaatgattgaggaacatgccttccaggtgctctctcagggtagcctgctagaatcaccgagttacacagtatgtgtgtcagaacctgataaagatgatgactttctctcactgaacttccctcgcaagttgtggaagatagtggagtcagatcaattcaagtccatctcgtgggatgagaatggtacatgcattgtcatcaacgaggagctgttcaaaaaggaaatcctggaaaccaaagccccttatcggatttttcagacagacgccattaaaagctttgtcaggcagcttaacttatatggcttttccaagatacagcagaacttccaacgcagtgcttttctggctactttcctgtctgaggaaaaggagtccagcgtcctgtctaagctgaaattttactacaatcctaactttaaaagagggtacccacagttgcttgttcgagtcaagaggaggataggggtgaagaatgcttcccccatctctaccctgttcaacgaggattttaacaaaaagcacttcagggcgggtgctaatatggaaaaccacaatagcgcattggccgctgaagcaagcgaagagtcgctgttcagcgcatcaaaaaacctcaacatgccccttacacgcgaatcttccgttaggcagatcatagcaaatagtagcgtcccgattcggtctggatttccgccaccatcccccagtacaagcgttggaccttctgagcagatcgctacagaccagcacgccattctgaatcagctcaccacaatacacatgcattctcattcaacgtacatgcaggcccgagggcatatcgtaaatttcatcactaccaccacttcccagtaccatatcataagcccactccagaacggctacttcggcctcaccgtcgaacccagtgccgtgccaacacggtacccactggtcagcgtgaatgaagctccataccgaaacatgctgccggctgggaacccctggctacaaatgccgacaatagccgatcggagcgccgctcctcacagcaggcttgcactgcagcctagcccacttgataagtaccacccaaactataattag

SEQ ID NO: 27828 - DNA, 4302 bp, synthetic construct
  source 1..4302: mol_type = other DNA; note = Synthetic coding sequence
atgtggtctttaacggcatctgagggtgagtctactaccgcccacttctttctcggcgcaggagacgaagggctgggcactaggggcattggaatgagaccagaggaatccgattctgagcttctagaggacgaggaagacgaagtgccacctgaaccacagatcattgtcggaatttgtgctatgacaaaaaagtccaagagcaaacctatgactcagatcctggagcgcctctgtagatttgactatctgacggtggtgatcctcggagaagacgtaatattaaacgagccggtggaaaattggccctcatgtcactgcctgatcagctttcactcaaaagggttccccctagacaaggccgtggcatactcgaaacttcgcaatcctttcctgataaatgacctggccatgcagtattacatacaggataggagggaggtgtatcggatactgcaagaggaaggtatcgacctgcctaggtatgccgtactgaatcgggaccccgctagacccgaggagtgcaacctgattgagggcgaagatcaggtcgaggtgaatggcgctgtgttccctaaaccatttgtggaaaagcccgtgagcgccgaagatcacaatgtgtatatttattatccctcctctgcgggtgggggaagtcaaaggctgttcagaaagattgggagccgttccagtgtgtactcccctgagagctcagtgaggaagactggctcgtacatttacgaagaatttatgcctactgacggcacagacgtgaaagtgtacactgtgggaccggattatgctcatgccgaggctcggaaatctcccgctctggacggaaaagttgagcgggattcagagggcaaagaaattagataccccgtcatgctgactgcaatggaaaagttggtggccagaaaggtctgcgttgcctttaagcaaaccgtatgcggattcgatctgctgcgagccaacggtcacagctttgtctgcgatgtgaacggctttagctttgtgaagaattccatgaaatactatgacgattgtgcgaagatcctggggaacaccatcatgagggagctggcccctcagtttcagattccttggtctatcccaacagaagctgaagacatccccatcgtgcccactacaagcggcactatgatggagctccgttgtgtgatcgcaatcatcaggcacggcgacaggacacccaaacagaagatgaagatggaagtcaaacaccctcgtttttttgccctgtttgagaaacatggtggatacaagacgggaaaattgaagctgaaacgccctgagcagctgcaagaggttctggacatcacacggcttctgctagcagagttagagaaggagccgggaggggagatagaggagaagaccgggaagttggagcagctcaagagtgtactcgagatgtatggacacttttctggaatcaacaggaaggttcagcttacgtattatcctcacggagtgaaagccagtaatgagggacaggacccacaacgagaaacactggccccatctttgctgcttgtcctcaaatggggcggtgaactgacacctgcgggtagagttcaggccgaagagctggggcgagcctttagatgtatgtatcccggagggcagggagattacgccggatttccaggatgcggtctgctgcgtctccactcgaccttccgccatgatctaaaaatctacgcttctgacgaaggtcgagtccagatgacagccgctgcattcgcaaagggactgttagcgctggagggagagctgaccccaatcctggtacagatggtgaagagcgcgaatatgaatggtcttttggacagcgatggagacagcctgagctcttgccaacatagggtgaaagcaagattgcaccatatcctacaacaggacgctccatttggacccgaagattacgatcagctggcgccaactcgatccactagcctgctgaattctatgactataatccagaacccagtgaaggtgtgcgatcaggtcttcgctcttatcgagaatctgacccatcagatcagagagagaatgcaagatccccgatccgtagaccttcagctctatcatagtgagactctggagcttatgctgcagcgctggtccaaactggagcgggactttcgtcagaagagtggccgatacgatatttcaaagatccctgatatatacgattgcgtcaagtacgatgtgcaacataacggatccttgggattgcaggggacagccgaacttctccggttgagcaaggcactggctgatgtagtcatcccacaggagtatggcatttctagggaagagaaattagaaatcgctgtgggtttctgtttaccacttctgcgcaaaatcctgctggatctacagcgaacccacgaggacgagagcgtcaacaaactgcatccattatgctacctgcggtactctcgaggcgtgctgagcccagggagacatgtacgtacacgcctgtactttaccagtgagtctcacgtgcacagtctactgagtgtgttcagatatggcggtctcctcgatgagacacaggatgcacagtggcagcgagcactcgactacctgtctgcaatctctgagctgaattacatgacccaaatcgttataatgctctacgaagataacactcaggatccactgtctgaggagagatttcatgtcgaattacacttttcccctggggtgaagggtgtggaggaggagggaagcgcgccagccggttgtggattcagaccagcctcctctgaaaacgaggaaatgaagactaatcaaggcagcatggagaacctctgccctggcaaagcctcagatgagccagatcgagccttgcagacctccccgcagcctccagagggacccggattgccacgcaggtctcccctgattcgtaacaggaaggccggttcgatggaggtgctttcagaaacgtcaagcagccgcccaggaggttatagactctttagcagcagcagaccccctaccgaaatgaaacagtcagggctcggatcacagtgcaccggcctgttctctaccacggtcttgggaggttcgagcagcgccccaaatctgcaggactatgccaggtcacatgggaagaaactgccccctgcatctctgaaacatagagacgaactcctcttcgtacccgctgtgaaaagattttcagtgtccttcgctaagcacccaactaacgggtttgaagggtgtagcatggtcccgactatctatccattggagactctccacaacgcgttgtcactccgacaagttagtgagttcttgagccgagtgtgtcagcgccatactgatgcccaggctcaggctagtgcagctctattcgactccatgcacagctcgcaagctagcgacaacccattcagcccccctcgtactctacactctccacccttacagctccagcagcggagtgaaaagccaccttggtattcatcaggaccatcttctacggtgagcagtgcagggccaagttcgcccacaactgttgatgggaattcccagtttggatttagcgaccaacccagcttaaacagccacgtggctgaggagcatcagggcctggggctcttgcaggagactcccggaagcggagctcaggagctgagtattgagggggagcaggaactgtttgagcctaatcagtcgccacaggtcccccctatggaaaccagccaaccttacgaggaagtgtctcagccttgccaggaggtgccagacatctctcagccttgtcaggatataagcgaagcactgagccagccctgtcagaaagtccccgacatttcccaacagtgtcaggaaaatcacgacaatggtaaccacacctgccaggaggtcccccacatcagccaaccatgccaaaagtcatcccagttgtgtcaaaaagtgtccgaggaggtctgtcagctgtgcctcgagaatagcgaagaggtgagccagccttgccagggagtgagtgtcgaagtcggtaaattagtgcataaatttcacgtaggggtgggaagcctggtgcaggaaaccctggtggaggtcggtagtcccgctgaggagatacccgaggaagtgatccagccatatcaagagttttccgtagaggtggggaggctggcgcaggagacctctgccatcaacttgttatcccagggtatccccgagattgacaaaccatctcaggagtttcccgaagagatcgacctccaggcccaggaggtgcccgaagaaattaattag

SEQ ID NO: 27829 - DNA, 1137 bp, synthetic construct
  source 1..1137: mol_type = other DNA; note = Synthetic coding sequence
atggactctgtacgctctggtgcctttgggcaccttttcagacccgataactttattttcggacagagcggggctggcaacaactgggctaagggacactatactgaaggagcagagcttgtggatagcgttctggacgtcgtaaggaaagaatgtgaaaactgcgactgcctccaggggttccagctgacccactcgctcggaggcggtaccggatccggaatgggtaccctcttgatatccaaggtgagagaggaatatcctgatagaattatgaacacattctccgttgtgccctctccaaaggtctcagacactgtagttgaaccatataacgcaacactgtcgatacatcagctggtggagaacaccgacgagacatactgcatagacaatgaagcgctgtacgatatctgtttcaggacattaaagctggccaccccaacttacggcgacctgaaccatctggtgagcgccacaatgtccggtgtcacgactagcctgagattccccggacagcttaatgccgacctgagaaagctggctgtaaacatggtgcctttccctcggctccatttcttcatgccgggatttgcacctctgactgcccgtggctctcagcagtacagggcgctcactgtgcctgaactgacacagcaaatgttcgacgctaaaaacatgatggctgcttgcgatcctaggcatggcaggtacctgaccgtggctactgtgtttaggggcaggatgtcaatgaaagaagtggatgaacagatgctcgccatccagtccaagaacagttcttacttcgtggaatggattcccaacaatgtgaaggttgctgtatgcgatattcctcctaggggtctgaaaatgagttcgacattcatcggaaattccactgccattcaggagctgttcaaacgaatttcggaacagttcacagcgatgtttcggaggaaagcctttctgcactggtacacaggtgaagggatggacgagatggaatttacagaagcggagtccaacatgaacgatctggtttccgagtatcagcagtaccaggacgccaccgccgaggaggaaggggagatgtatgaagacgacgaagaggaatccgaagcccagggtcctaagtag

SEQ ID NO: 27830 - DNA, 1161 bp, synthetic construct
  source 1..1161: mol_type = other DNA; note = Synthetic coding sequence
atgtgcgagcgggctgcaaggctgtgccgggcaggtgcacaccgtcttctgcgggaacctccccagcaggggagggccttgggaggcctcctgagatgggtgggcgcacgcatgggcgaaccaagggagtcattggcacccgctgctcccgctgaccctggcccagcctccccacgaggaggaactgctgtgatacttgacatttttcgccgagccgacaagaacgatgatggcaaattgtccttagaggagtttcagctgttcttcgccgacggggtgctgaatgaaaaagaacttgaggatttgtttcacaccatagattccgataatactaatcatgtggacaccaaggagctgtgcgactacttcgtggaccatatgggggattatgaagatgtattagcttccttggagactctgaatcatagtgtgttgaaggccatgggatataccaagaaggtgtatgagggaggaagcaacgtggaccagtttgtgacaaggtttctgcttaaagagacagctaatcagatccagtccttactgagtagcgtggaatccgcagttgaggccatcgaggaacagaccagccaattgcgacagaaccacatcaaaccgagccactccgcagcacagacctggtgtggaagtcctactcccgctagcgctcctaaccacaaattaatggcaatggagcagggtaagacacttccgagcgctacggaggatgctaaagaagaagggctggaagcacagatcagccgcttagcagagctgatcggcagactcgagtctaaggcactctggtttgatctccagcagcggctgtccgacgaggatgggacaaacatgcacctccagctggtgcggcaggagatggccgtctgcccggagcagttgagcgagtttcttgactcactccgacagtatcttcggggtactactggggtcagaaactgcttccacattacagctgtgcgtctttccgatgggttcaccttcgttatctacgagttttgggagaccgaggaggcatggaagcgccacctacagtctcctttatgtaaggcattccgacatgtaaaggtggataccctatcccagcccgaggccctgagcagaatccttgtgcctgctgcctggtgcaccgtgggccgagactag

SEQ ID NO: 27831 - DNA, 1482 bp, synthetic construct
  source 1..1482: mol_type = other DNA; note = Synthetic coding sequence
atggagcgaagccctgatgtaagccccggtccctcccggtccttcaaggaagagctgctgtgtgctgtctgctatgatcctttccgtgatgccgtgacactcaggtgtggacataatttctgcaggggttgcgtctctcggtgctgggaagtacaggtctctcccacctgccctgtgtgtaaagatcgagcgtcacccgctgacctaaggacgaatcacacattaaataacctggtggagaaactgcttcgggaggaggcagaaggcgctaggtggacctcataccgtttttctcgggtgtgtcggctgcaccggggacagctgtctttattttgcttagaggataaggagctcctgtgttgcagttgccaggctgacccacggcatcaggggcaccgtgtccaaccagtcaaggataccgcccatgatttcagggctaagtgccgaaacatggagcacgccttgagggaaaaggctaaagccttttgggccatgagaagaagctatgaagccatcgccaagcacaatcaggtggaagcagcgtggctggagggtagaatacgtcaggagttcgataagcttcgtgaattcctcagggtggaagaacaggccatcctggacgcgatggccgaggaaacccgtcaaaaacagttactggccgacgaaaagatgaaacaactgactgaagaaacggaagtgttggcgcacgaaatcgagcgtctgcagatggagatgaaggaggacgatgtttcattcttgatgaaacacaagtcccgcaagcgcaggttgttttgtacgatggaacccgagcccgtccaaccagggatgcttatcgacgtgtgtaagtacttgggcagtctgcagtatcgcgtgtggaagaagatgctggcctctgtcgagtcagtccccttctcttttgaccctaacacggctgctgggtggcttagtgtgtccgatgacttaacctccgtgacaaaccacggatatcgggtgcaggtggagaatccagaacggttcagcagtgctccctgcctcctgggcagtagggtgttttcacaggggtcccatgcatgggaggtggcgttgggcggacttcagagctggagagtgggcgtcgtcagggtcaggcaggatagcggggcagagggccacagccatagttgctatcatgacacccgctctgggttttggtacgtatgccggactcagggcgtcgagggtgatcattgcgtaacaagtgaccctgcaactagcccccttgtgctggccatccctcggcgactcagggtggaactggagtgcgaggagggggagctgtccttctacgacgccgagcgccattgccacctgtacaccttccacgcgcgatttggagaggtcagaccctatttttatctgggcggtgcccgaggagcgggaccgcctgagccactgcgaatctgtcctttgcatatctcagtcaaggaggaactggacggctag

SEQ ID NO: 27832 - DNA, 2262 bp, synthetic construct
  source 1..2262: mol_type = other DNA; note = Synthetic coding sequence
atggccccagatagcgatccatttccagagggccctctcctgaaactcctccctctggacgcgcgagataggggcacacagaggtgccgactgggccctgctgcactacatgccttaggggctagactaggcagtgcagtgaagatttccttgcctgatggtgggtcctgtctgtgcaccgcttggccgagacgagacggagccgacggcttcgtccagttagatcccctgtgcgcaagccccggagctgcagtcggagccagcagatccagacggagcctgtctttgaacaggctgctgctagtgccgtgtccccctctgcgacgcgtggcagtctggccggtgctccgggagcgcgctggggcaccaggagcccgaaacacagcagccgtcctggaggctgcccaggagttgctgcggaatcggcctatatcattaggtcatgtcgtggtcgccccacccggagcccctggattggtagcggcactgcacatagtcgggggtaccccgagccctgacccggcaggtcttgtgacacctcgtacacgagtctccttagggggagagcccccaagcgaagcacaaccacagcctgaagttccactgggcggactgtccgaagctgctgattccctgagggagctgctccggctaccgttgcgttatccccgagctcttacagctcttggcttggcagtgcccagaggcgttctcttagccggtccaccaggggtggggaaaacccagttggtgagggccgttgccagggaagcaggcgcagagctactggccgtgagtgctcccgcacttcagggtagtcgccctggggagacagaggagaacgtaaggcgcgtgtttcagagggcaagggagctcgcctctagggggcctagtctgctgtttttggatgaaatggacgccctgtgtccacagagaggcagtcgtgccccagagtcaagagtggttgcccaggtgctgacactgctcgacggtgcaagtggcgatcgcgaagtggtcgtcgtgggagctaccaaccgtcctgacgcgctagaccccgctctgcggcgtccgggacggtttgatagggaggtggtgatcggaactcccacgcttaagcagagaaaggagatcctgcaggtgatcactagtaaaatgcccatcagctcccatgtcgacctgggactgctggctgagatgactgtcggctacgtgggcgctgacctgacggccctttgccgtgaggcggctatgcatgcattgcttcactccgagaaaaaccaggacaaccccgtgatcgacgaaatcgacttcctggaggcctttaaaaacatccagcctagctcctttcgttccgtgataggtctcatggacatcaagccagtcgactgggaagagatcgggggtctcgaagacgtcaaattaaaattgaaacaatccatagagtggcctttaaagtttccttgggagttcgttcgaatgggcctcacccagccaaaaggagtgctcctgtatgggcctccagggtgcgccaagacaaccctcgtgcgcgctctggcaactagctgtcactgttcatttgttagtgtatccggcgcagacctcttctccccattcgtcggggatagcgagaaggtcttaagccagatttttaggcaggctcgggcttcaactccagccattctgttcctggatgagatcgattctatcttaggggctcggtccgcttctaaaactggatgtgatgtccaagaaagagtgctgtcagtgctccttaatgaactcgacggggtagggctgaagactatcgagagaaggggtagcaaaagcagtcagcaagaatttcaggaagtctttaacaggtccgtaatgattattgctgctacaaatcgccctgacgtgctggataccgcgttgctgaggcccggtcgactggataagatcatatacattcctccccctgatcacaaaggaaggttatcaatattgaaggtgtgtacaaaaaccatgccaatcggccctgacgtctcactcgaaaacttggctgccgagacttgtttcttctctggggctgatctgcgaaatctgtgtaccgaggctgctctgcttgcactgcaggaaaatggcctcgacgccacaactgtaaaacaggaacatttcctgaagtcgcttaaaacggtgaaacccagcttgtcttgtaaggatctcgccctctacgaaaacctgttcaagaaggagggtttcagcaacgttgaaggcatttag

SEQ ID NO: 27833 - DNA, 1026 bp, synthetic construct
  source 1..1026: mol_type = other DNA; note = Synthetic coding sequence
atgccaaagcgtaaagtcacgtttcaaggtgtcggggatgaggaggacgaggatgagatcatcgtgccaaagaaaaaattggtggatcctgtggcaggatccgggggtccgggatccaggttcaaagggaagcacagcttggactccgatgaagaagaggatgatgacgatgggggatcatccaaatacgacatcttagcgagtgaggacgtagagggacaggaagccgctactcttcccagcgagggaggcgtccggattacaccctttaatctgcaggaggaaatggaagaaggacattttgatgccgacggaaattactttctcaaccgcgacgcccagattcgggattcatggctggacaatatagattgggtcaagatacgggagcgcccacctggtcagcgccaggcaagtgatagtgaggaggaggacagcctcggacagacatccatgagcgctcaggccctgctcgagggcctgctggaactgttgcttcccagggaaacggtggcaggggctttgcggaggctgggggcacgcggaggagggaaaggtagaaagggacccggacagccatctagcccccagcgcctcgacagactatctgggctcgcagaccagatggtggcccgaggcaaccttggcgtatatcaggaaacgagagagaggctcgccatgcgcctgaaaggtcttgggtgtcaaaccttaggtcctcataatccgacaccacccccatctctggacatgtttgccgaggagctggccgaggaggagctagaaactccgacgccgactcaacgtggagaagctgagtctcgcggagatggtcttgtggacgtcatgtgggagtataagtgggaaaatacaggagacgccgaactttatgggccattcacgagcgcacagatgcagacctgggtcagtgagggatacttcccggacggtgtctactgtcggaagctcgatcccccagggggacagttttataacagtaaacgaatcgattttgatctctatacctag

SEQ ID NO: 27834 - DNA, 690 bp, synthetic construct
  source 1..690: mol_type = other DNA; note = Synthetic coding sequence
atggctgaggaaatggagtctagcctcgaagcgtccttctctagttctggggctgtgtcaggcgcatctggctttctgcctcctgccaggtcaagaatctttaagataatcgttatcggagacagcaacgtcgggaagacatgtctgacataccgcttctgtgcagggaggtttccagacaggactgaagccacaatcggcgttgacttccgggaaagggccgtcgagatcgatggagagaggatcaagatccaactgtgggacaccgccggtcaggagcgttttcgtaagagtatggttcaacattactaccgcaatgtgcacgctgtcgtgttcgtgtatgatatgacaaacatggcatcttttcactcactacctagttggatcgaggaatgtaaacagcatctcttagcaaacgatatccccagaatcttggtaggtaacaaatgcgatctaaggtccgctatccaggtgccgactgatctggcccagaagttcgcggacacccactccatgccactgttcgaaacatctgctaaaaatccaaacgacaatgatcacgtggaggcaatatttatgaccctggctcacaaactgaaatcacacaagcctttgatgctgtcccagccccctgacaacggcatcattctgaagccagaacctaaacctgcaatgacctgctggtgctag

SEQ ID NO: 27835 - DNA, 2352 bp, synthetic construct
  source 1..2352: mol_type = other DNA; note = Synthetic coding sequence
atgctgctggggtttcggcgtggcaggagatcgcacttcaagcacattattcatggacttttgcccgctgcttctgtcgcacctaaggcagccgtacctcggacccccccacctcgcagtccgaacccctctcctgagagacccaggagcgcactcgctgctgctatcctggctaccactctgactggtagaaccgtggcaatcccacaaccccgacagcgtagccgctccgagtcggatgtgtcctctgtggagcaggattcgtttatcgagccttacgccaccacttcccagttacgtccgaggccgaattggcagagcgaaatggggagaaggtcctcccttccatctttcgaaactttagactatggcgatgaagaggacattgagactcaactgagctcatccggcaaggaactgggcgacgtgtccgctcgggaggaccgcggaggacacagcgatgacctgtacgcggttccccacagaaaccaggtccccctgttgcacgaagtgaactcagaggatgatgagaacatatcgcatcaagatggattccctgggagtccacctgctccacagaggacccagcagaaagatgggaaacacccggtcctgaacctcaaggatgaaaaacccccactgtgcgagaagccgccaccttccccagatattacaggacgcgctaggcagagatacaccgagattactcgcgaaaaatttgaggccttgaaagaagagaacatggatctgaacaatatgaaccagtctctgacgctcgagcttaatactatgaagcaggcgatgaaagagcttcagttaaagcttaaaggaatggaaaaggagaagagaaaactcaaggaagccgaaaaggcaagtagccaggaagtagctgctcccgaattgctgtacctgaggaagcaggctcaggagcttgttgatgaaaatgacggcctgaaaatgactgtccaccggttaaatgtcgagttgtcccggtaccagacgaaatttaggcacctatctaaggaggaatctctcaacatagagggccttcctagcaaaggcccaattccaccttggcttctggatattaagtacctgtctcctcttcttttggcctatgaagatatgatgaaggagaaggatgagctgaacgcaaccctgaaggaagagatgagaatgttccgaatgcgcgtgcaggaggtggtgaaggagaacgaagaattacatcaagaactcaataagtcatccgcggtgaccagtgaagaatggcggcagctacagacgcaggccaaattggtacttgaagagaataaacttctgctggaacagctagagatacagcaacggaaagccaaagatagccatcaagagcgacttcaggaagtgagtaagctgaccaagcaactcatgctgctggaagcaaaaactcacggccaggagaaggagctggctgagaatcgcgagcaacttgagatcctccgtgctaagtgtcaggagctaaagacgcactctgacgggaagatcgcagtggaagtacataagtccattgtgaatgagttgaaatcccagttgcagaaagaagaggaaaaagagcgggctgaaatggaggagctgatggagaaactgaccgttttgcaggcccagaagaagagcctccttctggaaaagaacagcttgaccgagcagaacaaagcacttgaagccgagttggagagagctcagaagatcaatcggaagagccagaagaagatcgaggtcttgaagaagcaagtcgaaaaagctatgggcaacgagatgtctgcgcaccagtacttagcaaacctcgtagggctggctgaaaacatcacgcaagagcgcgactctttgatgtgcctcgccaaatgtctggaaagtgagaaagatggggtgctgaataaagtgatcaagagcaacatcagacttggaaagttggaagagaaagtgaagggctataagaagcaggctgctctgaagctgggcgatattagccaccggctgctggagcagcaagaggactttgctgggaagaccgcccaatataggcaggagatgcgccatctgcaccaggtgcttaaagacaagcaggaagtactagaccaggcgctccaacagaatcgggaaatggagggagaactcgaagtgatttgggaaagtactttccgcgaaaacaggcgaatacgagagttactacaggatacccttacccgaacgggcgtacaggacaacccacgcgcactcgtggctccgtccctgaatggcgtgagccaggcagatctgctggacggatgcgatgtctgttcatatgatctcaagtcccacgctccaacatgctag

SEQ ID NO: 27836 - DNA, 639 bp, synthetic construct
  source 1..639: mol_type = other DNA; note = Synthetic coding sequence
atggcggctcgaaggggggctcttatagtactggagggcgttgaccgagcgggaaagtcaacacagtctcgaaaacttgttgaggccttatgtgccgctggtcatagggctgagctcctccgcttcccagaacgctctacagagattgggaagctgctaagcagctacctccagaaaaaatcggacgtcgaggaccattccgtgcacctccttttttcagcaaacaggtgggaacaggtgcctcttattaaagaaaaattaagtcaaggcgtgacactggtggtggaccgttacgcgttttcaggggtggcgttcacaggcgcaaaagagaacttctcccttgattggtgcaagcagcccgacgtcggcttgcctaagcctgacctggtgctcttcctgcagctgcagttggctgacgcggctaaacgaggtgcttttggccacgaaagatatgaaaatggcgcatttcaggagcgtgcgctgcggtgttttcaccagctcatgaaagacacaacgctgaactggaaaatggtcgacgcatccaaatccattgaggcagttcatgaggacatcagagtcttgagcgaggacgccattcggaccgcgacagaaaagcctcttggtgagctatggaaatag

SEQ ID NO: 27837 - DNA, 504 bp, synthetic construct
  source 1..504: mol_type = other DNA; note = Synthetic coding sequence
atggaagaaacttatacggactcacttgacccagaaaagctgctgcaatgcccctatgataaaaaccaccagattcgagcgtgtcgcttcccgtaccacttgatcaagtgccggaagaatcacccggacgtcgcaagtaagctggctacatgtccttttaatgctcggcaccaagtgcctcgagcagagatctctcaccacatcagttcctgcgacgacaggtcatgtatcgaacaggacgtagtgaatcagactagatcactgagacaggagacgctggctgaatcgacgtggcaatgtccaccttgcgacgaagactgggataaggatctatgggagcagacctcaaccccttttgtgtggggtacaactcactatagcgacaataattccccagcatccaacatcgtcactgagcataaaaacaatttggcttccgggatgcgggttcctaagagcttgccctatgtcctgccttggaaaaacaatggcaatgcccagtag

SEQ ID NO: 27838 - DNA, 381 bp, synthetic construct
  source 1..381: mol_type = other DNA; note = Synthetic coding sequence
atggcggcagggccagaacccccagagtgggaaccacgctggagaaaggcactacgcggaaaggagaacaaaggttctgtcgaaatcatgcgtaaagacttgaatgatgcgagagatctgcatggtcaggcagagtctgccgctgctgtttggaaagggcacgtaatggaccggaggaaaaaagctctcactgactacaaaaagctgcgcgcattttttgtggaggaagaggagcactttctccaggaggcagagaaggaagagggcttacctgaggacgaactggccgaccccaccgaaaggttcagatccttactccaggccgttagcgaactagaaaaaaaacaccggaacctcggattatccatgttgctgcaatag

SEQ ID NO: 27839 - DNA, 1668 bp, synthetic construct
  source 1..1668: mol_type = other DNA; note = Synthetic coding sequence
atgcaaagttgcgagagctccggggatagtgccgatgaccctctgtcccgagggttgagacgtcgagggcagccacgggttgttgtcatcggggcaggtctcgccggactggccgcagctaaggccctgctggagcagggattcaccgacgtgactgtgctcgaggcctcaagccacattgggggtagggtgcaatcggtcaaactggggcatgcaacatttgaactgggtgcgacatggattcacggttctcacggtaaccccatttatcatcttgcagaagccaatggacttctggaagagaccaccgacggagagcgcagcgtgggacgcattagtctctattccaaaaatggcgttgcttgctatctgaccaaccatgggagacggattcccaaggacgtggtcgaggagttcagcgacttgtataacgaagtgtacaatttgacccaggaattcttccggcacgacaagccagttaatgccgagagccaaaactccgtgggcgtgtttactcgtgaagaggtccgcaatcgaatccgaaacgaccccgatgatccagaggccaccaaacggctgaagttagcaatgattcaacagtacctgaaagtggaaagctgtgaatcgtcttcacacagtatggacgaggtgagcctttctgcttttggggagtggacagaaatccccggtgcccaccacattattccctcaggctttatgcgggttgtggagctgctggctgagggcataccagcccacgtcatccagcttgggaagccagtcagatgcatccattgggaccaggcatctgccagacccagaggccctgagattgagcccaggggcgagggggaccacaatcatgacactggtgagggtgggcaaggaggcgaggagccacgcggaggtcgctgggacgaggacgagcaatggtcggttgtggtggagtgtgaagattgtgaacttattcctgcagaccacgtgatagtcacagtttctttaggggtgcttaagaggcaatatacaagcttctttaggccaggcttgcccacagaaaaggtagcggctattcatcgccttggcattggcactaccgacaaaatcttcctggaatttgaagaaccgttttggggacccgagtgtaattccctgcagttcgtctgggaggacgaggctgagtcccatactctgacctatccacccgagctgtggtatagaaaaatttgtggcttcgatgtgctgtacccacccgaaagatacggacatgttctaagcggctggatctgcggcgaggaggccctggtaatggagaaatgtgacgacgaagcagttgcggagatctgcacggagatgctgcggcagttcacgggaaaccctaatatcccgaagccaaggagaatcctacgttctgcctggggctccaatccttattttagggggagctactcctatacgcaggtgggttcctccggggctgacgtggagaagctggccaagcccctgccttataccgagagctcaaaaaccgcacccatgcaggttttgttctctggggaggccacacaccgaaagtactactcaactacccatggggcactgctatctggccaacgcgaagccgcacgccttattgaaatgtatagggatttgttccagcagggcacatag

SEQ ID NO: 27840 - DNA, 3153 bp, synthetic construct
  source 1..3153: mol_type = other DNA; note = Synthetic coding sequence
atggcgctctacgatgaggatttgctgaaaaatcctttctatctggcattgcagaagtgtaggccagacttatgttctaaggtagcccaaatccacggcatcgtcttggttccttgcaaaggatccttgtcttcttctatccagagcacatgccagttcgagtcttatattcttataccagtcgaagagcattttcagaccctcaatggaaaagatgtgtttatacaaggaaatcgcatcaagctcggcgctggatttgcatgtttgctctccgtccccatcctcttcgaggaaactttctacaacgagaaagaggagtcattcagcatcctctgtattgcccacccattggagaaacgggaaagtagcgaagagccactggctccatcagaccccttcagcttgaaaacgatcgaagacgttcgagaatttttgggcagacactccgaacgatttgataggaacatagcatcattccaccgcaccttcagagaatgtgagcgcaaaagccttaggcaccatatcgacagtgcaaatgctctttacactaagtgcctgcagcaattactgcgcgatagtcacttgaaaatgcttgccaagcaagaggcacaaatgaatctcatgaagcaggctgtggaaatctacgtgcaccacgagatatataacctgatttttaagtatgtcggaacaatggaagcttccgaggacgcagccttcaacaagattactcggtccctgcaggatttgcaacaaaaagatataggcgtgaagcctgaattctctttcaacatcccgagggctaaacgcgagttagctcaactcaacaagtgcacttccccccagcagaagttagtctgtctgcgcaaggttgtccagcttattactcagtcaccgtcccagagagtgaatctcgagactatgtgcgccgacgatctgctgtcagtgctgctgtatctgctcgtcaaaaccgagattccaaactggatggcgaacctcagctatatcaagaactttcggttttcaagcctagcaaaagacgagctggggtattgtttgacgtcgtttgaggctgccatcgagtacatccggcaaggctctctgtctgccaaacccccagagtccgagggctttggggatagattatttctgaagcagaggatgtctcttctttcccaaatgacttctagccccacggactgcctgtttaagcacatcgcctccggaaaccagaaagaggtcgaacggctcctgtcccaggaggatcacgataaagatacggtgcagaaaatgtgccaccctctgtgcttttgcgatgactgtgagaaactggtgagcgggaggctaaacgacccatcagtcgtcacacctttttcaagggacgaccgcggtcatactcctctgcatgtggccgcagtgtgcggccaggctagtctgatagaccttcttgtgagtaaaggggcaatggttaatgctactgactaccacggggcaacacccctccacttggcatgccagaagggctatcagagtgtcactctcctgttgctccactataaagcctcagccgaggtgcaagataataatgggaatacacccctgcacctggcatgtacctatgggcacgaggactgcgttaaagcgctcgtctactacgatgtcgagagctgtcggctcgatatcggaaacgagaaaggggatactcctcttcatatcgccgcacggtggggctaccagggcgtgattgaaacactgctccagaacggggcttccaccgaaatccagaatcgtcttaaggagaccccactcaaatgcgctctgaacagcaaaatcctaagcgtcatggaagcctaccacctctcattcgagcgcaggcagaaatcttctgaggctcctgtacaatccccccaacggtcagtggactctattagtcaggagtccagtactagttcctttagctccatgagcgcctcttcccggcaggaggagactaagaaggactacagagaggtggagaagctgctgcgcgcagtagctgatggggacctcgagatggttcgatatctgctcgagtggacagaggaagaccttgaagatgccgaggacacagtttcagccgctgacccagaattctgtcatcctctctgtcagtgcccaaaatgtgccccagcacagaaacggctggcaaaggtgccagcaagcggtctgggggtgaacgtgacaagccaggacggttcttccccactgcacgtggccgcattgcacgggagagcggatcttatccctctgctgctcaaacatggggctaatgccggagccagaaatgccgaccaggctgttccgctccatctggcttgtcagcaaggccatttccaggtggtgaaatgtttgctggatagtaatgccaagccaaataagaaggacttgtctggaaacaccccgcttatctacgcatgcagtggcggacaccacgaacttgtggcccttcttctgcagcacggagcctctattaacgcctcaaacaataagggcaatactgcactgcatgaggcggtgatcgagaagcatgtcttcgtggtggaacttttactcctgcacggagcttccgttcaggtcctaaacaagcgacagcgaaccgccgtggactgcgctgagcagaatagtaagatcatggagttacttcaggtggtaccaagttgcgtggccagcctcgacgatgtggcagaaacagacaggaaggaatatgtgactgtaaaaatacgaaaaaaatggaactccaaactgtacgatctgccagacgagcccttcacacggcagttctactttgtgcatagcgccggtcagtttaaaggtaagacaagtagggaaattatggccagagacagatcagtgcccaaccttaccgaaggatctctacatgagcccggacggcagtcagtgacattacggcagaataaccttccggctcagtcgggttctcatgccgcagaaaagggtaactctgattggccagaaaggcctgggctgacacagacgggaccagggcaccgtcgaatgctccgcagacacaccgtcgaggacgcggtagtaagccagggcccagaggccgctggaccgctatccacgccccaggaggtgagcgcttcacgcagttag

SEQ ID NO: 27841 - DNA, 1662 bp, synthetic construct
  source 1..1662: mol_type = other DNA; note = Synthetic coding sequence
atggatgtagataaagagctgggcatggagtccgtgaaagccggtgcttccggtaaacccgagatgcgattgggcacacaggaagagacaagtgaaggtgacgccaacgagtcgtcactgctggtgctttctagtaatgttcctctgttagccttagagttcctggagatcgctcaagcaaaggaaaaagcctttcttccgatggtgtcacacactttccacatgcggaccgaggagtctgacgcctcccaggagggagatgacttgccaaaatcttccgcgaatacatcccatccgaagcaggatgactcacccaaatccagcgaggaaacgatccaacccaaagaaggagatatccctaaggcgccagaagagaccatacaatccaagaaggaagatttgcccaagagctctgaaaaagccatacagccaaaagaatccaacatccctaagagctctgccaagcctattcaacccaaactcgggaatatccctaaagcctctgttaaaccctcccaaccaaaagagggagacatccccaaagcacctgaagaaacaatccaaagcaagaaggaggatctcccaaaaagtagtgaggaggccattcagccaaaggagggcgacatacctaaatcttccgctaagccgatccagccgaaactggggaacattgcaaagacctcagtaaaacccagccaacccaaggaatccgacatccccaagagccctgaagagacaattcagccgaaggagggggatatccccaaaagttctgcaaagcctatccaaccaaagttgggaaatataccaaaggcatcagtaaagccctctcagcctaaagagggggatatttctaagtctcccgaggaggccatccagcctaaagaaggggacctccctaaatctttagaagaggccattcagccaaaagagggggacattcctaagtcccccgaagaagcaatccagccaaaagaaggcgacattccaaagtccctggaggaggcgatccagccaaaggaaggtgatattcctaaatcaccggaagaaacaatacagccgaaaaagggcgacattcccaagagtcctgaggaggctattcagccaaaggaaggcgatatcccaaagagtcccaagcaggcaatacagcctaaggaaggagacattccgaagagcctagaagaggcgattcctcccaaggaaatcgacatccctaagtctcctgaggagacaatccaacccaaggaagacgattcaccaaagtctctcgaggaggcgaccccatctaaggagggagatatcctgaagcctgaagaggaaacaatggaatttcctgagggggacaaggtgaaagtaatcttgtccaaggaggactttgaggcaagtctaaaagaagccggagaacgcctagtggcagtggacttctccgcaacttggtgtggtccttgtcgtacgatccgtcccttttttcacgcattgtccgtgaaacacgaggacgtcgtattcctggaggtagatgccgacaactgcgaagaggtggtgcgagagtgcgctatcatgtgtgttcccacattccagttctataagaaagaggagaaggtggatgagttgtgcggggctctgaaggaaaagctggaagcagtgattgcagaactcaagtag

SEQ ID NO: 27842 - DNA, 2268 bp, synthetic construct
  source 1..2268: mol_type = other DNA; note = Synthetic coding sequence
atggtgtcccacgggagctctccctccctcctggaggcactctcgagtgacttcttggcctgtaaaatctgccttgaacaactcagggcacctaagactctcccgtgcctgcacacctactgtcaggattgcctggcccagctggccgacgggggtcgggttcgttgcccggagtgcagagaaactgttcctgtgccccctgagggtgtagcttctttcaagacaaacttttttgtcaatgggctccttgatctggtgaaagcgagagcatgtggggatttacgcgctggaaaaccagcttgtgccctctgccccctcgtggggggaactagcacaggtggccctgccacggcgagatgtcttgactgcgcagacgatctctgccaggcctgtgcagatggccaccggtgtacacgacaaacacacactcaccgggtggtggaccttgtcggctaccgcgctggctggtatgacgaggaggccagagaacggcaggctgcgcaatgtccccagcaccctggtgaggctctgcgtttcctgtgtcagccatgctcccagcttctatgccgcgaatgcagactggacccacacctggaccacccctgcctacctctggctgaggcagtcagagccagaaggcctggcctagaggggctgcttgccggagtcgataacaatctggtagaactcgaggcagcacggagagtagaaaaggaggcccttgctcggctcagggagcaagctgccagggtaggaacccaagtcgaggaggcagccgaaggcgtactccgagccctcttagctcaaaagcaggaagtgctgggtcagctcagggcccacgtggaagccgctgaagaggctgccagggaacgtctggccgagctggagggacgagaacaggtggcccgagctgctgccgcttttgccaggcgcgtcctatccctggggagagaggccgagatcctttccttggagggtgcaattgcacagaggcttcgccagctgcaaggctgtccctgggcacctggcccagctccatgcctgcttcctcagctggaactgcaccccggtctcttagacaaaaactgtcatctcctgaggctgtcttttgaagaacagcaaccccaaaaggacggaggcaaggacggtgccggaacacagggtggggaagagagccagtcaagaagggaagacgagccaaaaacagaaaggcaagggggagttcagccacaggcaggtgacggcgctcaaacacccaaggaggagaaggcacaaacaacccgcgaagagggtgctcagactctagaggaggaccgggctcagacgccacacgaagacggcggaccccaaccccatagaggaggcaggccaaacaaaaagaaaaagtttaaggggaggctgaagtcaattagtcgggagccgtcccctgccctcggtcctaaccttgatggatccgggttgctccccagacccatattctattgtagctttcctaccagaatgccgggagacaaacgcagcccgaggatcacgggattgtgccctttcgggccacgtgagatcctcgtggcagatgagcaaaatcgggctttgaagcggttctcactgaacggcgactataaaggcaccgtgcctgtgcctgagggatgttcaccttgtagtgtcgccgcattgcagtcggccgtggccttttctgcctcagcccgactttacctaataaatcctaacggagaagtgcagtggcgccgagcgctcagcctctcccaggccagccacgctgtggccgctctgccctcaggggaccgcgtcgccgtaagcgttgccggtcacgtagaggtctacaacatggagggctctctggcaacaagatttatcccaggcggaaaggcaagccggggactgagggccctcgttttcctcactaccagcccacagggacactttgttggttcagactggcaacagaacagtgttgtcatttgcgatggtctgggccaggtagtgggggaatataaggggcctgggctccatggatgccaaccagggagcgtgtcagtggataagaaaggctacatctttcttacattgagggaggtgaacaaagtggtaattctggatcccaaagggtctttgttgggggactttttgaccgcttatcatggattggagaagccgagggtcaccacaatggttgatggcagatacttggtggtgagcctcagtaacggtaccattcatatattcagggtgaggtctcccgattcttag

SEQ ID NO: 27843 - DNA, 1467 bp, synthetic construct
  source 1..1467: mol_type = other DNA; note = Synthetic coding sequence
atggccgctggcagcgaggccacaaccccagtcattgtggctgccggagccggaggagaagaaggtgaacatgtgaaaccttttaagcctgaaaaggcgaaagagatcattatgagtctgcagcagcccgcaatattttgtaacatggtgtttgactggcccgctagacattggaacgcaaaatatctgtcccaagtgctgcatgggaagcaaatacggtttaggatgggaatgaagagcatgagcacagtgccgcagttcgagacaacgtgcaattacgtagaagccaccctcgaagagtttctgacgtggaactgcgatcaatctagtatcagcgggccatttagagattatgaccactcgaagttctgggcctatgcagactacaaatacttcgtttctttgttcgaagacaaaaccgacctgtttcaggacgtgaagtggagcgatttcggatttccgggtaggaacggtcaggaatccaccctgtggataggatcgctcggggctcacaccccatgtcaccttgacagttatgggtgcaacttagtttttcaggtgcagggtcgcaaaaggtggcacctgtttccccctgaggatacgccgtttctgtacccgacgcgcattccctacgaggagtcgagcgttttttcaaaaattaacgtggtgaaccccgatcttaaacggtttcctcagttcaggaaggcccagagacatgccgtcacgctctctccgggacaggtcctcttcgtcccacgccattggtggcactatgtggagagcattgaccccgtgacagtgagcattaactcctggattgaactcgaagaggaccacctggctcgggttgaggaggcaatcacccggatgctggtgtgcgctcttaaaactgcggagaatcctcagaatacgagggcttggctgaatccaaccgaggttgaagaaacttcccacgccgttaactgctgctacttgaatgccgctgtgtctgcattcttcgacaggtgccgcacaagcgaagttgtggagattcaagccctgaggacagacggtgagcacatgaaaaaagaagaactgaacgtgtgcaaccatatggaggtcggacagacaggcagtcagaatctgacaacgggcacggataagcctgaggctgcctccccctttgggcctgatctcgttcctgtggcccagcgatctgaagaaccgccaagcgaaagaggtggcatctttgggtccgacggaaaagatttcgtggataaagacggcgagcacttcggtaagctgcactgcgctaagagacagcagattatgtctaattctgagaatgccattgaggagcagattgcatccaacacaaccactaccccccaaactttcatatcgacagatgacttgctcgattgtctggtcaatcctcaagtgaccaggatcgtagcccagctccttatccagggccgatctttgtag

SEQ ID NO: 27844 - DNA, 579 bp, synthetic construct
  source 1..579: mol_type = other DNA; note = Synthetic coding sequence
atggctcctaaaccgggagctgaatggtcaactgccctgagccatctggtgttaggcgttgtcagcctccatgctgccgtgtccacagccgaggccagtaggggggctgccgctgggttcctgctgcaggtcctggctgcgactactacgcttgcacccggattgagcacacacgaggactgtcttgccggtgcatgggtcgccacggtcatcggcctccctttgctcgctttcgactttcattgggtgaacggggacagaagctccgccaatctgcttctcggtgggggaatggtgcttgccgtggcaggaggtcatctgggccctgagggacggtctgtcgccggacaggcaatgctgctcgtcgtagcggtgaccatcctcatcgtggcagtttttacggctaatacttatggtatgtggggcggagcaatgctaggcgtagcaggtctgctgtcacggctggaggaagacagattgctgctgctgcctaaagaggacgtgtgtaggtgggccctggcggtgggctcatgggcttattgcagagcgcttcatacacagcgtctacaatgggagtag

SEQ ID NO: 27845 - DNA, 462 bp, synthetic construct
  source 1..462: mol_type = other DNA; note = Synthetic coding sequence
atgacctctgagtccacctcaccccctgtggtgccgcctctccattctccaaagtctcctgtctggccaacattcccatttcatcgcgagggcagtcgagtgtgggagagaggaggtgtgccacccagggatttgccttcacccctgccaacaaaacggactaggacatactccgcaacagccagggcatcagcaggacccgtattcaaaggggtatgtaaacagttctcaagatcccaaggccatggcttcattactccagaaaacggttccgaagacattttcgtccacgtgtccgacatagaaggcgaatatgtgccagttgagggcgatgaagtgacgtataaaatgtgtcctatcccccctaagaaccaaaagttccaggccgtcgaagtcgtactgacacagctggccccacacaccccccacgaaacttggagtggccaggttgtggggtcctag

SEQ ID NO: 27846 - DNA, 537 bp, synthetic construct
  source 1..537: mol_type = other DNA; note = Synthetic coding sequence
atgagcagcttctcccgggctccacagcaatgggccacttttgctcgaatctggtacttactagatggtaaaatgcaacctccgggtaagctcgctgccatggcgtctatccgtctgcagggcctacataaacctgtttatcacgccctgagcgattgcggggatcacgtcgttatcatgaacacaagacacatagctttcagtggcaacaagtgggagcagaaggtatactctagccatacaggatatcctggtggatttagacaggtgactgctgcgcagctgcaccttcgagatcctgtagcaatcgtcaaacttgcaatttacgggatgctgcccaagaacctccacagaaggactatgatggagagactgcatctgttccccgacgagtacattccagaggacatacttaaaaacctggtggaagaactcccacagcccaggaaaatccccaagcgcctcgatgagtacacacaggaggaaatcgacgcctttccacggctttggactccccctgaggactatagattatag

SEQ ID NO: 27847 - DNA, 8763 bp, synthetic construct
  source 1..8763: mol_type = other DNA; note = Synthetic coding sequence
atgagaggcaggaggggtcggccacccaaacagccggcagcgccagctgccgagagatgtgccccagctccaccaccccctcccccacctcccacaagcggcccaataggcggtctacgatctcgacaccgaggcagttctcggggacgatgggccgcagcccaagccgaagttgcccctaagacaagactatcctctccacgcggaggcagctctagtagaagaaaacccccacctccgccacctgcccctccgtctacttcagcaccaggacggggaggcagaggtggagggggtgggaggactggtggaggagggggaggtggtcacctggcaaggacaacggctgcgcgtagagctgttaataaagtcgtctacgatgatcacgaatcagaggaagaagaagaagaggaagacatggtgagtgaggaggaggaagaagaggacggtgacgcggaggagactcaggattccgaggatgacgaagaggatgaaatggaagaggacgacgacgactcagactacccagaagaaatggaggatgatgacgacgacgccagttactgtacagagtcttcttttaggtcccattctacttactcttcaacacccggacggaggaaaccccgtgtgcatcgacctcgttctccaattctggaggagaaggatatccccccactggaattcccaaagtcatctgaggacctcatggtccctaacgaacatatcatgaatgtcattgctatctacgaagtcttacggaattttggaacagtgctcagacttagcccgttccggttcgaggatttttgcgccgcactcgtgtcccaggagcagtgtaccctgatggcagagatgcacgtggtgcttctgaaagctgtgctacgggaggaagatacatctaacacaactttcgggccagccgaccttaaggactccgtcaattccacattgtacttcatcgatggaatgacttggcctgaagtgctccgggtatattgtgagagtgacaaagaatatcaccatgtcctgccataccaggaggccgaagactatccttacggtcctgtggagaataagattaaggttctgcaattcctggtcgatcagttccttaccactaatatcgcgagggaggaattaatgagtgagggcgtgatccagtatgatgatcactgccgagtctgccataagcttggggatctgctgtgttgtgagacctgcagtgcagtctatcacttggagtgcgtgaagccccctttggaagaagtcccggaggatgagtggcagtgtgaggtatgcgtcgcccacaaagtcccaggcgtcacagactgtgtagccgagatccaaaagaataaaccctacattcgccatgagccaattggttacgatcgctctaggagaaagtactggtttctgaaccggcgtctgataatagaggaggacacggaaaacgagaacgagaagaaaatttggtactactctaccaaggtccaactagcggagcttattgactgcctcgataaggattattgggaggccgaactttgcaagattctggaagagatgcgtgaggaaattcaccgtcatatggacataacggaagatctgactaacaaggccagaggttccaataaatcattcctggcagccgctaacgaagaaatactggagtccatccgcgcaaagaaaggcgacatcgacaacgtaaagtcaccggaagaaaccgagaaggacaaaaacgagactgaaaatgactctaaagacgccgaaaagaacagggaggagttcgaggaccagtcactcgagaaagactccgatgacaaaacccctgatgacgaccccgagcaaggaaaatccgaagtgggcgatttcaagtccgagaaatccaacggggagctttccgaaagcccgggagcgggtaagggcgcatccggttcaacccgcattatcactcgcctgcggaatccagatagcaagctttcacagcttaagagccagcaggtggccgcagcagcgcacgaagctaataaactgttcaaggaagggaaggaagtattggtggtcaactcccaaggtgagatctcgaggctgtcaactaaaaaggaggtgatcatgaagggtaacattaataattacttcaagctgggccaggaggggaaataccgcgtttaccacaatcagtattctactaattctttcgcattgaataaacatcagcacagggaagatcatgacaaacggcgacatttggctcacaagttttgcctgacacccgcaggtgagtttaaatggaatggctctgtccatggctctaaagttctaactatcagtactctgagactcacaattacccagctggaaaacaacatacccagctcattccttcacccaaactgggcatcacaccgcgctaattggattaaggcagtgcaaatgtgctccaagccacgcgaatttgctctagctctggccattctcgagtgcgccgtgaaaccagtggtgatgctccctatctggcgagagagcttggggcacacccggctacatcggatgacgtcaatcgaaagggaagaaaaggagaaggtgaagaagaaggaaaaaaaacaggaggaagaagaaactatgcagcaggcaacctgggtgaaatatacgttcccggttaaacaccaagtttggaagcaaaaaggggaagaatatcgggtgacggggtacggcggatggtcatggatcagcaagacccatgtgtatcggtttgttcctaaactccccggtaacacaaatgtgaattacaggaagagcctggaaggaacgaaaaacaatatggacgaaaatatggacgaaagcgacaaaagaaagtgttcccggagtcctaagaagatcaaaatcgagcctgatagtgaaaaagatgaagtcaaaggctccgacgccgcaaaaggggcagaccagaatgaaatggatatatctaaaattactgagaagaaggaccaggatgtaaaggagcttttggactctgatagcgataagccgtgtaaggaggaacctatggaagttgatgacgacatgaaaacagaatcccatgttaactgccaagagagctcccaggtagacgtcgtgaatgtctctgagggcttccacttaagaacatcctacaagaaaaagaccaaatctagtaagctggacggcctgctagagcgtagaataaaacagtttacactggaggagaagcagcggttagagaagatcaaacttgagggtggaatcaagggaatcggcaaaacaagcacaaactcatctaagaatttaagcgagagtccggttataaccaaggcaaaggaaggctgtcagagtgacagtatgcggcaggaacagtcacccaacgcgaacaacgaccagccagaggatcttatacagggttgctccgaaagcgattcctcagtactcagaatgtcagatccaagtcacaccactaacaaactgtacccaaaggacagagtgctggacgatgtctctattagatcccctgagactaagtgccctaaacaaaattcgatcgagaacgacattgaggagaaagtgtccgatctggcatccagaggccaggaacccagcaaaagcaaaacaaaggggaacgatttctttatcgacgattcaaaactggcgtctgctgacgatatcggtactctgatttgcaagaacaaaaagcccctgatccaggaagagtctgacactatcgtgtcctccagcaaatccgccctccattcctcggtgcctaagagtaccaacgatagagatgccacccctctgagtcgcgcaatggatttcgaggggaagctggggtgcgatagcgagagtaactcgaccctcgagaactctagtgacacggtatccattcaggacagcagtgaagaagatatgatagtacagaattcaaacgaaagcatcagtgagcaattccgtacccgggagcaggacgttgaggttctggagcctttaaaatgcgagctggtgtccggcgagtccaccggaaactgcgaggaccggctgccggtgaagggcacagaggctaacgggaagaaacctagtcagcaaaagaagttggaggagcggccagtcaacaagtgttctgaccagatcaaacttaagaacactactgacaagaagaataacgaaaacagggaatccgaaaaaaaaggccagagaacttccactttccaaatcaacggtaaagataacaaaccaaaaatttacctgaaaggtgaatgccttaaagaaatttccgagagccgagtagtttccggtaatgtcgagccaaaagtaaacaacatcaataaaattattcctgagaacgacatcaagtccctgacagttaaagaaagtgcaattaggccctttataaacggcgacgtgatcatggaagactttaatgagcgaaatagttcggaaactaagtcgcacctcttatcatcctccgacgccgagggtaactaccgcgatagcctagagacactgccttcaactaaggaatcagattctacccaaacaaccactccaagtgcatcatgcccagagagtaatagtgtaaatcaggtcgaagacatggagatcgagaccagcgaagtaaagaaggtgacaagttctcccattacttctgaagaggaatccaatctctctaacgacttcatcgacgaaaacggactacccattaataaaaacgagaatgtcaacggtgagtcaaaaaggaaaactgtcatcaccgaagtgaccacaatgactagcactgtggccacagagtcaaagactgtcataaaagtagagaagggcgataaacagacggtggtgagtagcactgaaaattgcgcaaaatctacagtgacaaccactaccaccactgtgacgaaactcagtacgccttcaaccggaggcagcgttgatattataagtgtgaaggaacagagtaagaccgtggtgaccactaccgtcacagatagtctcaccacaactgggggaaccctggttacctccatgactgtgtccaaggaatattccacccgggacaaggtcaaactgatgaaattctcgagaccaaagaagacccggtccggtactgcactgcctagctaccgcaaatttgtaactaaaagttctaagaaaagcatttttgtactgcccaatgatgacctgaagaaactcgccagaaaggggggaatccgggaggtgccctatttcaattacaacgctaagcccgctctggacatctggccctatccatccccgagacccactttcggaatcacatggagatatcggttacagacggtgaagtccctggctggtgtgtcactgatgctacggctgttgtgggcttctctgcggtgggacgacatggcagctaaagcaccaccaggcggtggcaccacgcggaccgagacatccgaaaccgagatcaccactacagaaataatcaaacggagagacgtgggcccatacggtataagatctgagtattgtatccggaaaatcatttgccccatcggggtgccagagacccccaaagaaacaccaaccccgcagcgaaaagggctgcgatcatccgcgctgcgcccaaaaaggccagaaacccccaagcagacagggcctgtcattattgagacatgggtagcagaagaggagctggagttgtgggagatacgggctttcgctgaaagggtggaaaaagagaaggcgcaggcagtagagcagcaggccaaaaagaggctggagcagcagaaacccactgtcatcgccacctctaccacttccccgacatcctcaactacctcaacaatatcccccgcacagaaagtcatggtggctcctatttctggctctgtcacaactgggaccaaaatggtccttactactaaggtcggctcacccgctacagtgactttccagcagaataaaaacttccaccagacgttcgccacttgggtcaaacagggtcagtcaaactctggagtggtgcaggtgcagcaaaaagtactggggattatcccctcctcaaccgggaccagccaacaaaccttcacctctttccagccgcgaacggccaccgtgacaatccgcccaaatacctctggcagtgggggaactactagcaatagtcaggtcattacaggccctcagattaggcctggaatgacagtcatcaggactccactacagcaaagtacactggggaaggcaatcattaggaccccagtgatggtgcagccaggagcgccacagcaggttatgactcaaattatccgcggacaaccagtgtccaccgctgtttctgcacctaacacagtatcttctaccccagggcagaaatctctcactagcgccaccagcacttccaacattcagtcttcagccagtcagcctcccagacctcagcagggacaggtaaaacttactatggcccagctgacacagctgacacagggccacggcggtaatcaaggcttaactgtcgttattcaaggacagggacagacgaccggacagcttcagctcatccctcagggcgtaacagttctgccgggtcctggccagcaactgatgcaggccgctatgcccaatggcactgtgcagcgcttcctatttacgccactggcgactacagcaacaacagcatcaacgaccacgactacagtaagcaccactgctgccggtaccggggagcaaaggcaaagcaagctatccccacagatgcaagtccaccaggacaagactttacccccagctcaatcatctagcgttgggcctgcggaagctcagccacagaccgcacaacccagtgcccagccacaacctcagacccagccccagagcccggcacaacccgaagtgcaaactcagcccgaggtgcaaacacagacaacggtaagcagtcacgttccgagcgaagcccagcctacacatgcacagtcttccaaaccccaggtagccgcacaatcacagccacagagcaacgtccaaggccagtcaccagtgagagtgcaatccccctcccaaacgcgaatcaggccgagcacccccagtcaactgagccctggacagcagagccaggtgcagaccacaacaagtcagcccatcccaattcagcctcatacctccctccagatccctagtcaggggcagcctcagagccagccccaggtgcagagttctacacaaactctgtccagcgggcaaaccctgaaccaagtgaccgtttctagtccgtctcgaccccaactgcaaattcagcagccccaacctcaagtgatcgctgtgccccagctacagcagcaggtgcaggtactgtctcagattcagagccaggttgtggcccagattcaggctcagcaatctggcgtccctcagcaaataaagctgcagcttcccatccaaatccagcagtctagcgccgtacagactcaccagatccagaacgtggtaaccgttcaagccgcatcagttcaggagcagctccagcgggtccaacaactgagggaccagcagcaaaaaaagaaacagcagcagattgagattaaacgagaacacaccctgcaggctagtaatcaaagtgaaattatccagaagcaggtagttatgaaacacaacgccgtaattgagcacttgaaacagaaaaaaagcatgactcccgcagagcgggaagagaatcaaagaatgatcgtgtgcaatcaggtgatgaagtacatcttggacaagatcgacaaggaggagaaacaggcagccaagaaacgtaaaagggaggagtctgtggagcagaaacgctccaagcagaacgccaccaagctgagcgccctcctcttcaagcacaaggagcagctcagagcagaaatactcaagaagcgggctttgctggacaaggacctgcagattgaggttcaggaggaactcaagagggatcttaaaatcaagaaggagaaagatctcatgcagctggctcaagctactgctgtcgccgcaccatgtcccccagtgacccctgcaccgccagccccaccggctccccctccaagtccacctcccccacccgcagtgcagcatactggcttgctcagcactcccactcttcccgctgcaagccaaaaaaggaaaagagaggaggagaaggattcgtcgtcgaagagtaaaaagaagaagatgattagcacaacaagtaaagaaactaagaaggacaccaaactttactgcatctgcaaaaccccttacgacgaaagcaagttttatatcggttgcgaccgatgtcagaattggtatcacggccgttgcgttggtatcctgcagagcgaagcggagctaatagatgagtatgtttgtcctcagtgccaaagcacagaggacgccatgacagttttgactcccttaacagaaaaagactatgaaggacttaagcgtgttctccgcagcctccaggcacacaagatggcctggccctttctcgagcctgttgacccaaatgatgcaccagattactacggggtgattaaagagccgatggaccttgccactatggaggagagggtgcagcgccgttattatgagaagctcactgagttcgtggcagacatgacaaagatattcgataattgtcgatactacaatcccagcgatagtcctttctaccagtgcgcagaggtactggaatcattttttgtccagaaactgaagggcttcaaggcatctagatcacacaacaacaaattgcagtctactgcctcgtaa

SEQ ID NO: 27848 - DNA, 390 bp, synthetic construct
  source 1..390: mol_type = other DNA; note = Synthetic coding sequence
atggctgacccaagagtgcgacagattaagatcaaaactggcgtcgtcaaacggttggtgaaagagaaagtgatgtacgaaaaggaagccaagcagcaggaagaaaagattgaaaaaatgagagccgaggacggggagaactacgacatcaaaaaacaggccgagatcttgcaggaaagtcggatgatgatacctgactgccagcggcgactcgaggccgcttacttggacctgcagaggatcttggtgagtaaggacttttgtgtgatgttcaagttttttttcagcattcaatacatggagtcacaaaagttcaagtaccttacccttaggacctcatggcagtactttctgttcacgtgtcccttgtacaggtatatcctcaagtag

SEQ ID NO: 27849 - DNA, 582 bp, synthetic construct
  source 1..582: mol_type = other DNA; note = Synthetic coding sequence
atgagcgacgacgatagcagagctagcaccagttccagctcatctagctcctccaatcagcaaactgaaaaggaaaccaacacccctaaaaaaaaggagtctaaagtgagtatgtccaagaatagcaagctgctgagcacaagtgctaaacggatacagaaggagttggccgacattacgctggacccccctccgaattgcagcgcgggtcccaaaggcgataacatttatgagtggcggtccacaatcctcggcccacctgggtccgtgtatgagggcggtgtattctttctggacattaccttcactccagagtaccccttcaaacctcctaaagttacattccgcacgcggatttaccactgcaatattaattctcaaggcgtgatttgtctcgacattcttaaagataattggtcccctgccctgacgatttctaaagtgctgttatccatttgcagcctcctcacggactgcaatcctgctgatccgctcgtggggtctatagctacccagtatatgacaaacagggctgagcatgacaggatggcgaggcagtggacaaaaagatacgccacatag

SEQ ID NO: 27850 - DNA, 1395 bp, synthetic construct
  source 1..1395: mol_type = other DNA; note = Synthetic coding sequence
atgagtcttcagttttctaatggatctcggcacgtgtgtctgagaagtggagctggaagcgtcagaccactcaatggcggagccggattcgctggctccagcgcatgtgggggaagtgtggctggtagcgagttctcctgtgccctgggtgggggactgggatctgtccccggaggaagccacgcaggcggtgccctcgggaatgccgcatgcatcggcttcgccggttccgagggcggtctcctgtctgggaacgaaaaagtgacaatgcagaacttgaatgacagactggctagctacctcgataacgttcgggctttggaggaagccaacgccgagctagaaaggaaaataaagggttggtacgaaaaatatggccctgggtcttgtaggggcctggaccatgactattcccgttatcacctcactattgaggatctgaaaaacaagattatctccagtacgacaactaatgccaatgtaattctgcagatagataacgccagactggctgccgatgactttagactgaagtacgagaatgaactaacgctgcaccagaatgttgaggctgacatcaatggactccgcagagtgttggacgagctcactctctgccgaacagaccaagagctgcaatatgagtctctgtccgaggagatgacctacctgaaaaaaaatcatgaggaagaaatgaaagctctccagtgtgcggcaggcggaaacgtgaatgtggagatgaacgcagctccaggggtggacttggccgtcctactgaacaacatgcgggcagagtacgaagcactggctgaacagaatcggaaggacgcagaggcctggtttaacgagaagagtgctagtctgcagcagcagatttcacacgatagcggagctgccaccttcgctcggtcccaactaacagaaatgcgcaggaccctccaaactctcgagatacagttgcaatcactgatggcaactaagcatagcctggagtgcagcctcaccgagactgagtccaactactgcactcagttagcccagatccaagcgcagattggagctttggaggaacaacttcaccaggtgcgcaccgagaccgaaggccagaagctggagtatgagcacctgctagatgttaaggtgcatcttgaaaaagagattgaaacctactgcagactaattgacggagatgggaactcttgttcgaagagcaaagggtttgggagtggctctccagggaattcctccaaagacctaagcaagacgaccttggtgaaaactgtcgtggaagaactcgatcagcgtggcaaggtattaagcagtaggattcactctatagaagaaaagacctctaaaatgacaaacggcaagacggagcaacgtgtgcctttttag

SEQ ID NO: 27851 - DNA, 2013 bp, synthetic construct
  source 1..2013: mol_type = other DNA; note = Synthetic coding sequence
atggaagagtttcggagatcatattctcgactttgtcgggagagcggcgctgagccgcaggaagcagtgctgcagcagcttcatcaattaccgcgagggagactggatttagcaactcagagtctgaccgtggaaacttgccgagcgcttggaaagttgctccctagagaaactctgtgtaccgagctcgtactgtcggactgtatgttgagcgaggaaggagccacacttctgctaagaggcctgtgtgctaacacagttctgcggtttcttgacctaaagggaaacaatctccgggctgccggtgccgaggccttgggaaagctgctgcagcaaaacaagtctatccaatccctaaccctggagtggaacagcctcggcacctgggacgacgctttcgcgactttttgcggtggcctggcagcaaacggcgctctacaacgcttggatctcaggaataaccagattagccacaagggtgctgaggaactggcgctggctctgaagggaaatacaacattgcagcaacttgacctcaggtggaataacgtaggccttctgggcggaagggccctgatgaactgcctaccaagcaataggacactgtggcggttagatctggcaggcaacaatatccccggagatgtgctaagagctgtggagcaggccatgggacacagtcaggataggctgacaacgtttcaggagaatcaggctcgtacgcatgttcttagcaaggaagttcaacacttgagggaggagaaatccaagcagttcctggacttgatggaaacaatcgacaagcagcgggaagagatggcaaagtcttcccgcgcatcagccgcaagggtgggccagcttcaggaggctctaaatgaacgccacagtataattaatgctctcaaagccaaattgcagatgacagaggcagccttggccctcagcgaacagaaggctcaagacctcggtgaattgctcgccacagcagaacaggagcaattgtcgctgtcccaacgtcaggccaaagagctcaagctcgaacagcaggaagcggcagaacgagaaagcaaactcctgcgggatttgagtgccgcaaacgaaaagaatttgctgctgcaaaatcaagtggatgagctggagaggaagttcagatgtcagcaggaacagctgtttcagacccggcaggagatgactagcatgtccgcagaactgaaaatgcgtgccatccaggcggaggagcgcttggatatggagaagagacgttgccgtcaaagcctagaggattccgaaagcctcaggataaaggaggtggagcacatgacaagacacctcgaagagagcgaaaaagccatgcaggaaagagtccagcgcttagaggcagccagactgagcttagaagaagaattaagccgggttaaggctgccgcactgagtgaaaggggtcaggccgaagaagaactaattaaggccaagagccaggcaaggctggaggagcagcaaagactggctcatctcgaagataaattgaggctgcttgcccaggccagagacgaggcccagggggcttgtctgcagcagaagcaggtcgtcgcagaagcacaaactagagtgagccagctcggcctccaggtggagggactgcgcagacgcttagaagaactccaacaggaattatctctcaaggatcaggaaagggtggcagaagtatcacgagtgcgcgtggagctgcaggagcagaatgggcgtttgcaggccgaattggcagctcaagaagccctgcgagaaaaagctgccgctctcgagaggcagttaaaagtgatggcaagtgaccatcgagaggccctgcttgatcgggaaagtgagaacgcatccctacgcgagaaactgaggttaagagaagccgaaattgcacgcatcagggatgaggaggcccaacgagcatcattcctgcagaacgctgttttggcctatgtgcaggcctccccagttagaaccctctctccccctaaatag

SEQ ID NO: 27852 - DNA, 1782 bp, synthetic construct
  source 1..1782: mol_type = other DNA; note = Synthetic coding sequence
atggagcccgctactgcgcctcggccagatatggctcctgaactgacaccagaagaagagcaggctactaagcagtttctcgaagaaataaacaaatggaccgtgcagtacaatgttagtcccctcagctggaatgttgcagtaaagtttctaatggcaaggaagttcgatgtgctaagggccatcgagctgttccactcctatagagaaaccaggcgcaaggagggtattgtgaaactcaagccccacgaagaaccgttacgcagcgagatcttgtcagggaagtttaccatcctaaacgtccgcgaccctaccggggctagtatagctctgtttactgccaggctccaccacccacacaagtccgtgcaacatgtagtcctacaggcactcttctacctgctggatcgtgcagtggattcgttcgaaacacaaagaaacggcctggtctttatctatgacatgtgtggcagcaattacgccaacttcgagcttgacctgggaaagaaagtgttaaacctactgaaaggcgcttttcccgctcgcctcaagaaagtgctgattgtcggcgctccgatctggttcagggtcccatattcaattatctctcttctcctcaaggataaagtgagggaaaggattcagatcctgaaaaccagcgaggtgacacagcacttgcccagagaatgccttccagaaaacctaggcggatatgtcaaaatcgacctggccacttggaatttccagttccttccacaggtgaacggacaccccgatccctttgacgagattatcctattcagccttcctcccgctctggactgggacagtgtgcatgtgcctggtccccatgctatgaccatccaggagctggtcgattatgtgaacgcacgccagaagcaaggcatctacgaggagtatgaggacatccggagggagaaccccgtggggaccttccactgttctatgtctcctggcaacctggagaaaaatcgctatggcgatgttccatgtctggaccagacaagagttaaactgactaagcgctctggacatacccagacagattacataaatgcttcatttatggacgggtataagcaaaaaaacgcttatatcgggacccagggccctctcgaaaacacctaccgcgatttttggttgatggtttgggagcagaaggtcctagtgatcgtgatgaccactagattcgaagaaggaggcagaagaaagtgcggacagtactggcccttggaaaaggattcacgcataaggtttgggtttctgactgtgactaatctcggggtagagaatatgaaccattataaaaaaaccacacttgaaatacacaacaccgaggagagacaaaagaggcaggtcacccattttcaatttctatcctggcctgattacggggtcccaagtagcgccgcatcactgattgattttctaagagtcgttcgaaaccagcagtccctcgcagtgtcgaacatgggtgcacgcagtaaagggcagtgccccgaaccccctatcgttgtgcattgtagcgcaggcatcggaaggacggggactttttgctcattggatatctgcctggcacaactcgaggaactgggaaccctgaatgtcttccaaacagttagccgaatgagaactcagagagctttttcaattcagacccctgaacagtattatttctgttacaaggctatcctggaatttgctgagaaagaaggaatggtttccagcggccagaatctcttggcagtcgaatcccagtag

SEQ ID NO: 27853 - DNA, 1884 bp, synthetic construct
  source 1..1884: mol_type = other DNA; note = Synthetic coding sequence
atggagggattggccggttacgtgtataaggcagcgtccgaaggaaaggtgctcactctcgctgcgttactgcttaaccgttcagagtccgatatccgctacctgttaggctacgtatctcagcaaggcggacaaaggagcactcctttgattattgccgctaggaacggccacgctaaagtggtgaggctgctacttgaacattaccgcgtgcagacccagcagaccggcaccgtaagattcgacggttatgtcattgacggtgccacagctctatggtgtgccgcaggtgcaggccactttgaggtggtgaaactgctggtgtctcacggggcaaatgtgaaccataccacagttactaactccacccctctgagggctgcttgcttcgatgggagactggacattgtaaaatacctagtcgagaacaatgctaatataagtatcgcaaacaaatatgataacacttgcctaatgattgccgcttataaaggacacaccgacgtggttcgttatcttctggaacagagggccgacccaaacgcgaaagcgcattgcggtgccactgccctgcacttcgcggctgaagcaggtcacatcgacatcgtcaaggagttaatcaagtggcgcgcagctatcgttgtcaacggacacggcatgacaccactgaaagtggcagcggagtcctgtaaagccgacgtggtcgagcttctgttgagccatgccgattgcgatagacgcagtcggatcgaggcactagagctgctgggcgcatccttcgctaacgacagagagaactatgacattatcaagacttatcactatctgtacttggccatgctggagcgctttcaggacggagacaatattctcgagaaggaagttcttccacccattcacgcttacgggaataggacagaatgccgcaatcctcaggagctagagagcatacggcaggaccgcgatgcactgcatatggaaggtctcatcgtccgggagaggatcctcggcgctgacaacattgacgtttcccacccaataatctacaggggggcagtatatgcagacaatatggagttcgagcagtgtatcaaactgtggctgcacgctctccatctacggcagaagggcaacaggaacactcacaaggatttgctcagattcgcccaggtgttctcgcagatgattcatcttaacgaaacagtaaaagctcccgatattgagtgcgttctgaggtgcagcgtgttggagatcgagcagtcaatgaatcgcgtgaaaaacatcagtgatgcggatgtccataatgcgatggacaactacgaatgtaacctgtacacatttctttatctcgtttgcatctccaccaaaacccagtgttctgaagaggatcagtgtaaaattaacaagcaaatttataaccttattcacctggaccctagaacccgggagggatttacactcctccaccttgctgttaactcgaacactcctgttgatgattttcacacaaacgatgtgtgctcctttcccaatgcccttgtcaccaagctgctcttggattgtggtgcagaagtgaacgcagtcgataatgagggaaactccgccctgcacattatagtacagtacaatagacccatatctgactttttaactctgcacagcataataataagtctggtcgaagccggtgcgcataccgacatgacgaacaaacagaacaaaacgccattggacaaaagcacgaccggtgtttccgaaattttgctgaaaacacagatgaaaatgtctctgaaatgtctggccgctagagctgtgagagccaacgatatcaactaccaagatcaaattccgaggactcttgaggaattcgtgggcttccactag

SEQ ID NO: 27854 - DNA, 378 bp, synthetic construct
  source 1..378: mol_type = other DNA; note = Synthetic coding sequence
atgcccagcgagaaaacatttaagcagagaagaaccttcgaacagcgcgtcgaggatgtgcgactgattagagagcagcaccccaccaagatccctgtgattattgagcggtacaaaggcgagaagcagctgcctgtgctggacaagaccaagttcctcgtgcctgaccacgtgaacatgagcgaactcatcaagatcatccggaggaggctacagttgaacgcgaatcaggctttctttcttctggtgaatgggcacagcatggtgtcagtgagcacgccgatcagcgaagtctatgaatctgagaaagatgaagacggtttcctctacatggtgtgcgcctcccaggagacttttggaatgaaactctccgtgtag

SEQ ID NO: 27855 - DNA, 3786 bp, synthetic construct
  source 1..3786: mol_type = other DNA; note = Synthetic coding sequence
atggggactggtgatttcatctgcatttccatgaccggcggagccccttgggggtttaggctgcaggggggaaaggaacagaagcagccactgcaggtggctaagattaggaaccagtccaaggccagtggctccggcctgtgtgagggagacgaggtagtatctattaatggaaacccgtgcgccgacctgacctatccagaggtcattaaattaatggagtctataacagattcccttcaaatgctaataaaacgcccatcttcaggaatcagcgaggccttaatttcagagaatgagaataagaaccttgaacacctgacacatgggggttatgtcgagtctaccaccttgcagattcgccctgcaacaaagacccagtgcactgagttttttctcgccccagttaaaaccgaggtgccccttgcagaaaaccagcgatcaggccctgattgcgcaggctccttaaaggaagagacaggccctagctatcaaagagcaccacagatgccagactctcagcggggaagggtggctgaagaactgattctgcgcgagaaagtcgaagccgtgcagcctggtcccgtcgtggaactgcagctgagtctttcccaggagagacacaaaggagcctctggcccattggtggctctccccggtgccgagaaatccaaaagcccagatcctgacccaaatttatctcatgacagaatagtgcatattaatagcataccaaccaacgagaaggccgatccatttttgcgaagcagtaagattattcagattagttcgggccgagagctacgggtgatccaggagagcgaggcgggtgatgcgggactgcctagagtggaagttattctcgactgcagcgatcgacagaagacagaagggtgtagattacaggccggaaaagagtgtgttgactctccagtggagggcggtcaatccgaggccccaccatccctggtgtctttcgccgtctcgtctgagggcaccgagcagggcgaggatccgaggtccgagaaggatcacagccgcccacacaagcatcgggcaaggcacgcgagacttagacgctctgagtcccttagcgaaaagcaggtgaaggaagctaagagtaaatgcaaatccatagctttgctgctcacggatgcaccgaatccaaacagcaagggtgtcctgatgtttaagaagcgaagaagaagggcgcgtaagtacactctggtcagttatggaacaggcgagctagagcgtgaggccgatgaagaagaagaaggggataaggaagatacatgtgaagttgccttcctgggggcatcggagtctgaggtagatgaagagctgttatccgatgtcgacgataatactcaagtggtgaacttcgattgggactcgggtctggtggacatcgagaagaaactcaaccgcggtgacaaaatggagatgcttcctgacaccactgggaaaggcgcactgatgtttgccaaaagacgagaaagaatggaccagataaccgcgcagaaagaggaggacaaagtcggaggcacgcctagccgagaacaggacgctgcacaaactgatggactcaggaccactacgagctaccaaaggaaggaggaggagtcagtgcgtacacagtctagtgtgagtaagtcctatattgaggtctcgcacggcctcggccacgtcccccagcagaatgggttttccggtacgtctgagacagccaacattcagagaatggtacccatgaacaggacagcaaaacccttccccggtagtgtcaaccaaccagccacaccgttctcacctacccgaaacatgacgagtcccatcgccgacttccccgctccaccaccttatagcgccgtgactcctccacccgacgccttcagccgaggcgtgtcttctcctattgctggaccagctcagcctcccccttggccccagccagccccatggtcgcagcccgctttttacgattccagcgagcggattgccagccgagatgaacgcatctccgtgcctgcgaaacggaccggaattctccaagaagctaagcgacgcagtactaccaagcccatgtttacttttaaggaacctaaggtgtcacccaaccctgaactgctgtctctactgcaaaactcagagggcaaaagaggcactggggctgggggtgattctggccctgaggaggactacctgtcgctgggagccgaggcgtgcaatttcatgcaatcatcctcagcaaaacaaaaaacgccaccccctgtagcccctaagcctgcggtgaagagttcctcttcccaaccagtaactccggtgtctccagtgtggtctccgggtgtggcccctacccagcctcccgctttcccaacatccaaccctagcaagggaacagtggtctccagtattaaaattgcccaaccttcttatccacccgcacgtcccgcatcaaccctcaatgtcgccggaccattcaaaggcccacaagctgctgtggcttcacagaactacacgccaaagccaacggtgtccacaccgaccgttaacgctgttcaaccaggcgcagtgggtcctagtaatgaactgcccggaatgtcggggagaggggcacaactattcgccaaacgacagtcccggatggaaaaatacgtggtggactctgataccgtgcaagcacacgcagccagagcacaaagcccaaccccttcactgccggcttcatggaagtatagctcaaatgtcagagcccctcctcctgtggcttacaaccctattcacagcccctcttaccctcttgctgcccttaaatctcagccgagcgctgcccagccgtcaaagatgggaaaaaagaagggaaaaaagcctcttaatgccctggatgtcatgaaacaccaaccgtaccagctgaatgcaagcctgtttacatttcaacctcctgacgcgaaagacggcttaccccagaaaagctctgtgaaagtgaacagtgccctcgccatgaagcaggctctgcctcctagacccgtgaatgcagccagcccaaccaatgtgcaagccagttctgtttatagcgtgccggcatacacgtcccctccctcattctttgctgaggcctcgagtcctgtctctgcctcacccgtccccgtcggtatcccaacctctcctaaacaggaatcagccagctcctcttatttcgtagcacccaggcctaaattctctgccaagaaatccggcgtgacaattcaggagtccggcagatctctgtctcttccgggtcgctcagtgcctccacctatcagcactagcccctgggtctatcagcctacttattcgtactcatctaaacctactgatggtctggaaaaggcaaacaagcgccctaccccctgggaagctgctgccaaaagccctttgggacttgttgatgacgcgtttcagcctcggaatattcaagagtcgatagttgcgaatgtggtgtcggctgctcggagaaaggtgctgcccggtcctcccgaggattggaacgaaaggctcagctacatcccacagacccagaaggcctacatgggaagttgcggcaggcaggagtacaacgtcaccgccaacaataacatgagcacgacatctcagtacggctctcagttaccatatgcctactatcgccaggcttccagaaatgattccgctatcatgtctatggagactagaagcgactactgcctccctgtggctgactacaactataacccacatcctagagggtggcgacggcagacgtag

SEQ ID NO: 27856 - DNA, 1146 bp, synthetic construct
  source 1..1146: mol_type = other DNA; note = Synthetic coding sequence
atgtcatggactgtcccagtcgtgcgtgccagccagagagtgagtagtgtgggggctaactttttatgcctggggatggctctatgtcctagacaggcgactcggatccctttgaatggcacatggctatttacccccgtctccaaaatggctactgtcaagtccgagttgattgagcgattcaccagcgagaagcccgttcatcactcaaaggtgagcattattggaacgggaagtgtgggcatggcatgtgcgatctccattcttctgaagggtctcagcgatgagctggccttagtcgatctggatgaggataagctcaagggagagactatggacttgcagcacggatctcccttcactaaaatgcctaatattgtgtgttcaaaagactattttgtgacggctaactctaaccttgtgataattactgcaggtgctcgacaggagaaaggagagacaagattaaaccttgtgcaacggaatgttgccatctttaagctgatgatctcttctatagttcagtactctcctcattgtaagctcatcatcgtgagtaatcccgtagacatcctgacctacgtggcctggaaactgtccgctttccctaaaaatcgcatcatcggatcgggctgtaacttggacactgcaagatttagattcttgattggccagaagcttggaattcacagtgagagttgccacggctggattttaggagaacacggcgactccagcgtccccgtgtggtctggagtcaacattgccggagtgcccctgaaggacctgaattcagatatcggaactgataaggatccagagcagtggaagaacgtacacaaggaggttaccgccactgcttatgagatcataaagatgaaggggtacacaagctgggcaattggcctctccgtcgcggaccttacagagtccattctcaaaaacctccggaggatccatcctgtttcaaccataatcaaaggcctatacggcattgacgaagaagtgtttctgtccattccttgcatccttggagaaaatggaattactaatttaataaaaattaagttgaccccggaggaagaggcacacctgaaaaagtcggcaaaaaccctctgggagatccagaacaagctgaagctgtag

SEQ ID NO: 27857 - DNA, 861 bp, synthetic construct
  source 1..861: mol_type = other DNA; note = Synthetic coding sequence
atgatggccacacccaaccagacggcctgcaatgccgagagcccagtcgccctggaggaggccaagacatcaggggcacctggatctccacaaacgcctccggaacgccacgactctggagggtcccttccactgacaccaaggatggagagtcactccgaggacgaggatttagccggagctgtgggtggacttgggtggaacagtagatcccctaggactcagagcccgggaggttgctctgccgaagctgttctggcaagaaagaagcaccgaagacgcccatcgaagagaaaacgccactggcggccatacctggagctctcttgggcggagaagcaacagagagatgagagacagagccaaagagcgagtcgggtaagggaggagatgttcgcgaagggacagccagtggctccctacaataccacacagttcttaatgaatgatcgggaccccgaagaacctaacctggacgtaccacatggcatatctcatccgggttccagtggagaatccgaggcaggtgatagtgacggcaggggaagagcccacggagagtttcagagaaaggattttagcgaaacttatgaacgcttccataccgaatccctgcagggaagaagtaaacaggaactggtacgcgattatcttgaactcgaaaaacggctgagccaggccgaagaagagactcgtcggctgcagcagttacaggcttgtaccggacaacagtcttgtaggcaggtggaggagctcgcagcagaggttcagagacttaggacggaaaaccaaagactacgtcaagaaaatcagatgtggaatcgcgagggatgccgctgcgatgaagaacccggtacatag

SEQ ID NO: 27858 - DNA, 1206 bp, synthetic construct
  source 1..1206: mol_type = other DNA; note = Synthetic coding sequence
atggctcacgtaagctcagaaacgcaggatgtatcccctaaagatgaactgacagcttccgaggcttcaacgagatctcctctttgcgaacatactttccctggagacagtgacttgaggagtatgatcgaggagcacgctttccaggtcctgagccagggaagtttactggagagccctagttacaccgtttgtgtgagcgaaccagacaaggatgatgactttctgtccctgaatttccccaggaagctttggaaaattgtggaaagtgatcagttcaagtcaatctcctgggatgagaacggaacctgtatcgtgatcaacgaagagctctttaagaaggaaattctagagactaaggccccttatcggatattccagaccgatgccatcaaatccttcgtgcgtcagctcaacctgtacgggttttccaaaatccagcagaattttcaaagaagtgccttcttagccaccttcctgtccgaggagaaagaatcttccgtcttaagtaagttgaagttttactacaacccaaatttcaagaggggatatcctcaactgctggtaagggtgaagagacggattggagtaaagaacgccagcccaattagcacactgttcaacgaggatttcaacaagaagcacttcagagcgggagccaacatggagaaccataatagcgctctggcagctgaagcgtctgaggagtcactgtttagtgccagtaagaacttgaatatgccgcttacaagggagtctagtgttaggcagatcattgccaattcctcagtgccaatccgctccgggttcccaccaccatcaccaagcacaagtgtcgggccttccgaacagattgcaacagaccagcacgccattttgaaccagcttacaacgatccacatgcacagtcatagtacttatatgcaagcgcgtggccacattgttaattttatcactaccacaacgagccagtaccacattatttcaccactgcagaatggctatttcggtctgacagtggaaccatcggcggtaccaacacggtaccctctggtgagcgttaatgaagccccttacagaaacatgctaccggcaggcaacccatggcttcaaatgcctacaatcgcggataggagcgccgcaccacattctcgtctagctctccaaccgtctcccctggataaataccaccccaactacaactag

SEQ ID NO: 27859 - DNA, 1728 bp, synthetic construct
  source 1..1728: mol_type = other DNA; note = Synthetic coding sequence
atggccatggctccttcaccaagcctggttcaggtgtataccagtccagcagcagttgctgtttgggaatggcaggatggcctcggcacatggcatccctatagcgctactgtatgctcgtttatcgagcagcaattcgtgcagcagaagggccaaagattcggactgggctccctcgcccattctatccctcttggccaggctgacccaagtctggcaccatacatcatagatctgccaagctggacgcagttcagacaggatactggaacgatgcgcgcagttagacggcaccttttccctcaacattccgcgcctggtcgtggcgtggtgtgggagtggttgagcgatgacggaagttggacggcttacgaagcctcggtctgtgactacctcgaacagcaggtcgctagagggaatcagttagtggatctcgccccactcggctataattacactgtgaattacactactcacacccagacaaacaagacctcctctttttgtaggtccgtgcggcgtcaggctggtcctccctaccctgtgacaaccatcatcgcccctcccggtcacacaggggtggcatgctcctgtcatcaatgtctttccggttcgcgtaccggccctgtttctggcagatatcggcacagcatgactaacctgccagcgtatcctgtcccccagcacccccctcaccgcactgcatctgtgttcggaacacaccaagcatttgctccatacaacaagcccagtttatctggcgcacgcagcgcgcctcgcttgaataccacaaacgcctggggcgcagctccgccttcactcggcagccagcctctgtaccggtcttctctaagccacctggggcctcaacacttaccccctggatcaagcacttctggagcagtgagcgcgtctctgccctctggccctagttcgtctccaggtagcgttcctgccacggtccccatgcagatgcctaagcccagtagagtccaacaagccctcgccggtgccacacccaagcccgagcctgagccagaacaggtaattaaaaactacacagaggaacttaaagtgcctcctgatgaggattgcatcatctgcatggagaaactctctacggcctccggctatagtgatgttactgactccaaagcaattggatctctcgcagtgggccacctgactaagtgttcccacgcattccacctcctgtgtctgttggcaatgtactgcaacggtaacaaggacggttctctccagtgcccctcatgcaagaccatttatggggaaaagaccggtactcagccacagggcaagatggaggtgctgcggtttcagatgtctctgcccggacatgaagattgcggcactatcctgatcgtgtacagcatcccgcatggaatccagggaccggagcacccaaatcccggtaaacctttcacagcgcgtgggttcccacggcaatgctacttgcccgataatgctcagggcagaaaagtcctcgagctactcaaggttgcctggaaacggaggctgatttttaccgtgggtacatcctcaaccaccggcgaaacagacacagtggtgtggaatgagatccatcataaaactgagatggatagaaacatcacgggccatgggtacccagatcctaactaccttcaaaatgtgctcgcggaactggcagcacagggcgtgactgaggactgtctcgagcaacagtag

SEQ ID NO: 27860 - DNA, 1095 bp, synthetic construct
  source 1..1095: mol_type = other DNA; note = Synthetic coding sequence
atggagcacaatgggtccgcaagcaacgccgataagatccaccagaacagactgtcaagcgtgactgaggacgaggatcaggatgccgctctcacaatcgttaccgtacttgataaagtggcaagcatagtggattctgttcaggcgagtcagaaaaggatcgaagagagacatcgggagatggagaacgctatcaaaagcgtgcagattgacctactgaagctcagccaatcccattctaataccgggcatatcatcaataaattgttcgagaagacccggaaggttagcgcccatataaaagacgtgaaggctcgggtggagaaacagcaaattcacgtaaaaaaggtcgaggtcaaacaggaggaaatcatgaagaaaaataagtttcgtgttgtcatctttcaggaaaaatttcgttgtccaactagcctttctgttgtcaaggatcggaacttaactgaaaatcaggaggaggacgacgacgatatcttcgatcccccagtggatctgtcctcagacgaggaatattatgtggaggagtctagaagtgcgaggttgcgcaagagcgggaaggagcacattgacaacatcaagaaggccttttcaaaggagaatatgcagaaaactaggcaaaacttagacaagaaagttaacagaatccggaccaggatcgtcactccagagcggagagagcgccttagacagagcggcgagcgccttagacagtctggggagagattacgtcagtccggagagcgctttaagaagtccatttccaatgccgctccctcaaaagaggcatttaaaatgcgctccctgcgtaaaggcaaagatcgcaccgtggctgaaggagaagaatgtgctagagagatgggagtggatatcattgccaggagtgagtctctgggccctataagtgagctttactcagacgaattatctgaaccagagcatgaagccgctcggccagtatacccccctcacgaaggccgagagattcccacgcccgagcctctgaaagtcaccttcaaatctcaagtgaaagtggaggatgatgaaagtctgctgctcgatttgaagcactcaagttag

SEQ ID NO: 27861 - DNA, 1266 bp, synthetic construct
  source 1..1266: mol_type = other DNA; note = Synthetic coding sequence
atgcccacgctcagcgtttttatggacgttccccttgcacataagctggaggggtccctgctcaaaacttacaagcaggacgattatccaaacaaaatcttcctggcctatagggtctgcatgactaatgaaggccacccgtgggtatctctggtggttcagaagaccagactccagatctcacaggacccttccctgaactatgagtacctgcctacaatgggacttaagagttttatccaggcgagtctggccctgctcttcggcaagcacagccaggcgatcgtcgagaacagagttggtggcgtccacactgtgggagatagcggtgccttccaactgggagtgcaatttctccgagcatggcataaggacgctagaatcgtttacatcattagtagccagaaggagttgcacggactcgtgtttcaagacatggggttcacagtttatgagtacagcgtgtgggaccccaaaaaactgtgcatggaccccgacatcttactgaatgtcgttgagcagatcccgcatggatgcgtcctggttatgggcaatattatcgattgcaagcttaccccatcggggtgggctaagctgatgtccatgatcaaatctaagcagatctttcctttcttcgatatcccctgccagggcctgtacacctccgacctggaggaagacacacggatcttgcagtattttgtctctcagggcttcgaattcttttgctcccagagcctgtccaagaactttggcatttacgacgaaggagtgggaatgcttgtcgtggtggctgtcaataaccaacagctgctctgcgtcctctcacaactggaaggcctagcccaggctctgtggcttaacccccctaatactggcgctcgggtgatcacgtcaattctttgtaacccagctctgttgggtgaatggaaacaatccctgaaggaggtcgtggagaacatcatgttgacaaaggaaaaggtcaaagagaaattgcagcttcttgggaccccgggtagctggggccacatcaccgaacagtccgggacccacggatatctcggtctgaactcccagcaagtggagtatctagtgcggaaaaagcatatttacatacctaaaaatggccaaatcaacttcagctgtataaacgccaacaatatcaactatatcacagaaggaatcaacgaggcagtgctcctgactgaatcctctgagatgtgtttgcccaaggaaaagaagacattgatcggaataaagctatag

SEQ ID NO: 27862 - DNA, 576 bp, synthetic construct
  source 1..576: mol_type = other DNA; note = Synthetic coding sequence
atggggaagagctgtaaggtcgttgtatgcggacaggcctctgtgggaaagacctcaattttagaacagctgctttacggaaaccacgtagtcggttccgagatgatcgagacccaagaggatatctacgtggggtctattgaaacggaccggggagtgagagaacaggttagattctatgatacacgcggattgcgcgacggagcggaactcccccgtcactgcttttcctgtaccgatggctacgtgttggtgtattccacagatagcagagaatcatttcagcgggtggagcttctgaaaaaggaaattgacaaatccaaggataaaaaggaagtgacaatcgtcgtattgggcaataagtgtgacctccaggaacagagacgtgtggaccccgacgtggcccaacattgggcgaagtccgaaaaagtgaaactgtgggaggtatcagtcgctgatcggaggtcactgctcgaaccttttgtgtatctagcatctaaaatgactcagccgcagagcaaaagtgccttcccactgtcccggaagaataagggctccggatcacttgatggatag

SEQ ID NO: 27863 - DNA, 3207 bp, synthetic construct
  source 1..3207: mol_type = other DNA; note = Synthetic coding sequence
atggtgagttctgatagacctgtgtccctcgaagatgaggtgtctcatagtatgaaagagatgattggaggatgctgcgtgtgtagcgacgaaagaggatgggctgagaaccctctggtctattgcgatgggcacggctgcagcgttgctgtccatcaggcttgctatggcattgttcaggtgccgactgggccatggttttgccgaaagtgtgagtctcaggaacgggctgctcgcgtgagatgtgagctgtgtcctcacaaagacggtgccctgaagcgtacggataatggaggatgggcgcacgtggtctgtgcgctgtatattcctgaagtacagttcgcaaatgtaagtacaatggagccgattgtgcttcagtctgtccctcatgacagatacaacaaaacatgctacatctgtgatgagcaaggcagggagtccaaggccgctaccggcgcttgcatgacatgtaacaagcacggctgccggcaggctttccatgtgacgtgcgcccagttcgccggtctcctatgcgaagaggaggggaacggcgctgataatgttcagtattgcggttattgcaagtaccatttctcaaaactcaagaaatctaagcggggttccaaccgatcctatgatcagtccctctctgattcctcatcccactcccaggataaacatcatgagaaggagaaaaagaagtacaaagagaaggacaaacacaaacagaagcacaagaagcagccggaacccagtcctgccctggtgcctagtttgaccgtcaccaccgagaaaacctacacgagcacctccaacaatagtatctctggcagcctcaagcggctagaagatacaaccgcaaggtttacaaatgccaatttccaggaagtatctgcacataccagttcaggaaaggacgtctccgagaccagggggtcggaaggcaagggcaaaaagtcctcggctcattcctccggccagcgaggcagaaagcccggtggagggaggaatcccggaactaccgtgagcgcagctagcccattcccacagggctctttttcgggcacacccggttcagtaaaatcaagtagcggatcttcggtacagagccctcaagactttctgtcgttcaccgatagcgatctgcggaatgattcctacagccattcccaacagagttcagctaccaaagacgtgcataagggcgagtcaggatcccaggagggaggcgtcaactccttctccacactgatcggcctcccatccaccagcgccgtgacaagtcagcctaagtcattcgagaactcccccggagacctaggtaattcgtctttaccgaccgccggttataaaagagctcaaacttcgggcattgaagaggagactgtgaaagaaaagaagaggaaaggaaacaagcaatctaagcacgggccagggcgacctaaaggcaacaagaatcaagaaaatgtgtctcacctgtctgtaagttccgcctccccaacaagctcagttgcatcagctgctggctccatcacgtccagcagcctgcagaagtcaccaactctcttgagaaatggaagcctgcagtcccttagcgttggcagctcccctgtgggaagcgagatatccatgcagtatagacacgatggcgcttgcccgacaacaaccttctctgaactcctgaacgccattcacaacgggatatacaactctaatgatgttgccgtgtcattccccaatgtggtctcaggctcaggcagttcaacacccgtatcaagttcacacctgccccaacaatcgtccggccacctgcaacaagtgggtgctctcagtcctagtgcagtgtcttctgccgcacccgctgtggcgacgactcaggccaacacactgtcaggtagctctctgtcccaagcgcctagccatatgtacggcaatcggtcaaactccagtatggcagctctcattgcgcaatcagagaataaccagacagatcaagatttgggtgataattctcgaaacctggtcggtaggggcagtagtcctcgcggatccctctcgcccagatcaccggtgtcatctctgcaaattcgttacgatcagcctggcaattctagccttgagaacctgccacccgtggccgcaagtattgagcagctacttgagcgacagtggtccgaaggtcagcagttcctgctcgagcaaggaaccccttccgatatcctgggcatgctgaaatccctgcaccaactacaggtggaaaacaggcggttagaagaacagataaaaaatctgaccgctaaaaaagagcgcctgcagctgctgaacgctcaattgagtgtgccctttcctacaattactgccaacccctctccttctcatcagatacacacattctccgcccaaactgcgccaacaactgactctttgaattcgtccaagagtccccacatcggtaattccttcttaccagataacagtctgcccgttctcaaccaggatctgacaagttcgggccagtccacatctagctcttcagctctctcgacaccacccccagccggacagagccctgcccaacaaggctctggtgtttctggcgtgcagcaagtgaacggggtgactgtaggggcactcgcaagcggaatgcagccagtgactagcacaattcccgcagtatcagctgtcgggggaatcatcggagcactcccaggcaatcagctcgcgatcaatggcatcgtaggcgctctcaatggggtcatgcagacccctgtgacaatgagccaaaaccctacccctctcacccacacgactgtaccccctaacgctacccacccaatgccggctaccctaaccaatagcgcaagtggactcggacttctctccgaccagcagagacaaattctgattcaccaacaacagttccaacaactcctgaactctcagcagctgacgccagagcagcaccaggccttcctgtatcagctgatgcagcatcatcatcaacaacaccaccagcctgagctgcagcagctccagatccccggacccacacagattcccataaacaacctgctcgccggtacccaggctcctcctctccacaccgccaccaccaaccccttccttacaatccacggggacaacgcttctcagaaagtcgcgagactgagcgacaagactggcccagtggcgcaggaaaaaagctag

SEQ ID NO: 27864 - DNA, 1353 bp, synthetic construct
  source 1..1353: mol_type = other DNA; note = Synthetic coding sequence
atgtcttgcctgatggtcgagcgctgtggtgagattttgttcgaaaaccccgatcagaacgctaaatgcgtgtgtatgctgggagacatccgccttagaggtcagaccggtgtgcgtgcagaaagacgaggatcatacccatttattgacttcaggttattaaattcgacaacatattccggagagatcggaaccaagaaaaaagtgaaacgcctgttgtccttccagcggtacttccacgcgtcccggttactgcgcggaatcataccacaggcgcctttgcacctgctggacgaggactacttgggccaagccaggcatatgctttccaaagttggaatgtgggacttcgatatcttcctattcgaccgactgacaaacggcaacagtctggtcaccttactttgtcacctgttcaacacgcatggcctgatccatcattttaagcttgatatggtaaccctgcaccggttcctggtcatggtgcaggaagactaccactcacagaatccctaccataacgcggtgcacgctgccgatgtgacgcaggcgatgcattgttacctaaaggagcccaaattggcctcgtttctgacacctctagacatcatgctgggacttcttgcggcagctgcccacgatgtcgatcacccaggagtgaaccagcccttcctgatcaagactaaccatcacctggccaatctgtatcaaaacatgtccgttctggagaaccaccactggaggtcaaccattgggatgttgcgcgagagcagactgctcgcacatctaccaaaagagatgacgcaggacatcgaacagcagctgggatcattgattttggccactgacataaacagacagaatgagttccttaccagactgaaggctcatctgcacaacaaggacctcaggctcgaagacgcccaggatagacatttcatgctccagattgctttgaaatgcgcagacatatgcaacccctgtcggatctgggaaatgtccaagcaatggtccgagcgcgtgtgcgaggagttttaccgccagggcgagctcgaacagaaattcgaactcgagatcagcccactctgtaaccaacaaaaggacagcataccatcgatacaaataggctttatgtcttacatagtggaacccctgttcagagagtgggcacactttactggaaactcgactctcagcgaaaatatgctggggcacctcgctcacaacaaggctcagtggaagagcttgttgcccagacagcaccggtcaagggggtcgtcaggaagcggacctgatcatgatcatgcaggccagggtacggaatccgaggaacaggaaggcgatagcccctag

SEQ ID NO: 27865 - DNA, 2268 bp, synthetic construct
  source 1..2268: mol_type = other DNA; note = Synthetic coding sequence
atggcgggatgcatccccgaggaaaagacctatcgcaggttccttgagttattcctgggggagttcagaggtccatgcggcggaggagaacccgaacccgaacctgagcctgagccggagccagaacctgaatcagaaccggaacctgaaccggagctggtagaagcggaggccgctgaagcaagcgtggaggagcccggtgaggaagctgccaccgtagccgcaacggaagaaggagatcaggagcaagatcctgaaccagaagaggaggccgcagttgaaggggaagaagaagaagagggggctgccactgccgcagcagcgcctggacattcagcagtgccccctccccctccacaactccctcccttgcccccactcccacggcctctatccgagcggattactcgcgaggaggtggagggcgagagcctggatctctgcctccaacaattatataagtacaattgcccctcatttctggccgcagctctggcgagagctacgagcgatgaggtactgcaatccgacctgtccgcacactacattcccaaagaaacggacggcactgagggtaccgtggagattgagaccgttaaactcgcccgatcagtattttccaaactgcatgaaatatgctgcagttgggtgaaggattttcccctgaggagacgcccacagctgtactacgagaccagtatccacgctatcaaaaacatgcggaggaagatggaggacaaacacgtgtgtatcccggacttcaacatgttgtttaatcttgaggatcaggaggaacaagcctactttgctgtgttcgatgggcatggcggtgtggatgctgcgatctacgctagtattcacctgcatgtcaacctcgtgaggcaagaaatgtttccacacgatcccgcagaggctctatgtagagccttcagggtgaccgacgaacgcttcgtgcagaaagcagccagggagtcactcaggtgtggcacaaccggagtggttacgtttatccgcggaaacatgctgcacgttgcctgggtgggggattctcaagtcatgttggttagaaagggccaggcagttgaactgatgaaaccccacaagccagacagagaagatgaaaagcagaggatcgaggcgttgggaggctgtgtcgtctggttcggcgcatggcgggtgaatggctccctctcagttagtcgggctattggcgatgcagaacacaagccatacatttgcggagacgccgattccgccagtaccgtgttggacggaacggaagactatttgatcctcgcctgtgacggtttctatgacaccgtgaatccagacgaggcagtgaaagtggtctctgaccacttgaaagagaacaatggcgacagctcgatggtcgcacacaaattggtggcctctgccagggacgccggttcctccgataatatcaccgtgatcgtggtttttctgcgagacatgaacaaggcagtgaatgtgagtgaagaatctgactggacggaaaatagtttccaggggggacaggaagacggaggcgatgataaagagaatcacggtgagtgtaaaagaccctggcctcagcaccaatgctctgctcccgcagatcttggttatgatgggcgagtggactcctttacagaccgcacaagcctgagcccagggagccagattaacgtccttgaggacccaggttatttggacctaactcaaatcgaggcctcaaaacctcattcagcccaattcctcctgcccgttgagatgttcggacccggtgcgccaaagaaagcgaatctcattaacgagcttatgatggaaaagaagtcagtccagtcttcactgcctgaatggtccggagctggcgagttccctaccgcatttaacctaggaagcacaggggaacagatctataggatgcagtccctatccccagtctgttccgggctcgagaatgaacagttcaaatcaccagggaaccgagtgtctcgactgtcccatctgagacaccattattccaaaaagtggcatcgcttccggtttaaccctaaattctattccttcctctccgcacaggaaccttctcataaaatcggtacctcactctcttcattgaccggttctggcaagagaaatcgaattcgctcttccttgccatggagacagaactcgtggaaaggctactccgagaatatgaggaagctccggaagacacacgacatcccctgcccagatctgccatggtcatataagattgagtag

SEQ ID NO: 27866 - DNA, 771 bp, synthetic construct
  source 1..771: mol_type = other DNA; note = Synthetic coding sequence
atggccagcagatacgatcgcgctattacagttttttctccggacgggcacctgttccaggttgagtatgcccaggaggctgtgaagaaagggtcaaccgccgtagggatcagggggacaaatattgtggttctaggagtggaaaagaaatctgttgctaagctgcaggatgagcggacagtccgaaagatatgtgctctcgacgaccatgtttgcatggcctttgctgtattgaccatttttataggactgaccgctgatgccagagtggtgatcaatcgtgcaagggtggagtgtcagagtcataagctcactgtggaggatccggtaactgtagagtatattacgaggtttatcgcgacgcttaaacagaagtacacccagagtaatggccgtagaccctttggaatctctgccctcatcgtcggctttgacgatgacgggatctcgcgcttatatcagaccgacccgagtggcacataccatgcgtggaaggctaacgctatcggcaggtctgcaaaaacagtccgcgaattcctggagaaaaactacaccgaggacgccattgcgtcagattccgaggccataaagctggccattaaggccctgctggaagtggtccagagcggcggtaagaatatagaattagcgatcatacgccgaaatcagcctctgaagatgttctcggccaaggaggtagagctgtacgtgacagaaatcgagaaggagaaggaggaggccgagaaaaagaagagcaagaaaagtgtgtag

SEQ ID NO: 27867 - DNA, 3108 bp, synthetic construct
  source 1..3108: mol_type = other DNA; note = Synthetic coding sequence
atggcacctcgtttgcagcttgaaaaagccgcttggcggtgggccgaaacagtaaggcccgaggaagtaagtcaggagcacatagaaaccgcttatagaatctggctagaaccttgcatcagaggggtgtgcagacgaaactgtaaagggaatccgaattgcttagtggggatcggggagcatatctggctgggggagatagacgagaactccttccataacatcgatgatcccaactgcgagagaaggaagaaaaatagtttcgtggggctgaccaatcttggcgctacttgttacgtcaacactttcctgcaagtatggtttcttaacttagagctacggcaggctttgtatctgtgcccttcaacctgcagcgactacatgctgggagacggcattcaagaagagaaggactatgaaccccagacgatctgtgaacacttgcaatacttgttcgctctgctacaaaacagcaacagacgttatatcgacccttccggattcgtgaaggcactgggtctggataccgggcagcaacaggacgcgcaagaatttagtaagctgttcatgagcttgctggaggacacactgtcgaagcagaagaaccccgacgtgcggaatatcgttcagcagcaattttgcggtgagtatgcgtatgtgacagtgtgtaatcagtgcgggcgagagagtaaactgctgagtaagttctacgagctcgaattaaatatccagggccacaaacagctcactgattgtataagtgagttcctcaaggaagaaaagctggagggggataataggtatttctgcgaaaactgtcaatctaagcagaacgccactcgcaagattcgtctcctttctcttccctgcaccctaaacctacaactgatgagattcgttttcgatagacagacaggacataagaaaaagttaaacacctacatcggcttttctgagattctggatatggaaccttatgtcgaacacaagggcggatcctatgtttatgagctgtcagcagtgctcatccacaggggagtctcggcttatagcggccactatatcgcccacgtgaaggacccacagagcggcgagtggtataagttcaatgatgaagacatcgagaagatggaaggtaagaaattgcagttaggaatcgaggaggatctggctgaaccatctaaatcccagacacggaaaccgaagtgtggcaaggggacccattgtagcagaaacgcgtatatgcttgtctacaggttgcagacccaggaaaagcctaacaccactgttcaggtcccggcattcctgcaggagctagtggacagagataatagtaagttcgaagagtggtgtattgagatggctgaaatgcgaaagcagtctgtagacaagggcaaggccaagcacgaagaagtgaaggagttgtatcagcgcctcccggctggcgcagagccatatgagtttgtctcactggaatggcttcaaaaatggctggatgagtcaacccctactaagcctattgacaatcatgcctgtctatgttctcacgacaagcttcaccctgacaaaatctccatcatgaagcggatttctgaatatgccgctgacatattttatagccgatatggaggaggcccacgcctgactgtgaaggctctgtgtaaggagtgcgtggtcgagcggtgccggatactgcgtctgaagaatcagctgaacgaagattacaaaacagtaaataatctgctgaaagctgcagtgaaaggatcagatggattctgggtcgggaagtctagcttgaggtcatggcgccagctagcactagaacagcttgacgagcaagatggggacgctgagcagtctaacggaaagatgaatggcagtacgttgaataaggacgagagtaaagaggagcgcaaggaggaagaggaattgaattttaacgaggatatcctctgccctcacggagagctctgcatttccgagaacgagaggcgactggttagtaaagaggcatggtctaaactccagcagtactttcccaaggccccagagttcccgtcatacaaagagtgttgctctcagtgtaaaatactggagagggagggggaggagaatgaagcccttcataagatgattgctaacgagcaaaaaactagcctcccgaatctcttccaggacaaaaaccggccttgcctttctaactggcctgaggacacagatgtgctttacatcgtttcccagttttttgtcgaggagtggcggaaatttgtgcgaaagcctacacgttgttccccggtctccagcgtcggaaatagtgccctgctgtgccctcatggcggactgatgttcacgttcgcatctatgacaaaggaagattcaaaattaattgccctgatttggccttctgaatggcaaatgatccagaagttattcgtagtcgatcacgtgatcaaaataacacggattgaggtcggtgatgtgaatccgtctgagactcaatatatatctgagccaaaactgtgtccagaatgcagggagggtctactttgtcagcaacagagagacttacgcgagtatacccaggcaaccatatacgtccacaaggtcgtagacaacaaaaaagtcatgaaggactccgccccagagctcaatgtgagctcaagcgagactgaggaggacaaggaagaagcaaagccagatggcgaaaaggatcccgacttcaatcagtccaacgggggtaccaaaaggcagaagatctcgcatcagaattatatagcctatcaaaaacaggtgattcgacgttctatgcgccatcgcaaggtgagaggagaaaaggccctcctagtcagcgccaatcagactttgaaagagcttaaaatccagatcatgcacgctttttcagtcgctcctttcgaccagaatttgagtatcgatgggaagattctgtctgatgactgtgccactctcgggacactgggcgtcattcctgaatccgtcatcctgcttaaggccgacgagcccattgccgattatgcagcaatggatgacgtgatgcaggtctgtatgcccgaggaaggctttaaagggacaggcctgctcggacattag

SEQ ID NO: 27868 - DNA, 2382 bp, synthetic construct
  source 1..2382: mol_type = other DNA; note = Synthetic coding sequence
atgctgattcagagtgaaaagaaaacacagctttctaaaaccgaaagcgtgaaagaaagcgaaagcctcatggaatttgctcagcccgagatccagccccaggagtttctgaaccgcaggtatatgactgaagtggattactctaacaagcaaggggaagagcaaccgtgggaggcggactacgccagaaagccgaatctgcccaagcgctgggacatgcttacggagcctgatgggcaggagaagaagcaagagagtttcaaaagctgggaagcctccggaaaacaccaggaggtcagcaaacctgccgtctctctcgaacagcgcaagcaggacacttccaaactgaggtccaccctccccgaggaacaaaaaaagcaagaaataagcaagtccaagccatcaccttcacagtggaagcaagatacaccaaagagcaaagcaggctatgtgcaagaagaacagaaaaagcaggaaacccccaagctgtggcctgttcagcttcagaaggagcaggaccctaaaaaacaaacaccaaaatcttggacaccctccatgcagtccgagcaaaacactaccaagtcatggacaacccctatgtgcgaggagcaggacagcaagcagcctgaaactcccaagagttgggagaacaacgtcgagtctcaaaaacacagcctgacctcccagtctcagatctcccctaaatcatggggagtggccaccgcaagtttgattccaaatgaccagctgctgcccagaaagctcaacaccgaaccaaaagatgttcctaagcccgtgcaccagccagttggaagctcatctacactcccaaaggatcccgtgctccgaaaagagaaactgcaggacctgatgacgcagatacagggaacctgtaatttcatgcaggagtccgtcttggatttcgataaaccttctagcgcgatccccactagccaaccaccatccgccacccccggatcacccgttgccagcaaagagcagaacctcagctctcagtccgactttcttcaggaaccactccaggcgacatcaagccctgtaacttgtagcagtaatgcctgtctggttaccaccgatcaggctagctctggaagtgaaacagaatttatgacgagcgaaacccccgaagccgcaatccccccaggtaagcagccctcgtctctggcatctccaaatcccccaatggccaagggcagtgagcagggcttccagtcccctcctgcgtcttctagttccgttaccattaacacagcccctttccaggccatgcagactgtattcaacgttaatgctcccctgccccctaggaaggaacaggaaatcaaggagtctccctacagccccggatacaatcagtcattcaccaccgcctcgacccagacacctccccaatgtcagctcccctctatccacgtggagcaaaccgtgcattcccaagagacggccaactaccacccagatggcacaattcaggtgagcaatgggtctctcgcgttttatcccgctcagaccaatgtttttcctcgacccactcagccatttgtcaatagtagaggtagcgttcgcggatgtaccaggggaggcaggctcatcaccaacagctatcggtctccaggcggatataaaggctttgacacctatagggggctgccttcaatatctaatgggaactacagccaattgcagttccaggcacgggagtactcaggtgctccatattctcaaagagacaatttccagcagtgctacaagcgtggtggcactagcgggggacctcgagcaaactccagagctggctggtcagactccagccaagtgtcctcaccagaaagagacaacgaaaccttcaacagcggcgacagcgggcagggagatagccgctccatgacaccagtcgatgttcctgtcactaaccccgcagcaacgatacttcccgtgcatgtttaccctctacctcaacagatgcgggttgccttttcggctgcgaggacttccaatttggcccctggcaccctggatcaacccatagtctttgatctgctgcttaataatttgggagagacattcgatcttcaacttggcagatttaactgtcctgttaatggtacgtatgtgtttatctttcacatgctgaagctggctgttaacgttccgctgtacgttaacttgatgaagaatgaggaggtgctggtgtcagcctatgctaacgatggggctcctgaccacgagactgcctctaatcacgctattctccagcttttccaaggagatcagatttggttacgcctgcacaggggggcaatatacggatctagctggaagtactccacattttctggctatctcctctaccaggactag

SEQ ID NO: 27869 - DNA, 1083 bp, synthetic construct
  source 1..1083: mol_type = other DNA; note = Synthetic coding sequence
atggaagagttgagccaggcgctcgcctcctcatttagcgtgtcacaagacctgaatagcactgcagcaccccatcctcggctgtctcagtataaatctaaatacagcagcctggagcagagcgaacggaggaggagactccttgagctgcaaaagtcgaaaagactcgattatgtgaatcatgcccgtagattggctgaggatgactggaccggtatggagagtgaagaggaaaataagaaagacgacgaagagatggacattgatacagtaaaaaagctcccaaagcattatgccaatcagctgatgctgtcagaatggctcatcgatgttccttctgatctgggccaagaatggattgtcgtggtgtgtcctgttgggaagagagcactcatcgttgcgagccggggtagcactagtgcatacaccaaaagcggctactgcgttaatcgcttcagcagcctgctgcccggaggtaaccggagaaattccacagcgaaggactacacaatcctggactgcatctataatgaggtgaaccagacatactatgtcttggatgtgatgtgttggcgcggtcacccattctacgactgccagacagattttaggttctattggatgcacagcaagctccccgaagaggagggccttggcgagaagaccaaattgaatccgtttaagttcgtcgggctgaagaactttccatgcacaccggagtccctctgcgatgtccttagcatggattttcctttcgaagttgatggcctgttgttttaccacaagcagacccactattctcccggatctacacctttggtgggctggctgagaccttacatggtctctgacgtcttgggcgtagccgtgcccgcaggccctctgactaccaagcctgactacgcaggccatcagttgcagcaaatcatggagcacaagaaatcccagaaggagggtatgaaagaaaagctgacacacaaagcgagcgaaaacggccattacgagctcgagcatctgagtacgccgaagctgaaaggaagcagccactctcctgatcatccaggatgccttatggagaactag

SEQ ID NO: 27870 - DNA, 525 bp, synthetic construct
  source 1..525: mol_type = other DNA; note = Synthetic coding sequence
ctaatacacaaaccgcttaaacgcgctatcacgaccctcatggccggaatacttcgccttgtggtgcagtggcctcctgggaggctgcagacggtgacaaagggggtagagtcactcatttgcacagactggattagacataaattcacccgcagtagaattcctgaaaaggtcttccaggcgtccccagaagaccacgaaaagtatggtggagaccctcagaacccccataaacttcatattgtaactcgcataaagtcaactcgacgaagaccttattgggagaaggacatcattaagatgctggggctcgagaaggcccacacccctcaggttcacaaaaacattccctccgtgaacgccaagctgaaagtggtgaaacatttaatccgcatcaaacctcttaaacttccccagggactgcctgccgaagagaatatgtctaacacttgtcttaaatctactggcgagcttgtcgtgcagtggcatcttaagccagtcgagcagaaggctcatgaatcttag

SEQ ID NO: 27871 - DNA, 1434 bp, synthetic construct
  source 1..1434: mol_type = other DNA; note = Synthetic coding sequence
atggccacctatacctgcattacgtgcagagtggctttcagagatgccgacatgcagcgagctcattataagacagattggcatcgctataacctgcggcgaaaagttgcctcgatggcgccagtaaccgccgagggatttcaggaacgcgttcgggctcaacgggctgtggcagaagaagagtcgaaggggtccgccacctattgcaccgtctgcagtaagaagtttgctagtttcaacgcgtatgaaaaccatcttaagtctcggcgacatgtggagctcgaaaaaaaggccgtgcaagcagtgaaccggaaggtcgagatgatgaatgaaaagaacctggagaaaggcctgggcgttgattcagttgacaaagacgccatgaatgcagctatccagcaggccattaaggcgcagccttctatgtctcccaaaaaggcacctccagcccctgccaaggaggcccgaaacgttgtggccgtggggaccggcggacggggtactcatgacagagatccttccgaaaagcctcctcggctgcagtggttcgagcaacaagccaaaaagctcgcgaagcagcaggaagaagatagcgaggaggaagaagaagatctggacggggacgactgggaagacatcgattcagacgaagaactggaatgtgaagatactgaggcgatggatgacgtggtagagcaggacgccgaagaagaggaggccgaggaaggtcctccactgggtgctatccccatcacggattgcctgttttgcagtcatcactcatcctcgttgatgaaaaatgtcgctcatatgacaaaagaccactcattttttatcccagacatcgaatatctgagtgatattaagggactgataaaatatctcggcgagaaggtcggcgtcggcaaaatatgcctgtggtgcaatgagaaaggaaagtccttctacagcacggaagctgtccaggcccacatgaacgacaaaagccattgtaaattgtttacagacggcgacgcagctctggagtttgccgacttctatgattttcggtcttcttatcctgatcacaaggaaggagaggaccccaataaagctgaggaactgccgtctgaaaaaaacctggaatatgatgacgaaaccatggaactaattttgccatctggagcccgtgtcggccaccgctctctgatgcgctattacaagcaacgattcggcttaagtcgcgcagtcgccgtggctaagaaccgcaaagcagtgggtcgcgtgctccagcagtacagggcattaggctggacggggagcactggggctgcattaatgagagaaagagatatgcaatacgtgcaacggatgaaatccaaatggatgctaaagacgggcatgaaaaataatgctaccaagcagatgcacttcagggtacaggtcaggttttag

SEQ ID NO: 27872 - DNA, 2862 bp, synthetic construct
  source 1..2862: mol_type = other DNA; note = Synthetic coding sequence
atgatcactagcgctgccggaattatcagcctactggacgaagatgaaccccagctgaaagaatttgctcttcataaactgaacgcagtagtgaatgacttttgggccgaaatcagtgagtctgttgacaagattgaagtgctgtacgaggacgagggctttaggagtaggcagttcgcagcactggtagcctcaaaggtgttctaccatctgggcgcttttgaggagtcactgaattatgcacttggtgccggtgatttattcaacgtgaacgacaacagcgagtacgtggagacaatcatcgcaaagtgcattgaccactacacaaaacaatgcgtggaaaacgccgacctgccagagggggagaaaaagcccatcgatcaacgtctggagggaatcgtgaataaaatgttccagcgttgcttagatgatcacaagtacaagcaagccattggtatcgcattagagactagacgactcgacgtctttgagaagaccattctggagtctaacgacgtccccggtatgctggcctattctctgaagctgtgtatgtcactgatgcagaacaagcagttcagaaacaaagttcttcgggtgctggtgaagatatacatgaatttagaaaaacccgactttatcaacgtttgccagtgcctgatctttttggacgacccacaagccgtttcagacatccttgagaaattggtgaaggaggataacctgctgatggcttaccaaatctgctttgatctgtacgagtccgccagccaacagtttctgagctcagtcattcagaatctgagaacggttggaacacctatagcgtcagttcccggatctacaaacaccggcaccgtgcccggatccgaaaaagactctgattctatggagaccgaagaaaaaacgtcatcggcctttgttggcaagacgcccgaggcctctccagaaccaaaggatcagactctgaaaatgataaaaatcctctctggcgagatggccattgaattgcatttacaattccttatccggaataacaacacagacctcatgatcctgaaaaacacaaaagacgcggtgaggaacagcgtttgtcatactgctacggtgatcgccaactcgttcatgcattgcggaaccacttctgaccagtttcttagggataacctggaatggttggccagggctacgaactgggctaagtttaccgcgacagctagtctgggggtaattcacaaaggacatgagaaggaggccctccagctaatggccacatatctgcctaaagatacaagccctggctccgcatatcaggagggagggggtctctacgccctgggcctgatccacgctaaccatggtggcgacatcatcgactatttgctgaatcagctgaaaaatgctagtaatgatatcgtccggcatgggggatcacttggactgggccttgccgcaatgggaacagcaagacaagacgtgtatgacttgctcaaaacaaatttgtaccaggatgatgccgtcaccggtgaagccgctgggctcgctctgggactcgtgatgctggggtctaaaaatgcccaggccatagaggatatggtgggctacgctcaggagacccagcacgagaagatcctgagaggtctcgctgtcggtatcgccctggtgatgtacggcagaatggaagaggcggatgcacttattgagagcctctgcagggacaaggatccaatcctcagaagatctggaatgtacaccgtcgccatggcgtactgtggcagcggaaataataaggctattcgcagactcttgcacgtggcagtgagtgacgtgaacgacgacgtacgacgggcagccgtcgaatctctgggatttattctatttcggacccctgaacagtgtcctagtgtggtgtctctgctttcggagtcatacaacccccacgtcaggtatggcgctgcgatggccctgggaatatgttgtgccggaactgggaacaaggaggcaataaacctgctagagcccatgactaacgatccagtaaattacgttcgacagggagccctgattgcgtccgcactgatcatgattcaacagacggaaataacatgtcctaaagttaatcagttcaggcagctttacagtaaggttattaatgacaagcatgatgatgtgatggcaaagttcggggctatcttggcacagggtattctggacgccggaggtcacaacgtaaccatttctctccaatctagaacaggtcacacccacatgccttctgtggttggagtcctggtctttacccagttttggttttggtttccattgtctcattttctaagtcttgcgtatacacccacttgcgtcattggcctgaacaaagaccttaaaatgccaaaggtccagtataaatccaattgtaagccaagcactttcgcatatcctgctccattagaggtaccaaaagaaaaagagaaggaaaaggtctccacggccgtcctgtcaatcacggccaaggctaaaaaaaaggaaaaagagaaagagaaaaaagaggaggaaaagatggaagtagatgaagccgagaagaaggaagagaaagaaaagaaaaaagaacccgagcctaatttccagttgctggacaacccggcaagggtgatgcccgcacagcttaaagtcctgacaatgcccgagacatgcagataccaaccttttaagcccctgtctataggcggtatcatcatcttgaaagatacctccgaggatatcgaagaactggtggagccagtggcagcccatgggccaaaaatagaagaggaggagcaggagcccgagccacccgagccctttgaatacatcgacgattag

SEQ ID NO: 27873 - DNA, 984 bp, synthetic construct
  source 1..984: mol_type = other DNA; note = Synthetic coding sequence
atgtgtagtacttcagggtgcgacttagaggagatacctctggatgacgacgatctaaataccatagaattcaaaattctcgcatactatacgcgacaccatgtctttaagtctacgcccgcattattcagtccaaagctcctaaggacgagatcactaagtcagcgcggactgggtaattgtagcgccaacgagtcttggaccgaggtgtcttggccctgccgcaactcccagagtagcgaaaaagcgatcaatctggggaaaaagaaaagctcttggaaagcttttttcggcgtggtcgaaaaggaagactcccagtccactcctgcgaaagtcagtgcccagggtcagcgcactctagaataccaggacagccatagccagcagtggtcacgatgcctttctaacgtagaacagtgtcttgaacacgaggctgttgacccgaaagtgatcagcatcgctaatagggtcgcagagatagtctacagctggccccctccgcaggctacccaggcgggaggattcaagagcaaagagatctttgtaactgaagggctgtctttccagctgcagggacatgtcccagtggcctcaagtagcaagaaggatgaggaggagcagatcctcgctaagatcgtggaactgctgaagtacagcggagaccagctggaacgaaagctcaaaaaggacaaagcccttatgggacactttcaggatggtctaagttacagcgtcttcaagactataacggaccaagtgctgatgggtgtggatccacgtggggaatctgaggtaaaggctcagggctttaaagctgctctcgtgatcgacgtgaccgccaagcttactgcaatagacaatcatcctatgaatcgggtactgggtttcggaacaaaatacctcaaagagaatttctccccgtggattcagcagcacgggggttgggagaagatactcggcatttcccacgaggaagtggattag

SEQ ID NO: 27874 - DNA, 1086 bp, synthetic construct
  source 1..1086: mol_type = other DNA; note = Synthetic coding sequence
atggggggtgccgtaagtgcaggcgaagacaacgacgaactgatagacaacctcaaagaggcacaatatattaggaccgaactcgtggagcaggctttccgcgctatagaccgcgctgactactacctagaggagttcaaggaaaacgcatacaaggatctagcttggaagcacgggaacattcatctgtctgctccctgcatctattcggaagtgatggaagccctagaccttcagcctggactgagcttcctgaacttagggtcagggacgggctacttgtcctctatggtggggctgatcctgggtccttttggcgtaaaccacggggtggaactgcattccgatgttatcgagtatgcaaagcagaaattagactttttcatccgcacgtctgatagctttgacaaatttgatttctgtgaacctagctttgtcaccggcaattgcctggagatttcccccgactgctcccaatacgaccgcgtgtactgcggggctggcgtgcaaaaagaacacgaggaatatatgaagaatctgctcaaggtgggaggcatcctggtgatgccgctggaagagaagcttaccaagataacaaggacgggaccatccgcctgggagacgaaaaagattctggccgttagcttcgcccctctcatccaaccttgccattccgagagcggaaagtctaggcttgtgcagcttcccccagtggccgtccgatctttacaagatctggccagaattgccatccgcggaactatcaaaaagatcatacaccaggagactgtatccaagaatggtaacggactgaaaaacacaccacggttcaaaaggagacgggtaaggcggcgtagaatggagacaattgtgttcttggataaggaagtctttgcttcccgaatctctaacccatcagacgacaattcgtgcgaggatttagaagaggagcggagagaagaggaagaaaagactccacccgaaactaaacccgatccaccggtgaacttcctgagacagaaagtccttagcctgcccctgccagaccctctgaagtactatctcctctattatcgggagaaatag

SEQ ID NO: 27875 - DNA, 780 bp, synthetic construct
  source 1..780: mol_type = other DNA; note = Synthetic coding sequence
atgaaagacgtggataatctgaagtctattaaagaggaatgggtgtgtgagactggaagcgacaaccagcctctgggaaataaccagcagtcaaattgcgagtatttcgtggatagcctgttcgaggaggcgcagaaagtgagcagcaagtgtgttagtcccgcagagcagaaaaagcaagtggacgtgaacataaagttatggaagaatggctttacagtgaatgacgactttaggagctacagcgacggagctagtcagcagttcctgaacagtatcaaaaagggggagcttcccagtgaactgcaaggcatcttcgacaaagaggaggtagacgtcaaggttgaagacaagaaaaatgaaatctgtctgagtaccaaacccgtgtttcaacctttcagcgggcagggccacagactcggttcggctacccccaaaattgtatcaaaggcaaagaacatagaagtcgagaacaagaacaacttgtctgccgtgcctcttaataatctcgaacccataactaacatccagatctggttagccaacgggaagcggattgtccaaaagtttaacattactcatcgggtgtctcatataaaagatttcatcgagaaataccaaggctctcagcgcagcccaccgttctcactcgcgaccgcattaccagtgctccggctactcgacgagacgcttacattggaggaggccgatctgcagaatgctgttataatacagcgcctccagaagaccgcctcctttcgtgagttatccgaacactag

SEQ ID NO: 27876 - DNA, 990 bp, synthetic construct
  source 1..990: mol_type = other DNA; note = Synthetic coding sequence
atggtccgcacaaaaacctggacccttaagaaacactttgttggctatcctaccaatagcgattttgaactgaagaccgcggaactaccccctttgaagaacggagaggtgttactggaagcactcttcctgactgtggacccttacatgagagtcgctgctaaacgtctgaaggagggagataccatgatgggccagcaggtggccaaggtggtcgaaagcaagaacgtggcccttccgaagggaactatcgtcctggcttcccccggatggacaacccacagcatctccgatggcaaggacttggaaaagctcctcactgagtggcctgacaccattccgctctctttggcgctgggcacagtgggtatgcctggcttaaccgcatacttcggattgctggaaatatgcggggtgaagggcggtgagacagtgatggtgaatgcggcagccggagctgtcggcagcgtcgtgggccagattgcaaagttgaagggatgtaaagttgtcggagccgtcggtagcgacgagaaggtcgcatatttgcagaagctaggctttgacgtggttttcaactacaagaccgtggaatctctggaggaaaccctgaagaaagctagcccagacggatatgactgctacttcgacaacgtgggtggggagtttagtaacaccgtaattgggcagatgaagaagtttggccgtatcgccatctgtggagcgatttcgacgtataatcgcacagggccactcccccctggccctccccctgagattgttatataccaggagctaaggatggaggcgttcgtcgtttaccgctggcagggtgatgctcgccaaaaggccctcaaggatttgctaaagtgggtcctcgaaggaaagatccagtataaagagtatatcattgaaggatttgagaatatgcctgccgctttcatgggaatgctgaagggcgacaacctcggtaaaacaattgtgaaggcttag

SEQ ID NO: 27877 - DNA, 3006 bp, synthetic construct
  source 1..3006: mol_type = other DNA; note = Synthetic coding sequence
atgcagtccacagatctaggtaataaggaatcaggtaaaatctggcaccgaaaaccgtctccggcaactagagatggcatcatagtgaacatcatccataacacgtcagattatcacccaaaggtcctgcggttcctaaacgtcgcgtttgacggaaccggggattgcctgatagccggagatcaccagggcaatatttatgtcttcgatctacacggcaaccgattcaatcttgtccaacgaacagctcaagcctgtactgcgctggcattcaaccttcggcgtaaatcggaattcttggtggcgctggccgactattccattaagtgttttgacactgtgacaaaggaactggtaagctggatgcggggacacgagtcgtccgtattctcaatttccgtgcacgcttccggcaagtacgccatcactacttcgagtgacaccgctcagctctgggacctggatacttttcaacggaagcggaagctgaacattcgccaatctgtcggcatccagaaggtgttttttctgcccctttccaacaccatcctctcgtgctttaaggataactccatcttcgcctgggagtgcgatacgcttttctgtaagtatcaactcccagcccctccagagagcagcagcatcctgtataaggtgtttgctgtgacgagggacggaagaattctagccgcaggaggtaagagtaaccatttgcacttgtggtgcttggaagctagacagctgttccggataatacagatgcctaccaaagtgagagctatcaggcatctggagttcctacctgactctttcgatgctggctctaaccaggtgctgggtgtcctgagtcaggacggcatcatgcgatttatcaatatgcaaacttgtaaactgctgtttgagatcggctctctcgacgaaggcataagcagcagcgctattagcccccacggccgttatatcgcttccatcatggagaatgggagcctcaatatttatagcgtgcaggctctaacacaggagatcaataaaccacccccaccactggttaaagtgatcgaggacttgccaaagaacaagctgtcctcctctgatctgaagatgaaggttacaagtggaagagtccagcagcccgcaaagtctcgcgagtccaaaatgcagacccgtatcctcaagcaggatctcactggggacttcgaatcgaagaaaaatgaattacccgacggactaaacaagaaaagactacagattctgctgaaaggatatggcgaatatccaactaagtaccgcatgttcatctggcgatccctcttgcagctgcccgaaaatcacacagctttttcaactctgatcgacaagggaacccatgtggcgtttttgaacctgcaaaagaagtaccctatcaagtcaagaaagcttcttagggtgctgcagcgcactctgtccgccctcgcccactggtcagtcattttcagtgacacaccctacttgccattactggcatttccctttgtgaaactgttccaaaacaaccagctcatctgtttcgaggtaattgccactctgatcatcaactggtgtcagcactggtttgaatactttccaaatcctcccataaatatcctgtccatgatcgaaaacgtgctggcatttcacgataaagagctgctgcagcatttcatcgaccatgacattacttcacagctgtacgcatggccccttttagagaccgtcttctcagaagtgctgactagagaagagtggctgaagctttttgacaatatttttagcaaccatcccagcttcctcctgatgaccgttgtggcgtacaatatctgcagtaggacccctctgctctcctgcaatctcaaggatgacttcgagttcttcttccatcacaggaataacctggatattaacgtcgtcatccgacaggtctatcatctcatggaaaccacgcctacggatatacacccagacagtatgctgaacgtgtttgtggctctgactaaaggccaatatccagtgtttaaccagtaccctaaatttattgtagattaccagacacaggaaagggaacgcattcggaatgatgaactggattatttaagagagaggcagaccgtggaagatatgcaggccaaggtggatcagcagcgggtggaagatgaagcctggtatcaaaagcaggagttgttgcgcaaagcagaggagactagaagggagatgcttctgcaggaggaagagaagatgattcagcagcgccagcggttagccgctgtgaagagagagctgaaagtaaaggaaatgcacctgcaagacgcggctagacggaggttcctaaaattgcagcaggatcaacaggagatggagctccgacgcctagacgacgagataggaagaaaggtttatatgcgtgatcgcgagattgccgctacagctagggatctggaaatgaggcagctggagctggagtctcagaaaaggctctacgagaaaaaccttaccgaaaatcaggaagcgcttgccaaggagatgcgagcggatgcagacgcatatcggaggaaagtggacctcgaggaacatatgttccacaaactgatagaagcaggcgaaactcagtcccagaagacacagaagtggaaagaggctgaagggaaggaattcagacttagatcagctaaaaaggcttctgctctgtccgatgcaagtagaaagtggttcctgaagcaagagatcaacgctgccgtggaacacgcagaaaatccctgccacaaggaggagcctcggttccagaacgagcaggattctagttgtctgccccgaacttcccagctgaacgactcaagcgaaatggatccctctacccagattagcctgaaccggagagcggtcgaatgggacaccacagggcaaaatttaatcaaaaaagtccggaacctgcggcagaggctgacagcccgagctcggcatcgctgccagacaccacatttgctcgccgcttag

SEQ ID NO: 27878 - DNA, 651 bp, synthetic construct
  source 1..651: mol_type = other DNA; note = Synthetic coding sequence
atgagcttcttattcgggagccgttcgagcaaaacttttaaacccaagaaaaacatacctgaggggagtcatcagtacgaactgctcaaacacgcagaggctacacttggcagcggaaatcttagaatggcggtgatgctcccggaaggcgaggatctgaacgagtgggtggctgttaatactgtggacttttttaatcaaatcaacatgctctacggtaccatcacagatttttgtacagaggaatcctgtcctgtgatgtccgctgggccaaagtacgaataccattgggctgatgggacaaatattaagaagccaattaagtgcagtgctccgaagtacatcgactatctgatgacatgggtgcaggaccagctggacgacgaaacactttttcccagcaagatcggggtcccctttcccaaaaactttatgtccgtcgctaagaccatacttaagcggctgttccgtgtatatgcgcatatttaccatcagcatttcgatcctgtgatccagttacaggaagaagcacatctcaatacttcgttcaaacactttattttttttgtgcaggagtttaacctgatagacagacgggagctggccccactgcaggaactcatagagaagctcacgtctaaagatcgatag

SEQ ID NO: 27879 - DNA, 477 bp, synthetic construct
  source 1..477: mol_type = other DNA; note = Synthetic coding sequence
atggcagcccagggcgttggacctggtccaggaagtgcagcgccacctggcttggaggctgcccgtcagaaactagcattgcgcaggaagaaagtgttgtccaccgaagagatggaactttacgagctggcccaagccgctgggggaggaattgacccggatgtgttcaaaatactggtagacctattaaagcttaatgtggcccctcttgccgtgtttcagatgctcaagagcatgtgcgccggacagcggttagccagcgagccacaagacccggcagccgtttcgctgcccacgtccagcgtcccagaaactcgaggtagagataaaggtagtgccgctctgggcggtgtattagcactggcggaaagaagcaaccatgaggggagttcccaaagaatgccaaggcagccttccgccacaagactgccaaaaggagggggtcctggcaaaagcccgacccagggatcaacgtag

SEQ ID NO: 27880 - DNA, 1425 bp, synthetic construct
  source 1..1425: mol_type = other DNA; note = Synthetic coding sequence
atgaattcggtgtcgccagccgctgcacagtacaggtccagtagtccagaggatgccaggcgaagacccgaagcacggagacctagaggcccaaggggccctgatcccaatggcctgggtccctctggcgctagcggccctgctctcggctccccaggagcagggccatccgagccagacgaagttgataaattcaaagcgaaattcctgaccgcctggaacaatgtcaaatatgggtgggtggtcaaaagccgaacatcgttttctaagatctcttctatacatctctgcggacggaggtataggttcgaaggtgagggagacattcagcggtttcagagagactttgtgtctcgcctgtggctcacttacaggagagactttcctcccctgcccggtgggtgcctgaccagtgactgcggctggggatgtatgctgcggagcgggcagatgatgctcgctcagggcttgttgctgcacttcctgcctcgagactggacatgggctgaaggcatgggattgggacctccggaattgtctggttccgcaagcccatcccggtatcacggtcccgcacgatggatgccccctcgctgggcacagggagctcccgaactagagcaagagagaaggcataggcagattgtgagctggttcgcagatcatcccagggccccatttggtctgcatagactggtggagttaggacagtcgtcaggtaagaaggcaggagattggtacggaccctcactcgtggcgcacattcttcggaaagctgttgaatcctgttcagacgtaacgaggctggtagtctacgtgtcccaggactgtaccgtctacaaggctgacgtagcccgtctggtcgctagaccggatccaaccgccgagtggaagtctgtggtcatcctggtccccgtgagactcggtggggaaaccctgaatccagtgtacgttccctgtgtgaaggagttgctcagatgtgagctgtgtctgggcattatgggtggcaaaccacggcactctctctactttatcggttatcaggatgactttcttctctacctggatcctcactactgtcagcccaccgttgacgtatcccaggccgactttcccctagagtcgttccattgtaccagcccacggaaaatggcttttgctaaaatggacccatcctgcacagtaggtttctatgccggtgatagaaaagaatttgagaccctgtgttctgagcttacaagggtcttatccagtagtagcgccaccgaacggtaccccatgtttacattggccgagggacacgcacaggaccattcactggatgacttgtgttctcagcttgcccagcctaccttacgcctcccaaggacaggcaggttgttaagggccaagcgccctagttccgaggactttgtgtttctgtag

SEQ ID NO: 27881 - DNA, 945 bp, synthetic construct
  source 1..945: mol_type = other DNA; note = Synthetic coding sequence
atggcctttgtgacgcggcagtttatgcgatctgtatcatcttcttcaaccgctagcgctagtgcgaagaaaatcattgtgaagcatgtgaccgtcattggcggaggtttgatgggtgcagggatagctcaggtcgcagccgcaacaggtcacacagtggtattggtcgaccagaccgaggatattcttgctaagagtaaaaagggtatcgaggagagcttgcggaaagtggccaaaaagaagttcgcagagaacctaaaggccggtgatgaatttgtagaaaaaacactgtccacgatcgcaactagtaccgacgctgccagtgttgttcattctactgacctcgtcgtggaagcaatcgtggagaacttgaaagtgaaaaacgagctgttcaagcggcttgacaagttcgccgctgagcatactatctttgctagcaatacaagttcgttacagattacatcaattgctaatgccaccacgaggcaggaccgattcgctgggcttcactttttcaaccccgtccctgtcatgaaactcgtcgaggttatcaaaacgccaatgacgtcacagaaaacatttgagagcctggtggacttttcaaaggcgctcggcaagcacccagtaagttgtaaggatactccaggatttatcgtcaatcgccttttagtgccataccttatggaggctatccgcctgtacgagagaggagatgcttctaaggaagatattgacacggctatgaagttaggtgctgggtatcccatgggtccattcgagctgctggactacgttggcctcgacacaacgaaatttatagtggacgggtggcacgagatggacgcagaaaatccgctccaccagcctagccctagcctgaacaaactagttgctgagaataagtttggtaaaaaaaccggcgaaggcttttacaagtataagtag

SEQ ID NO: 27882 - DNA, 810 bp, synthetic construct
  source 1..810: mol_type = other DNA; note = Synthetic coding sequence
atggggaactgttgttggacccagtgcttcggcttgcttaggaaggaagcaggtagactgcagcgcgtgggtggcggaggaggaagtaaatatttccgaacgtgtagccggggagagcatttaacaattgagttcgagaatctcgtagaatcagacgagggtgaaagcccagggtccagccataggccactgaccgaggaggagattgtcgaccttagagagaggcattatgactccattgcggaaaaacaaaaggacctcgataagaagattcagaaagaacaggagagacaacggatagtgcagcagtatcacccctctaacaacggtgaatatcagagtagtggtccagaggacgacttcgagagctgtctacggaatatgaaatcccagtatgaagtctttagatcttctcgtctatcaagcgacgccactgtgcttacccccaacacagagtcttcttgtgacctgatgactaagacgaagtcgacttctggcaacgatgacagtacatctctcgatcttgagtgggaggatgaggagggtatgaacaggatgctgcctatgcgcgagcgctccaagaccgaggaggacatcctgagggcagcactgaaatattcaaataagaaaaccggaagcaatccaacgtcagcctcagacgactccaacggcctcgaatgggaaaatgatttcgtgtcagcagagatggatgataacggcaactctgaatactctggatttgtgaaccccgtcctggagctctcagatagcggcattaggcacagcgatacagaccaacaaacacggtag

SEQ ID NO: 27883 - DNA, 1371 bp, synthetic construct
  source 1..1371: mol_type = other DNA; note = Synthetic coding sequence
atgaagtgcgagcattgcaccaggaaggagtgcagtaagaagacgaagaccgatgaccaggaaaacgtgtctgcagacgccccttctccggcacaagaaaacggagaaaagggagaattccataagctggccgacgcgaagatcttcttaagcgactgtctcgcttgtgacagttgcatgacggccgaggagggtgtgcagctctcgcagcagaatgcaaaagacttctttagggttctgaacctgaacaagaaatgcgacacttcaaaacataaggtcctggtggtgagcgtgtgcccacaaagcttaccctacttcgcggctaagttcaatctgtccgtgactgacgcaagtagacggttgtgcggtttcctgaagtctctcggagtccactacgtgttcgatacaacaatagccgctgacttctctattctcgagtctcagaaggagttcgtgcgaagatatcggcaacattcagaagaagagcggacccttcccatgctaactagcgcatgtccgggatgggtccggtacgcagaaagggtgctcggcaggccaataaccgcccatctctgcactgcgaagtctccacaacaggtgatgggttctctggtgaaagactatttcgctaggcaacagaatctgtctcccgaaaaaatcttccacgtaattgtggccccttgctacgacaaaaaattagaagcgctccaggagagcctcccacccgctttgcacgggagcagaggcgctgactgcgtgttgacgtctggtgaaatcgctcagataatggagcagggtgacttgtccgtccgcgacgctgctgttgacaccctttttggggacctgaaagaagacaaggtaacaaggcacgacggggcaagcagcgacgggcaccttgcacacatttttcggcatgcggcaaaagaattgtttaatgaggacgttgaggaggttacctatagagcactccggaataaggacttccaggaggtgacgctcgaaaagaacggcgaagtcgtgctgaggtttgcggctgcttacggctttcggaacatccagaatatgattctgaagctcaaaaaaggcaagttcccttttcatttcgtggaggtgctggcatgtgcgggaggttgcctgaatggcagaggacaggcacagacaccagatggtcacgcagataaggctctcttgcggcagatggaagggatctatgctgatatccccgtacgtagaccggagtccagtgcccatgtgcaggagttgtaccaggagtggctcgaagggatcaactccccaaaagcccgagaggtactccacaccacctatcaatcacaggagagaggcactcactcactcgatatcaaatggtag

SEQ ID NO: 27884 - DNA, 612 bp, synthetic construct
  source 1..612: mol_type = other DNA; note = Synthetic coding sequence
atggcacacgtgtccagtgaaacccaggatgtttcacctaaggatgagttaactgcctcggaggccagcacgcgatccccactttgtgaacacaccttccctggggattccgacctgaggtctatgattgaggagcacgcctttcaggtgctgtctcagggttccttgcttgagtccccgtcatacacagtctgcgtcagcgagcccgataaggacgacgactttctgagcttaaacttccccagaaaactttggaaaattgtggagtctgaccagtttaaatccatctcttgggacgaaaatggcacttgtatcgtcattaacgaagagctgtttaaaaaagaaattttagagactaaggccccttaccgcatttttcaaaccgatgcaattaagtcttttgtcaggcaactgaatctctacggtttctccaagatccagcagaattttcagcgttccgcatttctggctacttttctcagtgaggagaaggaatcctccgtgctgtcaaagatacgatttactaagatgaagctgtcaagatcatcgacatatgaaaaccgttacttgtgctgtaatctgcacttgaaagatgaatctaactattcctag

SEQ ID NO: 27885 - DNA, 2052 bp, synthetic construct
  source 1..2052: mol_type = other DNA; note = Synthetic coding sequence
atgaacacctcaatcccctaccagcagaatccatacaatcctagagggagcagcaacgtgattcagtgctaccgctgtggcgacacttgtaagggtgaagttgtgagagttcacaacaatcattttcacattcggtgcttcacatgtcaggtctgcggatgtggtctcgcccagtccggattttttttcaagaaccaggaatatatttgcactcaggattatcaacagctttacggcaccaggtgtgacagctgcagagatttcattacaggcgaagtaatcagcgcgttaggccgaacataccaccctaagtgtttcgtctgcagcttgtgcaggaagcccttccctatcggcgacaaggtcacattttcaggcaaagaatgcgtctgccagacctgtagccagagtatggcaagcagcaagcccatcaagatccggggacccagccactgtgccggttgtaaggaggagattaaacatgggcagtccctactggcactggacaaacagtggcacgtttcctgcttcaagtgtcaaacctgctccgtgatcctgaccggagagtacattagcaaagacggggttccgtattgcgagagcgactaccacgcccaatttggaatcaagtgcgagacttgtgatcggtacatatccggcagggtactggaagccggtggtaagcactaccaccccacatgcgcaagatgtgttagatgtcaccagatgtttaccgagggtgaggaaatgtacctgactggaagtgaagtgtggcacccgatttgcaagcaagctgcaagagccgagaaaaaactgaaacacagacgaacatcagagacatcaatctcaccacctggaagtagtattggctccccgaatcgcgtcatatgcgccaaggttgacaacgaaatattgaactacaaagacctggcggcactccccaaggttaaatctatttacgaagttcaacgacccgaccttattagctacgagccacactcccgttacatgtccgacgagatgctcgaacggtgcggatatggagagtcgctaggtactttgagcccctacagccaggacatctacgaaaacttggacctcagacagagaagagcgtcatctcccggatatatcgattcgcccacctacagccgtcaggggatgtcccctacatttagtcggtcaccccatcactattataggtcaggtccagagtctgggaggtcttctccttaccatagtcaactggacgtgcggtcctccaccccaactagctaccaagcacctaaacattttcatattcctgcaggagattccaacatttatcgtaagccccctatttataaacgccatggcgacctgtccacagccaccaagtccaaaacttctgaggacatcagtcaaacctcaaagtactcccccatctatagtccagacccatactacgcttccgaaagcgaatactggacctatcatggaagccccaaggttcctagggctagacgtttctcaagcggaggtgaggaggatgactttgaccgctccatgcacaagctgcaatccggcatcggaaggctcattctcaaagaggaaatgaaggccagatcaagctcctacgccgacccctggaccccaccccgaagtagtacgtcctcccgagaggcacttcacacggccggatacgagatgagtctgaacggctcacctcgatcccactatcttgcggattctgatcccctcatatctaagtcagctagtttgcctgcttataggcgaaatggattgcatagaacaccttccgctgatctttttcattacgactctatgaacgctgtaaactggggcatgcgtgaatacaagatatacccttatgaactcctgcttgtgactactcggggaagaaacagattgccgaaggacgtcgaccgcactaggcttgaacgccatctcagccaggaagaattctatcaggtatttggcatgaccatttccgagttcgacaggctcgccctatggaaacgaaatgaactcaagaaacaggcgaggctcttttag

SEQ ID NO: 27886 - DNA, 2541 bp, synthetic construct
  source 1..2541: mol_type = other DNA; note = Synthetic coding sequence
atgctgttcacggttagctgctccaagatgtccagcattgtggaccgcgatgactccagtatatttgatggacttgttgaggaagacgataaggataaggccaagcgtgtgtccaggaacaaatctgaaaaaaagcgcagggaccaattcaacgtactgatcaaagaattaggttccatgttacctggtaacgcaagaaaaatggacaaatcaacggtgctccaaaaaagcatagatttcctgcgcaaacacaaggaaattaccgcccagtccgacgctagcgagatccgccaggactggaagccaacctttttgtcaaacgaagagttcacgcagctgatgctggaggctctggacgggttcttcttggccatcatgaccgacggctctatcatctacgtgtctgagtccgttacttccctgctggagcatctgccaagcgacctggtggatcagtccatctttaattttatcccagaaggcgaacacagcgaggtgtataaaatactgagcacccatctgctggaaagtgactctctgacgccagaataccttaaaagtaagaaccaattagaattttgctgtcatatgctgcgcggaactattgacccaaaggagccatctacttacgagtacgtcaaattcatagggaattttaaatccttaaactctgtttccagctctgcacacaatggcttcgagggcacaatccaaagaactcaccggccttcctatgaggaccgggtctgtttcgtagcgaccgtgcggctggccacaccccagtttatcaaagagatgtgtaccgtggaggaacctaacgaagagtttacctcccggcacagcctcgagtggaagtttctgtttctggaccatcgtgctccacccatcatcggctatcttcctttcgaggtgctggggacctccggctatgactactatcacgttgacgatctcgagaacctggcaaaatgccatgaacatctaatgcaatacgggaaaggaaaatcgtgttattaccgcttcctgacaaaagggcagcaatggatttggctgcaaacacattactatatcacataccatcagtggaatagcagaccagaattcattgtctgcacgcataccgtggtgtcttacgctgaggtgcgagctgaacggcgacgagagctaggcatagaagagtcattgccagaaactgcagcggataagtctcaggactcaggcagcgacaatagaattaatactgtctctctgaaagaggcccttgaacgctttgaccacagccccactccttccgccagctcccggtcgagccgtaagagcagccacacagcggtgtctgatcccagttccacgcccacgaagattccgaccgacactagtacccccccacggcaacatttgccggctcacgagaagatggtgcagcgccgaagcagcttctcatcccagagcataaattcacagtctgtcggcagctcccttacacagccagtgatgtcccaggcgaccaacctgccaatccctcagggcatgagtcagttccagttttcagcccaactgggagcaatgcagcatctgaaggatcagttggagcagagaacacgcatgatcgaggccaatatccaccggcaacaagaggagctgcgtaaaatacaggagcagctccagatggtccacggacagggcctacagatgtttttgcagcagagtaaccccggactgaacttcggatcagttcagttgtccagcggcaatagcagtaatattcagcaattggcaccaattaacatgcagggtcaggttgtgcctactaaccaaatccagagcggcatgaataccggtcatatcggcacaacccagcatatgatacaacaacagacacttcaaagtacaagtactcagagtcagcagaacgttctaagcggccattcccagcaaacgagcctgcccagccaaacccagagcacgttaactgcccctctgtataacaccatggtgatttctcagccggctgcgggaagcatggtccaaatacccagttcgatgccccagaacagtacccagtctgccgctgttaccacgttcactcaagatcgccagatacgtttttcccaggggcaacagctggtgaccaaactggttaccgccccagttgcctgcggcgctgttatggtgcccagcactatgcttatgggccaggtcgtgacagcttatccgacattcgccacccaacagcaacagtcccagacactctcggtcacgcagcagcaacagcaacagtcaagccaggaacagcagctgacttctgtccagcaacctagccaggcgcagctgactcaacctccgcaacagtttctgcagacatctaggctgctgcacggaaatccctctacccagctgatactgagtgctgcatttcctctccagcagtccaccttccctcaatcccatcatcagcaacatcagtcccagcagcagcagcagctcagtcgccaccggaccgactcacttcctgaccctagcaaggttcagcctcagtag

SEQ ID NO: 27887 - DNA, 1656 bp, synthetic construct
  source 1..1656: mol_type = other DNA; note = Synthetic coding sequence
atggggcgaaaagccattgtcctggctatcgcaaatacttccctcgccttcccgctttgccagcacctggtcaccttttgcttaggggaggacgatggcgtgcatacagtagaggatgcaagccggaagctggccgttatggacagccaggggagagtatgggcacaggagatgcttcttcgcgtctcacctgaccacgtcactttacttgaccctgcctcaaaggaagagttggagtcttatcctctcggcgcaatcgtgcgttgcgatgcggtcatgccacctggcagatctagaagcctcttgcttcttgtttgccaggagcctgagcgcgctcagcccgatgtgcacttctttcagggacttagacttggagccgaactaatacgtgaggatattcagggcgctctacataactatcggtccgggagaggagaacggcgagctgccgctcttcgagccactcaagaggaattacaaagggacaggagtccagctgcggaaaccccaccgctgcagaggcgcccttcagttcgcgcagttatctcgacagtggagcgcggagctgggaggggtagaccccaggccaaaccaattccagaggctgaggaagctcagcggccagagcctgtggggacttcctctaatgcagactccgcctctcctgatctaggtcctcgtggaccggacctcgccgtgctccaagctgagagggaagtggacatcctgaatcatgtttttgacgacgtagagtcttttgtttcgaggttgcagaagagcgccgaggcagccagggtgctggagcaccgtgagcgcggaaggcgctcgaggaggcgagcagctggcgaaggtttactcaccctgcgcgcaaaaccaccatccgaagctgaatatacagatgtgctgcagaagataaagtatgcttttagtctactggcacggctccgagggaatatagcagacccatcctcacctgagctcctgcattttctgttcgggccactgcagatgatcgtgaatacctccggcggaccagaattcgcctcctctgtgcgccgtccccatctcaccagcgacgctgtggcgcttctgcgggacaatgtgactcccagggagaatgagttgtggacgagcctgggggattcttggacccgtcccggtcttgagttgtcccctgaggagggacctccctacagacccgaattcttctctggatgggagccccctgtcacagatcctcagtcacgcgcatgggaagacccagtggaaaagcagctccaacatgagcgacgcaggagacaggttacccaggcaacacaacaggggagggggtgggaagtgagaggacgtgggcgtagcgcttggccgagactgaccagactgagctacttccttcaacagagcgcacctcaagtcgccgtaaatggccaccgcgacctggagcccgaaagtgagcctcagttagagagcgaaacagccggaaaatgggtgctgtgtaactatgattttcaggccaggaactcgagcgagcttagcgttaagcagagggacgtcctcgaggcgctgcaagacaaggaaaaagtttccgagctagaagccgtgatggaaaaacagaagaaaaaggtggagggagaggtggagatggaggtcatttag

SEQ ID NO: 27888 - DNA, 1689 bp, synthetic construct
  source 1..1689: mol_type = other DNA; note = Synthetic coding sequence
atggccgctagcgccaagagaaagcaggaagaaaagcatttaaagatgttacgcgacatgaccggtctcccacacaatcgcaaatgcttcgattgcgaccagagaggcccaacatatgtgaacatgacagtcggttcttttgtgtgcacaagctgttctggtagtttgagaggactgaaccctccccatagggtgaaatccatctccatgactacatttacacagcaggaaatagaattcctgcagaagcatggtaacgaggtgtgtaagcaaatatggctgggactgttcgacgaccggtcctcggccatccctgacttcagggatcctcaaaaagtgaaagaattcttgcaggagaagtatgaaaaaaaacgctggtatgtgcctccagagcaagccaaggtggtcgcctctgtacatgcgtcaatttctggtagttctgcctcctccacaagctccacccccgaggttaaacccctaaaaagtttattgggagattcggcaccgacattgcatctgaacaagggtactccttctcagagcccggtagtggggaggtcccaggggcagcagcaggaaaagaagcagtttgacctcttatcagacctggggtccgacatcttcgcggcacccgcaccacaatccactgcgacagctaactttgcaaacttcgcacacttcaattcccacgcagcccagaattctgcaaacgcagacttcgctaatttcgatgcctttggtcagagctctgggagtagtaacttcggaggctttcctactgcatcacactccccgttccagccccaaactacaggaggcagcgctgcttcagtgaatgcaaacttcgctcatttcgataattttcctaaaagttcatccgcagatttcgggacgtttaatacctcccagtcccaccagacggcctccgccgtgagcaaggtgagcacaaacaaagcagggctgcagaccgccgacaaatatgccgctttggccaacctggacaatattttctcagctggacaagggggtgaccaggggagcgggttcggtacaacaggcaaggcgcctgtgggctctgtcgtatctgttccctcacagtcaagcgcctcttccgataagtatgcggctcttgccgagctcgattctgtgttctcaagtgctgcgacatctagcaatgcatacacgtctacatccaacgccagctctaatgtgttcggcacggtgccagtggttgcttcagcacagacacagcccgcttcctcttcagttccggctccttttggagctacaccttccacgaatcccttcgtggccgctgccggtccgagtgtagcatctagtacaaacccgttccaaactaacgcgaggggggctaccgcagctacttttggtactgcttccatgagcatgcctacaggcttcgggacccccgcaccctacagtctgcctacatccttcagtggctcgtttcagcaacccgctttcccagcccaagctgcctttccccagcagacagcatttagtcagcaaccgaatggggcaggatttgcagcgttcggccagactaagcctgtcgtcactccattcgggcaggtggctgcggcaggagtgagcagtaatccctttatgacgggcgctcctacaggccagttccccaccggctcaagctctacaaatcctttcctctag

SEQ ID NO: 27889 - DNA, 2052 bp, synthetic construct
  source 1..2052: mol_type = other DNA; note = Synthetic coding sequence
atggctgcagctgtggcagcgcctctcgcagcagggggtgaagaggcagccgcaaccacctcagttcccggtagccccggtttacctggtaggcggagtgctgagagagctctggaggaagccgtcgctaccggcacattgaacctctctaatcgcagactgaaacacttccctcgtggcgctgctcggtcctatgatttgtcagatatcacgcaagccgatttatcacgtaatagattcccagaagtacccgaggccgcatgccaactggttagcctggagggcctgtcactctaccataactgcctaagatgtctcaaccctgcacttggaaatctgactgccttgacttacttgaacctgtctcgcaaccagctgagtctactgcccccatacatctgccaactgcccctgcgggtactgatcgtgtcaaataataagcttggcgctctcccacccgatataggtactcttgggtccctgagacagctagatgtgtctagcaatgagctgcagagtttgccaagtgagctgtgcggcctcagctcgttacgagacctaaacgtccgcagaaatcaattgagcaccctccctgaagagctgggggatcttcctcttgtccgtctggatttcagttgtaatcgagtgtcccgtatccccgtcagtttttgccgcctcagacacttgcaggttattcttctcgactcaaaccctcttcagagccctcctgctcaggtatgtttgaagggtaaactccacattttcaagtatctttcaacagaagcgggacagagaggttctgccctgggggatctcgctccttccagacccccatcattttcaccatgccctgctgaagatctgtttccgggtcaccggtacgacggtgggctggactctggattccactcagttgacagcggcagcaagcgctggagtggcaacgagtccaccgatgaatttagtgagctcagtttccgcatcagcgaactagccagggagccccgaggtccaagagagcggaaggaggatggatcagcggacggggaccccgtgcagatcgactttattgacagtcatgtcccgggagaggatgaggaacggggtacagttgaggagcagagaccacctgagctgtctcctggggcaggtgaccgcgaacgggctcctagttctcgacgggaggagcctgctggcgaagagcgaagaaggcccgacacgttgcagctgtggcaggagcgtgaacggagacaacagcagcagagcggcgcatggggagctcccagaaaagattctctgctcaaaccagggctcagagccgttgtgggaggggcagctgccgtcagcacccaggctatgcataatggcagtcccaagtcctcagcctcacaggccggtgctgctgccggacagggcgctccagcccctgcccctgcctcacaggagccactccctatagctggtccagcaaccgctcccgctccaaggcctctcggaagtattcagcgcccaaactccttcctctttaggtctagctcccaaagtgggagtggaccctcttcccccgatagtgttttgcggccaaggagatacccacaagtgcccgatgagaaggatctcatgacgcagttgagacaggttctcgaaagcaggcttcaacgccctctgccggaagatctggcagaggccttagcatcaggagtgattctgtgtcagctggccaatcaactgaggccgaggtctgtcccattcatacatgtgccaagccctgccgttcccaagttgtcggctctgaaagccaggaagaacgtggagtcttttctggaagcatgcaggaagatgggcgtgccagaggctgatctgtgttctccgtccgatctcctccagggcacagccagaggattaagaaccgcactcgaggctgtgaaaagggtaggcggaaaagccctgccacctttatggccccctagcgggctgggaggtttcgtggtgttttacgtcgtacttatgctcctgctgtacgttacttacacacgactgctgggctcatag

SEQ ID NO: 27890 - DNA, 303 bp, synthetic construct
  source 1..303: mol_type = other DNA; note = Synthetic coding sequence
atgtctacctccacttcctgtcccattcctggcggtcgcgaccaacttcctgactgttattcaactaccccagggggtacactctatgctactacacccggaggcacacggataatttacgatcgaaaattcctgctggaatgcaaaaactcccctatcgcgaggaccccaccttgctgtctcccacagataccaggggtaacaactcccccaaccgctccactgagtaaactggaggaactcaaggaacaggagaccgaagaggagattccagatgatgcgcaatttgagatggacatttag

SEQ ID NO: 27891 - DNA, 2382 bp, synthetic construct
  source 1..2382: mol_type = other DNA; note = Synthetic coding sequence
atgccaatggagagtgcctctagtgataacaaaaagcagatacccaacgaggccagtgcaaggagtgagagagacacttccgatctagagcaaaattggtcactccaggaccactaccggatgtattcaccaatcatctatcaagcactgtgtgagcacgttcagacgcagatgtctctgatgaacgacctgacatcaaaaaatatccccaacggcatcccagccgtgccttgtcatgctcccagtcacagcgagagccaagccacaccacactcaagctacgggctctgtacctcgactcccgtatggtccctgcagcggccaccatgtccacccaaagttcattcagaagtccaaaccgacgggaatagccagttcgcttcacaaggtaagactgtgtctgctacctgtaccgacgttctccggaacagctttaatacatcgccaggtgtcccctgtagcttacctaaaaccgatatctccgccatccccaccttgcagcagttaggtctggtgaatggcatattgccacagcaggggatccacaaggaaacagatctacttaagtgcatccagacttacttgtccctttttcgctctcacggtaaggaaactcaccttgattctcagacacatagaagtccaacacagtcacagccggcatttctcgcaacaaacgaagaaaagtgtgctcgggagcaaattagggaagcaacctctgaaaggaaggacctcaatatccacgtgcgagataccaagaccgtgaaagatgtgcagaaggccaagaatgtgaataagacagcagaaaaggtgcgtatcattaaatatcttctgggtgagctgaaagctttagtggctgagcaggaggacagcgaaatccagcggctgattaccgaaatggaggcctgtatcagtgttctgccaacagtgagcggaaatactgacatccaagtcgagattgctttggctatgcagccattgaggtcggagaacgcacagttgcgtaggcagctgcggatactgaaccagcaactcagggagcagcagaagacacagaaaccttcaggcgctgttgactgtaatcttgagctcttttctttgcaatcactcaacatgtccctgcagaatcagctggaagagtctctgaaatcacaggagctattgcagagtaaaaatgaagaactgctcaaggttatcgagaatcagaaagacgagaacaagaagttcagttcaatttttaaggataaggaccagacaatcctcgagaataaacagcagtacgatattgagatcaccaggattaagatcgagctggaggaggctctggtcaacgtcaagtctagccaatttaaactagagactgcagagaaggaaaatcaaattctcggtatcacactgaggcagcgagacgccgaggttactaggctgagagagctgacacgcacactgcagacctctatggcaaagctcctgagcgacctgtccgtggatagcgctcgttgcaaacctggcaataacctgaccaaaagtctcttgaacatacacgacaaacagctccaacatgatcccgctcccgctcatacaagcataatgtcctatctcaacaagctcgagacgaattatagtttcacacacagtgagcctttatctaccatcaagaatgaggagacaattgaacctgacaagacctacgagaacgtgctgtcctctcggggacctcagaacagcaacacccgaggcatggaggaggctagcgccccaggcatcatttctgccctatccaaacaagattctgacgagggatctgaaacaatggcccttatagaagacgaacacaaccttgacaacactatttatattccttttgcaaggtccacgcccgagaagaaatctcctctctccaagaggctctctccacaaccacaaatacgggctgcgaccacccagctggttagcaattcagggttagccgttagcggaaaggagaataaattatgtacacccgtgatttgctctagcagcaccaaagaggcagaggacgcgccagaaaagctgtctcgcgcttcagatatgaaggacacacagctattaaaaaagataaaggaggcaatcggcaagattcctgcagccacaaaggaaccggaggagcaaaccgcttgccacggtccttccgggtgcctctccaattcactccaagtgaaaggcaataccgtatgcgatggttccgttttcacttcggatttgatgtctgactggtcaatttcaagtttctcaacctttacgtcccgggacgaacaggactttaggaacggcctggccgctctggacgcaaacatagcacggctacagaagtccctccgtactggcctgttggagaaatag

SEQ ID NO: 27892 - DNA, 1119 bp, synthetic construct
  source 1..1119: mol_type = other DNA; note = Synthetic coding sequence
atgaccttccagtttaacttcactatagaggatcatctcgagaacgaacttactcctatacgagacggggctctgactctagactcctccaaggaactctctgttagcgaatcacagaagggagaggagcgcgataggaagtgcagcgccgaacagtttgacctcccccaagaccacttatgggagcacaagtcaatggagaatgccgctccaagccaagataccgacagtcctctctcagcagctagcagttcgcgaaatctcgagcctcacgggaagcagccctctctacgcgctgcaaaagagcacgcgatgcccaaagatctgaagaaaatgctcgagaacaaggttatagagaccctgcccggattccagcatgtgaaactgtccgttgtgaaaactatcctgcttaaggaaaatttcccgggagagaacatcgtgagcaagtctttttcatctcattccgatctcattaccggggtatacgaaggcggtctgaaaatttgggagtgtacattcgaccttttggcctactttacaaaagcaaaagtgaagttcgccggtaagaaagtcctcgatctgggctgcggctccggactgcttgggattaccgcttttaagggaggcagcaaggagatacacttccaggattacaactcgatggtcattgacgaagtcacactccccaatgtagtggccaattccactctggaggacgaggaaaacgatgtgaatgaacctgatgtcaaacgctgtagaaagcccaaagttacccaattgtataagtgtagatttttttctggcgagtggtcagagttttgtaagctggtgttgtctagcgagaagctgttcgtgaaatacgatctcatcctgacctccgaaactatctataacccagactattactccaacctgcaccagacatttctccgccttctgtccaagaatggacgcgtgctgttggcaagtaaggctcactactttggtgtgggcggtggtgtacacttattccagaagttcgtggaggaaagggacgtcttcaagaccagaatcctgaagattatcgacgagggactgaagagatttatcatcgagattaccttcaagtttcccggatag

SEQ ID NO: 27893 - DNA, 336 bp, synthetic construct
  source 1..336: mol_type = other DNA; note = Synthetic coding sequence
atgactacactgcgggcattcacctgtgacgatctctttagatttaacaacattaatctggatccactgacggagacttacgggatccctttctatctgcagtacctcgcccattggcctgaatatttcattgtagctgaagccccagggggagagctgatgggctatattatgggaaaagcagagggtagcgttgccagagaagaatggcacggccatgtcaccgctctgtcagtggctcccgaattccgcagactgggcctcgccgctaagctgatggaactgctggaagagatcagcgaaaggtatgaggagtctactttccagggctattag

SEQ ID NO: 27894 - DNA, 1449 bp, synthetic construct
  source 1..1449: mol_type = other DNA; note = Synthetic coding sequence
atgaatggcacattggatcacccagaccaacctgatctggatgctatcaagatgtttgtgggacaagtccccaggacttggtccgagaaagatctgagggagctctttgagcagtacggggcagtatacgagatcaatgtgctgcgagacagaagccagaatccccctcagtcaaaaggttgctgcttcgtaacattctacacgcgaaaagcggctctagaggcccagaacgcacttcataacatgaaagtgctaccgggtatgcatcaccccattcagatgaaaccagctgactccgagaaaaacaacgccgtggaggacaggaagctgttcataggcatgatatcaaaaaagtgtaccgagaacgacatccgtgtgatgttcagcagtttcggtcagattgaagagtgtaggattctccgtggccctgatgggttgtctcgcggatgtgccttcgtgacctttaccactcgggctatggctcagaccgcaataaaggccatgcatcaggcccagactatggagggttgttccagtcctatggtggtgaaattcgctgacacacaaaaggataaggagcagaaaagaatggctcagcagctgcagcagcagatgcagcagatttctgccgctagcgtctggggtaatctggccggactcaataccctaggacctcagtacctggcgctcctgcaacagacagctagttccggcaacctgaatacattatcgtccctgcaccccatgggcggtcttaatgccatgcagctgcagaacctggctgcattggctgcagcagcctctgcggcacaaaacaccccttcagggacgaacgctcttacaacctctagtagtccactgagtgtgctaacatcctcagggagtagcccgagctcaagctcgagcaactccgtgaaccctatagcctctctgggggctctccaaaccctcgcaggagctacagccggtttaaacgtgggttccctggctggtatggcagctttgaatgggggactggggtcaagtggcctgtccaacgggaccggatcaaccatggaggccttgacccaagcttattccggaatacagcagtatgctgcagccgctctcccgacactatacaaccaaaatctgctaactcagcaatctattggtgcagccggatcacagaaagagggacctgagggtgcaaacttgtttatttatcatttgccacaggagttcggagatcaagacctcttacaaatgtttatgccgttcggtaatgtagtgtctgccaaggtgttcatcgacaagcagacgaatctaagtaaatgctttggtttcgtgagctatgataaccccgtgtcagctcaggcagcaatacagtcaatgaacggttttcaaatcgggatgaagagactgaaggtccagctgaaaaggtctaagaacgactctaagccgtactag

SEQ ID NO: 27895 - DNA, 1347 bp, synthetic construct
  source 1..1347: mol_type = other DNA; note = Synthetic coding sequence
atgtctcccctggagtgcagcgaatgctttggagatcagctgcttcaccgcacttatacttggcagcttactctgcactctcgaccgaactacacccggaagagagatacccgctctgagagcctggaaataccgatctcagtggtgctgccgcagcgaggtactgccgagccatttccccgactgcacaacctatactcgacaccgcgatgtgcacagcaggctgccctgcccagactttctcgaaggatggcctcccagcattcttatcctctgaacaggttttcttctgtacccctggatcctatggaaagacccatgagccaggcagacctcgaactcgactacaacccaccgcgtgtccaactgtcagacgaaatgttcgttttccaagatggcagatgggtcaatgaaaactgccgcctacagtctccgtatttttcgccctcagcatcatttcatcacaagctgcaccacaagcgcctggctaaggagtgtatgctccaggaagaaaataagtccctccgggaagaaaacaaagcgcttagagaagagaacagaatgctttccaaggaaaataaaattctgcaagtgttctgggaggagcataaggctagcctcggccgtgaagaaagccgcgctcccagtcctctgctccataaagattctgccagtctggaggtcgtaaagaaagaccacgttgcattgcaggtaccgcgtggaaaagaagatagcacgctacagttactgcgagaagaaaatagagccctgcaacagctcctcgagcagaagcaagcttactgggctcaggcggaagacactgctgcacccgctgaggaaagcaagccagctcccagtccccatgaagaaccttgctcccccggactcctgcaggaccagggatccggcctgagctccaggtttgaggagcctaagggcccaccagccaggcaggaggacagtaaggaacttcgggctcttcgaaagatggttagtaacatgtctggaccttctggagaggaggaggcgaaggtagggccagggctgccagatggctgtcaacctctgcagctcctgagggagatgcgacaagcgctgcaggccttgcttaaggaaaatagacttttacaggaagagaacaggactctgcaggtccttagggcggaacacagaggttttcaggaggaaaacaaggccctgtgggagaataataaactgaagttgcagcagaaactcgtgatcgacacagttactgaggtaactgcgcgaatggaaatgttgatcgaggagctctacgcattcatgcctgcccgatctcaggatccgaaaaaacctagccgagtctag

SEQ ID NO: 27896 - DNA, 1002 bp, synthetic construct
  source 1..1002: mol_type = other DNA; note = Synthetic coding sequence
atggcagcagcagcagccggtaccgcaaccagccagaggttttttcaaagcttcagtgatgccctgattgatgaggatccacaggcagccctggaggagctgactaaggctctggagcagaaaccggatgacgcacagtattactgtcagagagcctattgccatatcctgctgggaaactactgcgtggcagtagcagacgcaaagaaatcactggagctgaaccctaataacagcacagcaatgctgaggaaagggatctgcgaataccacgagaagaactacgcagcagctctggagacctttaccgagggccaaaagttggacagcgccgatgccaacttcagcgtgtggatcaagcgctgccaagaagctcagaacggtagcgaatcagaagtctggacccaccaaagcaagatcaagtacgattggtatcaaactgaaagtcaggtcgtcattacgctgatgataaaaaatgtccaaaaaaacgacgtaaatgtagagttcagcgagaaggaactttcggccctggttaagctgccgagcggcgaggactataatttgaaactggagcttctgcaccccattatacccgaacaaagcacctttaaagtcttgagcactaagatagagataaagctgaaaaaaccagaagctgttcgctgggagaagctcgagggtcagggggacgtgcccaccccaaaacagtttgtggctgatgtgaaaaatctgtatcctagttcaagcccttatacgcgcaattgggacaaattggtaggagagatcaaggaagaggaaaagaacgaaaaactcgagggagatgctgctttaaacagactttttcaacagatctactccgatggcagtgacgaagttaaaagagctatgaacaagtcttttatggagagcggagggactgtgctgagtacgaactggtcggatgtgggcaagcggaaagttgaaatcaatcctcctgatgacatggaatggaagaaatactag

SEQ ID NO: 27897 - DNA, 1029 bp, synthetic construct
  source 1..1029: mol_type = other DNA; note = Synthetic coding sequence
atgtctctacacggaaagcgaaaggaaatttataaatatgaggccccatggacagtctacgctatgaactggagcgttcgccctgacaagaggtttcggctcgcccttgggagcttcgtggaggaatataataacaaagtccaactggtgggtctggatgaggagtctagtgagttcatttgcaggaataccttcgatcacccctaccctacaaccaagctgatgtggatccctgatacaaagggtgtctacccagaccttctggccacctctggcgactatctgcgggtgtggcgggtgggggagacggagactcgactcgaatgcctgttgaataacaacaaaaatagtgacttctgtgctccactcacaagctttgattggaacgaagtggacccctatctgcttgggacaagctctatcgacacaacgtgcactatttggggattggagaccggtcaggtcctcggtcgagttaacctagtatcagggcacgtgaagacgcagctcatcgcccacgacaaggaagtttacgatatcgcctttagccgggcagggggtgggagggacatgtttgcttctgtcggtgccgacggctcggtgcggatgtttgacctcagacacctggagcattctactattatctatgaggacccccagcatcaccctcttttgcggctttgctggaacaagcaggatccgaattatctggctacaatggcaatggatggtatggaggtagtgatcctggacgtgcgcgtcccatgtaccccagtcgccagactgaacaaccacagggcctgcgtcaatggcatcgcctgggcaccacacagctcctgccatatctgcacagccgcagacgaccatcaggctttaatttgggatatccagcagatgcctcgtgccatcgaggacccaatactcgcttacacagcagagggggaaataaacaacgtacagtgggcctcaacacagccagattggatagccatttgctacaacaactgtttagagattctgcgggtttag

SEQ ID NO: 27898 - DNA, 507 bp, synthetic construct
  source 1..507: mol_type = other DNA; note = Synthetic coding sequence
atggccgagggctcgcgcatccctcaagctcgcgcactactgcagcagtgtctccacgccaggctacagatcaggcctgccgacggagacgtggcagctcaatgggttgaggtgcagagaggcctcgtgatctatgtgtgcttctttaaaggggcagataaggaactgctacccaagatggtaaacacgcttctcaacgtcaagttatccgaaactgagaatggcaaacatgtgtccatcttggaccttccaggcaatatccttattattccccaggccacgttgggcggacgactgaaaggcagaaacatgcagtaccatagcaatagcgggaaggaggagggatttgagctgtattcccagtttgtgactctgtgtgagaaggaagtagcagctaacagcaagtgtgcagaagccagagtggtggtggagcacgggacttatggcaaccggcaggtcctgaaactggacactaatggaccatttacccacctgatcgagttttag

SEQ ID NO: 27899 - DNA, 3069 bp, synthetic construct
  source 1..3069: mol_type = other DNA; note = Synthetic coding sequence
atggagggggctttaactgcacgagacaaggtgggtgtgcaggacttcgtattgctggacgcttacacatccgaatccgcatttgtggacaatctccgaaagcgcttcagcgagaacctgatctacacgtatattggtaccctcctcgtaagtgtgaatccttatcaggaactgggcatctacactgtgagccagatggagctttatcagggggttaattttttcgagctcccgccacatgtgtacgctatcgccgacaacgcctaccgcatgatgtgtgccgaactgaataatcactttattctcatttccggggagagtggggcagggaagacggaggcatctaagaagatactggagtacttcgcagttacttgcccaatgacccagtctctacagatcgccagggaccggctgctgttcagcaatcccgtccttgaagcttttggtaacgctcgaacacttaggaatgataattcctccagatttggtaagtatatggatatacagtttgacttccagggtatcccagtggggggacacattattagctatctcatcgagaagagccgggtggtttaccagaatgagggcgaacggaacttccatatcttctaccagctgcttgcgggtggtgaggaagagcgtctttcctatttgggcctcgaacgggaccctcaactgtacaagtaccttagtcagggtcactgtgccaaggagtcctccatcagcgataagaacgattggaaaactgtttccaacgcgttctccgttatagacttcacggaagcggatttggagaatctcttcggcatcatcgcaagcgtgctccacctgggaaacatcgggttcgaagaagacgaccagggctgcgctacaatccctgacacccacgaaatcaagtggatcgcgaagctgcttggcgttcacccttccgtcctcctggaggcccttacccaccgtaagattgaggccaagactgaagaggtgatctgcccactgacacttgagctctccgtgtatgctagggacgctatggcgaaagcagtgtatgggcgtacattcacttggcttgtgaataagattaactcttctttagtcaacaaagactttacccggaagacggtgattggcctgctggatatctacgggtttgaggtcttcgataagaacgggttcgaacagttctgcatcaattactgcaatgaaaaattgcagcaacttctgatcgagcgcaccctgaaagctgagcaagccgagtatgagatggagggcatcgagtgggagccaattaaatacttcaataataaaatcatctgcgaccttgttgaggagaggcacaaagggatcatctcaatcctggacgaggaatgcatcaggcccggacccgcaactgacctgagctttcttgagaaacttgaggagaaagttggtaagcacgcacactttgagaccaggaaattagccggtcccaagggacgaaagaggatcggatggatggagttcagattattgcattacgctggggaagttacttactgtaccaaagggttcctggagaagaacaatgatctgctctataggcatttgaaagaggttctgtgcaagagcaagaatataatactgcgcgagtgcttcctgctggctgagctcgagaatcgccgacggccaccaactgtgggcacacagtttaagaacagtttgtcatccctgctggaaactttaatctcaaaggaacccagctacatacggtgcataaaacccaacgacagaaaggaaccctcaaaattcgatgacttcctcattcgacaccaaattaagtacctgggtctgatggagcatttacgcgtccgacgcgctggctttgcgtaccggcgtaaatatgagcatttcctacaacgctacaaaagcctgtgccctgacacgtggccccattggcatggacctcctgcagagggtgtcgagagactgattaagtacataggctacaaacccgaggagtataagctcggaaagactaagatattcatacggtttccgcgaaccttgtttgccacggaggatgccttcgagttctcgaaacaccagctggtcgctaggatccaggccacctataagagatgcctgggacgacgggagtacgtaaagaagagacaagctgccatcaagctcgaggctcattggagaggggctctcgccaggaaggccatacagcgtaggaaatgggccgtccgtatcatcaggaagtttataaaaggcttcattagcaggaataaacctctgtgtcctgacaacgaagagtttatcgtgtttgtgagaaaaaattacatcctgaaccttaggtaccacttaccaaagacggttctggataagtcttggttgcgacctcccggtattcttgaaaacgcttcagacctgctacgcaagatgtgtgtgagaaatcttgttcaaaagtactgtcgcggaattactgcagaacgaaaagctatgatgcagcagaaggtcgtgacaagtgagatatttcggggaaggaaggacggctatacagaaagtttaaaccagccattcgtgaacagcaggatagatgagggcgacattaatccaaaggtgttgcagttgatttctcacgagaagatccagtacggtgtcccagtgattaagtatgaccgcaagggttttaaggctcgtcagagacagctcatcctaacccagaaggccgcatacgtggtggagcttgccaaaatcaagcagaagatcgaatactctgctcttaaaggcgtctccacgtccaacttgagcgatggcatacttgtgatccacgtctcacccgaagatagcaagcagaagggcgacgctgtgttacaatgcggacatgtttttgaggctgtgacgaagctggtgatgctggtcaaaaaagaaaacatcgtgaatgtcgtccagggaagcctgcagttttttatctctccaggcaaagagggtaccattgtgtttgatacagggctagaggagcaggtttataaaaataaaaacggacagctcaccgttgtgtctgtgcggaggaagtcttag

SEQ ID NO: 27900 - DNA, 1044 bp, synthetic construct
  source 1..1044: mol_type = other DNA; note = Synthetic coding sequence
atgaatactcttatggatgttctgcgccaccgcccagggtgggtggaggtcaaagatgaaggggagtgggatttctactggtgcgacgtctcatggctgagggagaactttgaccacacatacatggatgaacacgtcagaatcagtcatttcagaaatcactacgagttgaccaggaaaaattatatggtgaagaatctgaagcgattcagaaaacagttagagagagaggccggaaagctggaagcggctaagtgcgatttctttcccaagacattcgagatgccctgcgagtaccacctgttcgtagaagaattccgcaagaatcctggcatcacttggatcatgaaacctgttgctcggagtcaggggaaaggcatcttcctgtttagaagattgaaggacattgtagattggcgcaaggatacccgcagctccgacgaccaaaaagacgatatacctgtggagaactatgtggcccagagatacatcgaaaacccttacctgattggcggaaggaagtttgacttacgagtctacgttctggtgatgtcatatattccccttcgggcatggctttaccgcgacggtttcgccagattcagtaacactcggtttaccctcaatagtatagatgatcagtacgtgcacctgaccaatgttgctgtgcagaagacaagcccagattatcacccgaaaaaaggatgcaaatggaccctgcaaagattccggcagtacctagcctccaaacacggccctgaggctgtcgagaccttatttagggatatcgataatatcttcgtgaaaagcctgcagtcagttcaaaaagttatcatatctgacaaacactgcttcgagctctatggatacgacatccttatagaccaggacttgaaaccttggctccttgaagtgaacgccagtcctagcctgactgcttcctcgcaagaggactacgaattaaagacatgcctgctcgaagacacactgcacgtcgtggatatggaggcaagatcactgagagccgattctccatgttggtag

SEQ ID NO: 27901 - DNA, 444 bp, synthetic construct
  source 1..444: mol_type = other DNA; note = Synthetic coding sequence
atgtcctcagaacctccacctccaccccagcccccaacccatcaagcaagcgttgggttgcttgatacccccagaagccgcgagaggtcaccgagccccctcagaggcaatgtcgtccctagccccctgccaacacggcgtacccgaacattctctgccaccgtgcgtgcctcccaggggcctgtgtacaagggcgtgtgcaagtgtttctgtcgtagcaagggccacggcttcattaccccggcagacggtggacctgatattttcctccacataagcgatgtggagggggagtacgtacctgtcgaaggggacgaagtcacctacaagatgtgctcaattcccccaaaaaatgaaaaactgcaggccgtagaggttgtcatcactcacctagcaccgggaacaaagcacgagacctggtcaggacacgttattagctcctag

SEQ ID NO: 27902 - DNA, 558 bp, synthetic construct
  source 1..558: mol_type = other DNA; note = Synthetic coding sequence
atggccgacggaggcggtggcggtgggacaggggctgtgggcggaggcggtacctcacaggcgtctgccggtgctgccaccggcgctaccggtgcttccggaggcggtgggccaattaaccctgcatcattgccccctggggatccccagctcattgccctcatcgttgaacagttgaaatccagggggcttttcgatagtttcaggcgcgactgtctggctgatgtcgatactaaacctgcctaccagaatcttcgccagaaagtggacaatttcgtgagcacgcacctggataaacaagagtggaaccccaccatgaataagaatcagctgagaaatggcctcagacagtctgtcgtccaaagcggcatgttagaagcaggcgtggatcggattataagtcaagttgtagaccctaaacttaaccacatattcaggccccagatagagagagccattcatgagtttctcgccgcacaaaagaaagcagctgttccagcacccccacctgagccggaaggacaggatcccccagccccatctcaggacacttcttag

SEQ ID NO: 27903 - DNA, 6351 bp, synthetic construct
  source 1..6351: mol_type = other DNA; note = Synthetic coding sequence
atggatgaggtcgaacaggaccagcatgaggccaggcttaaagagctgttcgactctttcgacacaacgggtaccggatccctaggacaggaggagctcacagacttgtgtcatatgttgtctctcgaggaggtggccccagtgcttcagcagacacttctgcaggacaacctgttgggcagggtgcactttgaccaatttaaggaggcactcattctaatcctttcacgcaccttgagcaacgaagaacattttcaagagcctgactgtagcctcgaggcccaaccgaagtatgttaggggcggtaagcggtatgggcgacggtccctcccggaattccaggagagtgtagaggaatttcctgaggtgaccgtgatagagccactcgacgaagaagctagaccgtcccacatacccgctggcgactgctccgaacactggaagactcaaagaagcgaagagtacgaagctgagggacagctgcgcttctggaatcccgatgatctgaatgcttctcagtccggctcatcacccccacaggactggattgaagagaaactgcaagaggtgtgtgaggatctgggaataaccagagacggccacctgaatcgcaagaaacttgtctcgatctgcgagcagtacgggctccagaacgtggatggggagatgttagaggaagtgttccataacctcgacccagacggaaccatgtcagtggaagacttcttttatggtctgtttaaaaacggcaagagcctgacgccgtcggcctctacaccgtaccgtcagctcaaacggcatttgtcgatgcaaagctttgatgaaagcggcagacggaccactacaagttcagctatgacatccacgataggtttccgggtgttcagttgccttgatgacgggatgggacatgcgagcgtcgagcgaatcttggacacctggcaggaagaaggaattgaaaattcacaagaaattctgaaagccctggactttagtcttgatggcaatattaatctgaccgagcttacgctggccctcgagaatgagttgttggttactaagaactctatacatcaggccgcacttgcgagcttcaaagcagagatccgccatcttcttgaaagggtggaccaggtagtgcgcgaaaaggagaaactccggagcgacctggacaaggccgagaaactgaagtccctcatggccagcgaagttgacgatcaccatgctgctatagagaggcgcaacgagtataacctccggaaactcgacgaggaatacaaagagcgaatagctgcacttaaaaatgagctccgaaaagagcgcgagcaaattctgcagcaggctgggaaacagcggctcgagcttgaacaggagattgaaaaagctaaaaccgaagagaattatatccgagaccgcttggccctgtcactcaaggagaattcaaggctggagaatgagttgctggaaaatgcagagaacgttcttgctgagaaattcggcgacctcgatccttcgagcgccgagttcttcctgcaggaggagcgattaacccagatgcggaatgagtatgaacgtcagtgtagggtgctgcaggaccaggtggatgagctgcagtcagaactggaagagtatcgggcacaggggagggttctccgacttccgctcaaaaattccccttctgaggaggtagaagccaactctggtggaatcgaaccagagcacgggctgggttcggaagagtgtaatccactgaacatgtcaattgaagccgagctcgtgatcgagcagatgaaggaacagcaccaccgggatatctgctgccttaggttggaactcgaagacaaggtgcggcattatgagaagcagctggatgagactgtcgtaagttgtaaaaaagctcaagaaaacatgaaacagcgccacgaaaatgagactcacaccctcgagaagcaaattagtgatctgaagaatgagatcgctgagctgcaggggcaggccgctgtgctgaaggaggcccatcatgaggctacgtgtcggcacgaagaagagaagaagcagcttcaggtgaagctggaagaggaaaaaacccacctccaggaaaaactcagacttcaacatgagatggagctcaaagcacggctgacccaggcccaggcgtcctttgaaagagaacgagaaggcctgcagagctccgcctggacagaggagaaggtccgcggtcttacacaggagctggagcagttccatcaggaacaattaacttccctggtcgaaaagcatactctggaaaaagaggaacttagaaaggagctgcttgagaagcaccagcgagaactgcaggaaggcagagagaagatggagactgagtgcaatagacgcacctcccagattgaggcccagtttcagtcagactgtcagaaggtgacagagcgatgtgagtcagccctgcaatcgcttgagggacggtaccgtcaggaattgaaagaccttcaggagcagcaacgcgaagaaaagtcccaatgggagtttgaaaaagatgagttgactcaggaatgtgccgaagcccaggagctgttaaaggagacactcaaacgggaaaaaacaactagcctggtgctgacccaagagcgagaaatgctcgagaaaacatataaagaacacctcaattcaatggtggtggagcgccaacaactacttcaagacttggaggatctacgaaacgtatccgagacccagcagtccctgctgagcgatcagattctggaactcaagagctctcacaaacgcgaactaagagagagagaggaggtgctctgtcaggccggagcatctgaacagctcgcctcacaacgactagagagactggaaatggaacatgaccaggagcgccaggagatgatgtccaagttactggcaatggagaatattcacaaggccacttgcgagacagcggatagagaaagagctgagatgagcacagaaatatccagactgcagtcgaagattaaggagatgcagcaggctacctcccccctttcaatgctacagagcgggtgccaggtgattggggaagaagaagtggagggggatggagccctgtctctactgcagcagggagagcaattgcttgaagagaacggggacgtcttgctctcactgcagcgggctcacgaacaggcggtcaaagaaaatgtgaaaatggccaccgagatctccagattacagcagagactccagaagttagagcccggtctggtgatgtcctcatgtttggatgaaccggcaaccgagttctttgggaacaccgccgagcaaacagagcagtttctgcagcaaaatagaactaaacaggtggaaggagtgacccgccgtcatgtgctgtcagatcttgaggacgatgaggtccgagacctcgggagtacgggcacctctagcgtgcaacgacaggaagtcaagattgaagagtcagaggcctccgtggagggatttagcgagcttgagaattctgaggaaactcgcacagaaagctgggagctgaagaatcaaatctcacagctgcaggagcagttaatgatgctgtgtgccgactgcgaccgtgcctcagagaaaaaacaggatctactgtttgatgtatcagtgctgaaaaagaagcttaaaatgttggagcggattccagaggcctctcccaagtacaaactgctgtatgaggatgtgagtagagagaatgattgcctgcaagaggagctccgcatgatggagactaggtacgatgaagccctcgaaaacaataaggagctgaccgcagaagtgttcaggttgcaagacgagttgaagaagatggaagaggtgacagaaaccttccttagtctggaaaaaagctacgatgaggtcaaaatcgaaaacgagggcctgaatgtgttagtgttaagattgcaggggaagatcgaaaaattacaggagtcggtggtgcagagatgtgattgttgtctgtgggaggcgagtctagaaaatctcgagatagaacctgacggtaatatcctgcagctgaatcagacattggaggaatgcgtgccaagagtgcgctccgtacaccatgtcattgaagaatgtaaacaggaaaaccagtaccttgagggaaacacacagctgctggagaaggtcaaggctcatgagatagcctggctgcacggaaccatccagacgcatcaagaaaggccacgggtgcaaaatcaggtgattctggaggagaacacaaccctgctggggtttcaagacaagcatttccagcatcaggctactattgctgagttagagctagaaaagaccaagctccaggagttgactcgtaaactgaaggagcgggttacaattctcgtaaagcagaaggacgttctaagtcatggcgagaaagaggaggagctgaaagcgatgatgcacgacctgcagatcacttgtagcgagatgcagcagaaagtcgagcttctgcgctatgagtctgaaaaactgcagcaggaaaactcaatcctgaggaatgaaatcactacactcaacgaagaagattcaatttctaacctgaagttggggactctgaatggtagccaggaggagatgtggcagaagaccgaaaccgtgaaacaggagaacgcagcggtccaaaaaatggttgagaacctgaaaaaacagatttctgaacttaaaattaaaaatcagcagttggacctggagaacactgagttaagtcagaagaactcccaaaatcaggagaagctccaagaactgaatcagcgcctgaccgaaatgctgtgtcagaaggagaaagagcccggtaacagcgcccttgaggagcgcgagcaagaaaagttcaacctcaaggaggaactcgagcgttgcaaagtgcagtcttcgacgctcgtgagtagcctcgaggccgagctgtccgaagtgaaaattcagactcacatagtgcagcaggagaatcacttgctgaaggatgaattagagaagatgaaacagcttcatcgttgtccagatttatctgacttccagcaaaagatttcctccgtgttgagttacaatgagaaactgctgaaggagaaagaggccttgtcagaagagctgaattcttgtgttgataagctggcgaaatcctccctgttggagcacagaatcgcaacaatgaagcaggaacagaaaagctgggagcatcagtccgcctccttgaagtcccagctggtggcgagtcaggagaaggtgcaaaatcttgaggatacagtccagaacgtgaatctgcagatgtcaaggatgaagtccgatctgcgagtgacccagcaggaaaaggaagcgctaaagcaggaagtgatgtccctgcataaacagctgcagaacgctggtggtaaatcctgggctccggagatcgctacacatcctagcggacttcataatcagcaaaagcgactaagctgggacaagttggatcatttaatgaatgaggaacagcagctgctctggcaggagaacgaacgcctacaaacaatggtccagaataccaaggctgaactcacacactcaagagagaaggtcagacagcttgaatcaaatctgctgccaaagcatcagaaacacctgaacccctccggcacgatgaaccctacggagcaggaaaagctgtccctgaagcgggagtgcgaccagtttcagaaggagcaatcacccgctaaccggaaggtgtctcagatgaatagcctggagcaagagcttgaaacaattcacctggaaaatgaaggacttaaaaaaaagcaggtcaagttggacgagcagctgatggaaatgcagcatcttcggtcgactgccacaccctctccttctcctcacgcatgggacctacagctcctgcagcagcaagcttgccccatggtgcctcgggagcagttcctgcaactacaacgacagctgctacaggcagagaggatcaaccagcatctgcaggaagagctcgagaaccgaacttcagagacgaacactccccaaggcaaccaagagcagttagtcaccgtgatggaggagaggatgatcgaggtggagcaaaagctgaagctcgttaagcgtctgctccaggagaaagtaaaccagctaaaagagcagctttgcaagaatacgaaggcagacgcaatggtcaaagatctgtatgtcgagaatgcacagttgttaaaagcactagaggtgaccgagcaacgacaaaagacagcagagaagaaaaattatctgttggaggaaaaaatcgcgtccctgtcaaacatagttcgcaacctgacccccgcacccttgacctccactcctccattgcggtcttag

SEQ ID NO: 27904 - DNA, 2664 bp, synthetic construct
  source 1..2664: mol_type = other DNA; note = Synthetic coding sequence
atgcccattcttttgtttctgattgacactagtgcttcaatgaaccagcgtagtcatctcggcacaacatacctggatacagctaagggcgctgtggagacattcatgaagctacgcgctagggatcctgcatccagaggggatcggtatatgctcgtgactttcgaagagccaccttacgctatcaaggccggttggaaggaaaaccacgccacctttatgaatgagctgaagaacctccaggccgaagggctgaccaccctgggccaaagcctacggaccgcttttgacttgcttaaccttaaccgtctcgtaaccggcatcgataattacggccaggggaggaatccctttttcctggaaccggcaatcatcataacaattaccgacgggtcaaaactgacaaccactagcggtgtacaggacgagttacacctccccctgaatagcccactgcctggaagcgagttaaccaaagagcctttccgctgggaccaacggttgttcgctcttgttctgagactccctgggacaatgtccgtggagtctgagcagctaactggggtgccccttgatgacagcgccattactccgatgtgtgaggtgaccggagggaggagttacagtgtgtgttctcctagaatgctcaatcagtgtctggaaagcctagtgcagaaggtccagtcgggcgtggtgataaattttgagaaggctgggcctgacccttctccagtagaggacggccaacccgatataagtcgtcccttcgggagtcagccatggcactcgtgccacaagctgatttacgtacgcccaaaccctaagaccggcgtgcccatcggtcactggccagtaccggagagcttctggccggaccaaaacagtcccaccctaccccctagaacaagccaccccgtggtcaagttcagctgtacagactgtgaaccaatggtgatcgacaagctcccttttgacaagtatgagctggagcctagtcctctgacccagtttattcttgaacggaagtcgcctcagacatgctggcaggtttacgtcagtaattccgccaagtatagtgagctgggccacccgtttggctacttgaaagccagcacagctctgaactgtgttaacctgtttgtgatgccttataattaccccgtgctgctgcccctcctggacgacctgtttaaggttcataaggcaaaaccaaccctgaagtggcgacagtcgttcgaaagctacctgaagaccatgcctccctattatctgggccctctcaaaaaggccgtaagaatgatgggtgcgccaaacttaatagcggatagcatggaatatggtctgtcctactcagtcatatcctatctaaaaaaattaagtcagcaggccaagattgagtcagaccgtgttatcggatctgtcgggaagaaagttgtgcaggaaaccggaatcaaggtcagatcaaggtcacacggcttatccatggcttacaggaaggactttcagcagttgctgcagggaattagcgaggacgtaccccacagactcttagacctgaatatgaaggagtataccggcttccaggtggccctgcttaataaggacctgaagccccagacgttccgtaacgcctatgacatcccacggcgtaacttacttgaccaccttacacgaatgcggagcaacctcttgaagagtacccgaaggtttctcaaaggtcaggacgaggaccaagtgcacagcgtgcccatcgctcagatgggaaactatcaggagtacctaaaacaagtcccttctccacttcgcgaactcgatccggaccaacccagacgccttcacactttcggcaatcctttcaaacttgataaaaagggaatgatgatcgatgaagccgatgagtttgttgccggacctcaaaataagcacaaaagaccgggtgaacccaacatgcagggcatacccaaaagacgcagatgcatgtcccccctcctacgaggaagacagcagaatccagtcgtgaataaccatatcggaggcaaggggcctccagctccgactacccaagctcagcccgatctgattaagccattgcctttgcataagatcagtgaaacaactaacgactccatcatccatgacgtggtcgagaatcacgtggctgatcagctcagtagcgacattacccctaacgctatggacaccgagttctccgcttcttccccggcttctctgctcgagagaccaactaatcacatggaagcactgggacacgatcacttggggaccaacgacctgaccgtgggcggtttcttggaaaaccatgaggagccgagagacaaggagcaatgtgctgaagagaacatccccgcaagcagcctgaataaagggaaaaagctgatgcactgtcgcagtcacgaagaggttaataccgagctcaaggcccagatcatgaaggaaattcgcaagcctgggcgtaagtatgagagaatcttcacattgctaaagcacgtccagggttccctacagacgagacttatattcctccagaacgttatcaaggaagcttctaggtttaaaaagagaatgctgatagaacagttggagaattttctggacgagatacaccggcgagccaatcagatcaaccacatcaatagcaactag

SEQ ID NO: 27905 - DNA, 1944 bp, synthetic construct
  source 1..1944: mol_type = other DNA; note = Synthetic coding sequence
atgtctgatgaggtgttctcaacgaccctggcttacaccaagtcaccaaaagtgaccaagagaacgaccttccaggacgagttgattagagctataacagccagaagtgctagacaaagaagcagcgagtactctgatgacttcgacagtgacgagattgtgagtcttggcgacttctccgacaccagcgcagacgagaatagtgtgaacaaaaagatgaatgactttcacatcagtgatgacgaggaaaaaaaccccagcaagttgttgttcctgaagacaaacaaaagcaacggaaatatcactaaggacgaacccgtgtgtgccattaagaatgaggaagagatggcacccgacggatgtgaggacattgtggtgaagtccttttcagaatcacagaataaggatgaagaatttgaaaaagataaaataaagatgaagcccaagcctcgcattctgtccattaaatccacgtcctccgctgaaaataactcgttggacacggacgaccatttcaaaccgagcccaaggccacgctcgatgctgaagaagaaatcgcatatggaagagaaagacggtctcgaggacaaagaaacagccttgtccgaagagttggagctgcactctgcaccatcgtccctgcctactcctaatggtattcagttagaagccgagaaaaaagcattttccgaaaatctggatcccgaggactcctgtttgaccagcctggcatccagctcgctgaaacagattctcggcgatagcttcagtcctgggtcagagggcaacgcctcaggtaaagatcctaatgaggagataacggaaaaccataacagcctgaagtcagatgagaacaaagaaaattcattctctgctgaccatgtgacaaccgcagttgagaagagtaaggagtctcaggtcactgccgatgacttggaggaagagaaggccaaagcagagctgattatggacgacgacaggaccgtcgatcccttgctgagcaagtctcagagtatactaatcagcacatccgctactgcttcaagtaagaagacgattgaggataggaacatcaaaaacaaaaagtccacgaacaatagggcctcttctgccagtgccaggctgatgacatctgagtttttgaagaagagctcgagcaagagacggacaccctcaacaacgaccagcagtcactacctagggacactcaaggtgttggaccagaaaccctctcagaagcagagcatcgagcccgatagagcagacaacatacgggcagccgtgtatcaggaatggctagagaagaaaaatgtgtacctgcacgaaatgcaccgtataaaaagaattgagtctgagaatctgaggatccagaacgaacagaaaaaagcagctaagagagaggaggccctggccagcttcgaggcctggaaggctatgaaggaaaaagaggctaaaaagatagccgcaaagaaaaggctggaggaaaaaaataaaaaaaaaacagaggaagagaacgccgcaagaaagggtgaggctttgcaggctttcgaaaagtggaaagaaaagaaaatggaatatctgaaggaaaaaaatcggaaggagagggagtacgagagagctaaaaagcagaaagaagaggaaactgtcgcagaaaagaaaaaggataacctcacggcggtggaaaaatggaacgagaagaaggaggccttctttaaacagaaagagaaagagaagattaatgagaagaggaaggaggaactcaaacgtgctgagaaaaaagataaggacaagcaagcgatcaacgagtacgagaagtggcttgaaaacaaagagaagcaggaacgcattgagcgaaaacagaaaaagcggcatagcttcttggagagtgaggctcttcctccttggtccccaccgtccagaaccgtttttgcgaaggtattctag

SEQ ID NO: 27906 - DNA, 1074 bp, synthetic construct
  source 1..1074: mol_type = other DNA; note = Synthetic coding sequence
atgcaaacattccttaaggggaaacgcgtagggtactggctcagcgaaaaaaaaattaagaagctcaactttcaggcgttcgccgagctgtgcagaaagcgcggtatggaagtggtacagttgaatctgtctcgacctattgaggaacaaggcccattggatgtcattattcacaagctcaccgacgtgatactcgaagctgaccagaacgatagccagtctttggagctggttcaccgtttccaggaatacatcgacgcccaccccgaaaccatagtcctggaccccctgccagccattcggactctgttagacaggtctaagagttacgagctcatccgaaagattgaagcctatatggaggatgacaggatctgttcccctcccttcatggaactgacttctctgtgtggcgacgatacgatgagactgcttgaaaaaaacgggctcacattcccttttatttgcaaaactcgtgttgcccatgggaccaattcacatgaaatggccatcgtcttcaaccaagagggcctgaacgcaatacagccaccttgcgtggtgcagaacttcattaatcacaatgccgtgctctataaggtcttcgtcgtaggtgagtcatacaccgtggtgcagcggccttccctgaagaatttcagcgcaggtaccagtgatagagaatccatatttttcaattcacacaacgtgagtaagcccgaatcaagcagcgtgcttactgagctggacaagatcgaaggggtgttcgagcggccaagcgatgaagtcatccgagagctttctagagcccttcgccaagccctgggagtaagcctgtttgggatcgatattatcataaataaccaaactggacagcatgccgtgatcgatattaacgcctttccaggctacgaaggcgtgagcgaattcttcaccgatctgctcaatcatatagcaacagttcttcagggacaatctactgctatggcagctccatcgggcgagttccgcgctggcgacctttgctgtgacctaggcaaatcatttcaggtattcgggcctccacctccctgcttgtag

SEQ ID NO: 27907 - DNA, 852 bp, synthetic construct
  source 1..852: mol_type = other DNA; note = Synthetic coding sequence
atgctgaggtgcggtcaaatgattttcgctcaggcactggtgtgcagacatctgggaagagactggcgttggacacaacggaagagacagcccgacagctacttttctgtgcttaacgcttttatcgacaggaaggatagttactactctattcaccagattgctcagatgggagtcggggaggggaaaagcattggccagtggtatgggccaaacaccgtcgcccaggtgctgaagaagctggccgtgtttgatacctggagttcattggcggtgcatatcgctatggacaatactgtcgtaatggaggagatccgaaggctgtgtaggacaagcgtgccgtgtgcgggagcgactgcctttccagccgattccgataggcactgcaacggcttccccgctggggctgaggtgaccaaccggccttcaccttggcggcctctggtgttgcttattcctctgcgcctgggactgacagatattaacgaggcttacgtggagactctgaagcactgcttcatgatgccacagagcctgggcgtgattggcggtaagcctaattcagctcactatttcattggctacgtgggcgaggagctgatctatctggacccccacaccacccagcccgcagtggagcccacggatgggtgttttatacctgacgagtccttccactgccagcaccctccatgtaggatgtcaatagctgaacttgatcctagtatcgctgtcgtcttgggggttggtaagcagggcagactggtacgtagcataccctgggctccccgtccgtcatcatggtgcgccgctgtcctcggcgctgcagtggtgatgtgcgggacgccctag

SEQ ID NO: 27908 - DNA, 2160 bp, synthetic construct
  source 1..2160: mol_type = other DNA; note = Synthetic coding sequence
atggggttcagtaacatggaagatgatgggccagaagaagaggagcgagtggcggagcctcaggcaaatttcaatacacctcaagcacttcggtttgaagaactgctcgccaacctcctcaacgaacagcatcagattgcaaaggagctgtttgaacaactcaaaatgaagaagcctagtgcaaagcagcaaaaagaggtggagaaagtcaaaccccagtgcaaggaggttcatcagacccttattctggaccctgctcagcgcaagcgtctgcagcagcaaatgcagcagcatgtgcagttgctcacacagattcacctgctggccacctgcaacccgaacttaaatcctgaagcgtctagtacccggatctgcctgaaggagcttggaacattcgcccagagctcaattgcactgcaccaccagtataaccctaaatttcagaccctctttcagccatgcaatctcatgggagccatgcagctgattgaggatttttccacccatgtcagcattgactgttcgcctcacaagaccgtgaaaaaaaccgccaatgagttcccatgtctgccaaaacaggtggcgtggatcctcgctaccagcaaggtctttatgtacccagaactgctgcccgtctgcagtttaaaggcaaagaacccccaggacaaaatcttattcacgaaagctgaggacaacaagtaccttttaacgtgtaaaacagcccgacaattgactgtgcgcataaaaaaccttaacatgaacagggcaccggacaacattattaagttctataaaaagacgaagcagttgccagtcctgggtaaatgttgtgaggagatccagccgcatcagtggaaaccgcctatcgagagagaagagcatagactccctttctggctaaaggcaagcctgcctagcatccaggaggagcttagacacatggctgacggcgctagagaggtggggaacatgactggcaccacagaaataaattcagaccagggtctcgagaaagacaactccgaactcggctctgaaacccgctacccacttctgcttcctaaaggtgtcgtcttgaagttgaagcctgtggccgatcggttccctaaaaaagcttggaggcagaaacgctcatcagtgcttaagcccctgctgatccagcctagccccagtctgcagccttccttcaaccccggaaagaccccagcgcagagcacccattccgaagctccacccagtaaaatggtactaagaatccctcatcccatccagcctgctaccgttctgcagacagtccccggagtgcccccactgggagtgtcaggcggtgaaagttttgagagtccagccgcacttccagccatgcccccagaagcacgaacatcttttcctctgagcgagagccagactctcctctccagcgcaccagtccctaaggtaatgatgccctctcctgcaagttccatgtttcggaaaccttatgttcggcgtagaccgtcgaagcggaggggcgctcgcgcattccgctgtattaaaccagctcccgtcattcaccctgcctctgtgatattcaccgtgccggctacaactgttaagatcgtctcattgggaggcggttgtaacatgatacagcctgtgaacgcagctgttgctcagtccccacagaccattccaattgccactctcctggtgaaccccacttccttcccgtgcccgctaaatcagcctctggtggcaagcagtgtgtcacccttaattgtgagcggcaactcagtaaacctgccgatcccctcaacccccgaagataaggcgcacatgaacgtagacattgcctgcgccgttgccgatggtgagaatgctttccagggactcgagcccaagttagagccgcaggagctgagccccctatcggctactgtctttcccaaagtggaacacagccccggaccccctcccgtcgataagcagtgccaggagggtttgtcagagaacagcgcctatcgatggacggtggttaaaacagaagagggcaggcaagctcttgagccgcttcctcagggcattcaggaaagcctgaacaactcctcaccaggggatttggaggaagtcgttaagatggaacctgaagatgccacagaagagataagtggcttcctgtag

SEQ ID NO: 27909 - DNA, 1134 bp, synthetic construct
  source 1..1134: mol_type = other DNA; note = Synthetic coding sequence
atggaagctgccgcagttaccgtgactagatccgcaacgcggagaaggaggcgccagctacaggggctggccgcacccgaagctggcactcaggaggaacaggaggatcaggaacctagacctaggagaaggcggcctgggaggtccataaaggatgaagaggaagaaaccgtattccgcgaagttgtgtctttctcccccgacccgctgccagtccgctactacgataaggacaccaccaagcctatctcattttacctctcatctttggaggaattacttgcctggaagccacgcttagaggatgggttcaacgtagcgctggaaccgctcgcttgcaggcaacccccactatcttcgcagcgaccgagaaccctcctctgtcacgacatgatggggggttatttggatgaccggttcattcagggcagtgtggtccagacaccctatgcattttaccactggcaatgtattgacgtgttcgtctacttctcacaccacaccgttaccataccccctgtgggatggacgaatacggcacaccgccatggggtctgtgtcctggggacctttattactgagtggaacgagggaggtaggctgtgcgaggccttccttgccggagacgagaggtcatatcaagctgtggccgatagactggtgcaaataactcagttcttccggtttgacggatggttgataaacatcgaaaacagtctgtcactagcagccgtcggtaatatgcctccctttctcagatacttaactacccagttgcaccgacaggtgccaggcggattggtgctatggtacgactctgttgtgcagagtggtcagctaaaatggcaggacgagctgaatcaacacaaccgtgtattctttgactcctgcgacggcttcttcacaaactacaattggcgagaagagcacctcgagaggatgctagggcaggcaggagagcgcagagctgacgtctatgtcggagttgatgtgttcgccaggggcaatgtagtggggggaaggttcgacacagacaagtccctcgagttgatccggaagcacgggtttagcgtcgctctgttcgctccgggatgctccgtgtttccaggggtgggtaacctgctctgttgctag

SEQ ID NO: 27910 - DNA, 927 bp, synthetic construct
  source 1..927: mol_type = other DNA; note = Synthetic coding sequence
atgcggggaaaacgcagacctcagactcgggcagctcgcagattggctgcccaagagtcttctgaagctgaagatatgtctgtccccagaggcccaatcgcccagtgggctgatggagctatcagtcctaacggccacaggccgcagctgcgtgcagcttcaggggaagactcgactgaagaggccctggccgctgccgcagccccttgggagggtgggccagtcccgggtgttgacacttcacctttcgccaagtcactcgggcattcccggggagaagcagatttatttgactcaggggatattttctccacaggtaccgggagccagtctgtggaaagaacaaagcctaaagcgaagatcgctgaaaaccctgccaacccaccagtcgggggaaaggcgaaatcgcctatgtttccagctttaggcgaggccagctctgacgatgatttgttccagtcggccaaacctaagcccgcaaagaagaccaatccctttcctctattagaggacgaggatgacctgtttactgatcagaaggtgaaaaaaaacgagacgaagagctcatcccaacaggacgtcatactgacgacccaggacatcttcgaagacgatatttttgccacagaagcgattaagccttctcaaaaaacaagagagaaggaaaagacactggagtcgaacctattcgatgacaatattgacatcttcgccgacctgactgtcaaacccaaggagaaatccaagaaaaaggttgaggctaagtcgatctttgatgatgacatggacgatattttttccactggaattcaggccaaaacaaccaagcctaagtctcgcagtgctcaagctgccccagaaccaagatttgaacataaggtgagcaatatcttcgacgacccattgaacgccttcggcggacaatag

SEQ ID NO: 27911 - DNA, 933 bp, synthetic construct
  source 1..933: mol_type = other DNA; note = Synthetic coding sequence
atgcttaagaataaagggcacagcagcaagaaagataacctagctgttaacgccgtggccctgcaagaccacatcttgcacgacttacaactccgcaatctgagcgtagccgaccacagtaagacacaggtacaaaagaaggagaacaaaagtcttaagagagacaccaaagccattatagataccggcctgaagaaaacaacccagtgcccaaagctggaggactctgaaaaggagtacgtcttggatccgaagccaccaccactcaccctggcccagaagttaggactaattggccctccaccccctcctctgtcttcagacgaatgggaaaaagtaaagcagcggagcctcttgcagggcgacagtgtgcagccctgccccatatgtaaggaggaatttgagctgagaccacaggtgctcctttcatgctctcacgtttttcataaggcttgtctgcaggcattcgaaaagttcactaataaaaagacttgcccactatgcaggaagaatcagtaccagaccagggtgattcacgacggcgcaagactgtttcggattaagtgcgtcacaaggatccaggcttattggagaggctgcgtggtgcgaaaatggtatagaaatctccgtaagacagtgcccccaacagacgccaaactgcggaaaaagttcttcgaaaaaaaatttaccgaaatttcgcatagaattttgtgctcctacaataccaatatcgaggagctattcgcagaaattgatcagtgcttagccattaatcggtcagtgttacaacagctcgaggagaaatgtggacatgaaatcacagaggaggagtgggagaaaattcaagtgcagaacgaaacaagcgcgtgtttcgaagatccatgcctcggcgctcacgggtcccatttctccctcagtaacttcttgctgtag

SEQ ID NO: 27912 - DNA, 1119 bp, synthetic construct
  source 1..1119: mol_type = other DNA; note = Synthetic coding sequence
atgagagttggcccagtccggtccgcgatgtcaggggcaagccagccgagaggtcccgctctcctttttcccgcaacccgcggagtgccagccaagcgcctgctggatgccgacgatgcggctgccgtggcagccaaatgtccaaggctgagcgagtgttccagtcccccagattacctgtcaccgcctggttctccctgcagccctcaaccccctccagctgctccaggagccggaggtggcagtggcagcgcaccgggtccaagcagaatcgccgactatcttcttttgcctctcgccgaacgggaacacgttagcagagctctatgcatccatactggcagggaacttcgctgcaaagtattccccataaagcactaccaagataaaattcggccatacatccagctcccaagccactcaaatatcacaggcattgtggaggtgatcctgggcgaaaccaaggcgtacgtgtttttcgagaaggatttcggagacatgcattcctatgtgagaagcaggaaaaggttgagggaagaagaggctgccagactatttaaacaaatagtgtccgcagtagcgcactgccaccaaagcgcgattgtgctcggtgacctcaaacttagaaagtttgtatttagtaccgaggaaagaacacagcttaggctggaaagtctcgaagacacgcatatcatgaaaggtgaggatgatgctctgtctgataagcacgggtgcccggcttatgtttcacccgaaatcttgaatacaaccggcacttatagcgggaaagccgctgacgtatggagcctgggcgtcatgctctacacgttgttagtgggaaggtacccttttcatgacagtgatccctccgcccttttctcgaaaattcgtcgcggacagttttgcataccagagcatatctctccaaaagcacgatgtctcattaggagcctgttaaggagggaaccaagtgaacggctgaccgctccggagattttgcttcatccttggtttgaaagtgtattggaacctggttacattgactcagaaattggaaccagtgaccaaatcgttccggaatatcaggaagattccgacatcagttcctttttctgttag

SEQ ID NO: 27913 - DNA, 1554 bp, synthetic construct
  source 1..1554: mol_type = other DNA; note = Synthetic coding sequence
atggagactgacctcaattcccaggaccggaaggacctggataaatttattaaattttttgccctgaaaaccgtccaagtgatcgtccaagcacgcttaggtgagaagatctgcacacgatcgtcaagctcgcctactgggagcgactggttcaacctggcgattaaggatatccctgaagtgactcatgaggccaagaaggctctcgccggtcaactgccggctgtgggtcgctccatgtgcgtggaaatctctcttaagacatcagagggtgacagcatggagcttgagatttggtgcctggaaatgaatgaaaaatgtgataaggagattaaggtgtcgtacactgtctataacaggcttagtctattgctgaaatcgctgctcgcgattaccagggtgacccctgcctaccgtctgagcagaaagcagggccacgaatacgtgattctctaccgaatttattttggtgaggtgcaactctccggcttgggggaaggttttcagacggtccgcgtcggaactgtgggcacgcccgtcggaaccatcaccctgagctgtgcctaccggattaatctggcctttatgtcaacacgccagttcgagcgcaccccacctatcatgggcattatcatcgaccatttcgtggaccgcccataccccagcagctcaccgatgcatccatgcaattatagaactgcgggagaggacacaggggttatttatccttctgtggaggacagccaggaggtctgtactacatccttttcaaccagcccccctagtcagctatcatcctcccgcctgtcttaccagcccgcagcgctaggcgtcgggagtgccgaccttgcatacccagtggtgtttgcagctggtctaaacgcgactcacccacatcagctgatggtgcctggcaaggagggcggagtacctctggctccaaaccaacctgtgcatggaacacaggctgaccaggagcgactagctacttgtacaccctccgacaggacacactgtgctgcgacacctagctcttctgaagacaccgagacagtttcaaactcatctgaaggccgtgcgtccccacatgatgtgctggaaaccatcttcgtccgtaaagtgggggcatttgttaataaacctatcaatcaagtgactttgacgagtttggacatccccttcgccatgttcgcacccaaaaatctggaattggaggataccgatcccatggttaatccgcctgacagtccagaaactgaatcaccgctgcagggctccctgcattctgacggatcgtccggaggctcatcggggaacacccacgatgacttcgtgatgatagatttcaaaccagccttctcaaaggatgacattctgcctatggatcttgggactttctaccgggaattccagaacccaccacaactgtcctccttgagcatagatatcggggcacagtctatggccgaggatctggactctctcccagagaaactggccgtccacgaaaagaacgtcagggaatttgatgccttcgtggaaacgctccagtag

SEQ ID NO: 27914 - DNA, 1488 bp, synthetic construct
  source 1..1488: mol_type = other DNA; note = Synthetic coding sequence
atgtggaggggttgtgccaggtcaagaaaaagaaagaaggttgacaacgattataatgcactgcgtgagcgtctgagtacccttcctgacaagttgagctataatataatggtccctttcggcccattcgctttcatgccgggaaagctggtccataccaatgaagtgacagttcttcttggggataattggtttgctaaatgcagcgcgaagcaggcagtcggcttggtggagcatcgcaaagaacacgtacggaagacaatcgatgacctgaaaaaggtgatgaagaatttcgagtctcgggttgaattcaccgaagaccttcaaaagatgagcgatgccgctggtgatattgtggatattcgggaagagatcaaatgtgacttcgagttcaaggcaaagcacaggatagcccacaagccccactcgaagccaaaaacttctgatattttcgaggccgacatagcaaatgatgtgaaatctaaggatctgctggccgacaaggagctgtgggcccgactggaggagctagagaggcaagaggaactgctgggtgagttggatagcaaacccgataccgtgattgccaatggtgaggatacaacaagtagtgaggaggagaaggaggacagaaataccaatgtaaacgccatgcaccaggttaccgactctcatactccatgtcataaagacgtggcaagcagtgagcccttttcaggacaggtcaatagtcagctgaactgttctgtgaatgggtcgtcctcctaccactccgacgatgacgatgacgatgacgatgatgatgatgacgacaatatcgacgacgatgacggagataatgatcatgaggccctgggtgtgggagacaactcaataccgactatttactttagccataccgtggaacctaagcgagttaggatcaacacaggaaagaatactacccttaaattttccgaaaagaaggaagaagccaagcgcaaacggaaaaactcaacgggaagtggtcacagcgcccaggaattacccacaatccgcacgccagctgatatttaccgcgcatttgttgacgtggtgaacggagagtatgtgccacgaaagagcatcttgaagagtcggtctagagagaattcggtgtgctccgacacttccgagtctagcgccgcagagttcgatgacaggcgaggtgtcctcaggtctatatcttgtgaggaagccacttgcagcgacacatccgagagtattctggaggaggaaccccaagaaaaccagaagaagctgctcccactgagtgtcacacccgaggcttttagcggcaccgtcatcgagaaagaattcgtctctccttccttaacccccccacccgctatcgcccacccagctctgcccacaattcctgaaagaaaagaggtgcttctggaggccagtgaggagaccgggaagagagtcagtaagtttaaagccgctcgattgcagcagaaggattag

SEQ ID NO: 27915 - DNA, 1458 bp, synthetic construct
  source 1..1458: mol_type = other DNA; note = Synthetic coding sequence
atgtgccaggtgggtgaagattacggggaacctgcgccagaggaaccacctcccgcaccgcgtccgagcagggagcaaaagtgcgttaagtgcaaagaagcccagcctgtggtggtgattcgcgctggggacgccttctgccgcgactgtttcaaggctttttacgtccataaattcagagctatgctgggcaaaaaccgccttatctttccaggggagaaagtgctgctggcctggtctggaggcccttcgtcctcatctatggtgtggcaggtgctggaaggactgagtcaggacagcgctaagcggcttcggttcgttgccggtgtaatattcgttgatgaaggggcagcatgtggccaaagtctggaggaaagaagtaagacacttgcagaagtcaagcccatcctgcaggcaacgggatttccctggcatgttgtggctttggaagaggtgtttagtctgcctccatcggtgctgtggtgctccgctcaagaactggtgggcagtgaaggagcctataaggccgcagtggatagttttcttcagcagcaacatgtgctcggagcgggtggcggacctggaccaacacagggagaagaacaacctcctcaacctcctcttgatccacagaatctggctagacctccggctcccgcacagaccgaggctctgagccaactattttgttctgtgcgaactctcacagctaaggaggaacttttgcagactttgaggacccacctgatcctgcacatggcacgcgctcatggctatagcaaagtaatgacaggagattcttgtaccaggttagccattaagctgatgaccaatttggcactcggacgcggagcattcctggcctgggatactggattctctgatgagaggcatggagatgtggtggtggtcaggcccatgcgggatcatactctgaaagaagtcgctttctataatcgtctgttctctgttccttcggtctttactcctgctgtggacaccaaagcacccgagaaggcctctatccaccggctgatggaggcattcatcttgcgactgcaaacgcagttcccctcaacagtgtccaccgtttatagaaccagtgaaaagctcgtgaagggcccaagagacggcccagccgcaggtgatagtggcccacgatgcttgctctgcatgtgtgccctcgatgtagatgctgcggactccgccaccgcatttggggctcagacttctagcagactaagtcagatgcaaagtccaattccactgactgaaaccagaaccccacctggaccttgctgttcacctggagtcggatgggcccaacgttgtgggcaaggagcctgcaggcgcgaggacccccaagcatgtatagaagaacagctgtgttactcatgccgggtgaatatgaaggatctgggactgggacttgcaggggatcccggtctatccgactag

SEQ ID NO: 27916 - DNA, 1353 bp, synthetic construct
  source 1..1353: mol_type = other DNA; note = Synthetic coding sequence
atgagtttgagactgagttccgcttcacggagatcatgtcctagaccaactactggcagcctccggctgtatgggggtggcactagcttcggaacaggtaatagctgcggcatctctggcatcgggtctggcttctcatcagccttcggtggcagctcatctggcggaaataccggcggtgggaacccatgtgctgggtttaccgtgaacgagcgtgggctcctgagtggtaatgaaaaggtgacaatgcagaacctcaacgaccggctcgccagctaccttgactcagtacatgcactagaagaggccaatgccgatctcgaacagaaaataaagggatggtacgagaagttcggcccaggctcctgccggggactcgatcatgactactcaagatacttcccgatcattgacgatctcaagaatcagatcatcgctagcactactagcaacgccaacgccgttctgcaaatcgacaacgccaggttgaccgctgatgatttccgcctgaaatatgaaaatgagcttgctcttcatcagagcgttgaggctgacgttaatgggctgaggagggtgttggacgagataaccctctgcagaaccgacctcgagattcaatatgaaacgctgtcagaggaaatgacttatctcaagaagaaccacaaggaagagatgcaggtgctccaatgtgctgctggcggaaacgtgaatgtggagatgaatgcggctcctggcgtcgacttgaccgtccttctcaacaacatgagggccgagtatgaggccctcgctgagcagaaccgccgtgatgctgaggcctggtttaatgagaaatccgcgtctttacagcagcaaatctcggaagatgtcggtgccacaacctccgcaaggaacgagctcactgagatgaaacgcaccctgcaaaccctcgaaatcgagcttcaatccctcttggccacgaaacatagtctcgagtgttcactgacagagaccgaaagcaattactgtgctcagctcgcccaaatccaagctcagattggcgcactggaagaacaattacatcaagtccggactgagaccgagggccagaaactcgaatacgaacaactgttggacatcaagctgcatcttgagaaggagatagaaacatactgcctgctgatcgggggtgacgatggcgcttgtaaatcaggaggctataaatcaaaggattacggctcagggaacgttggtagccaggtaaaggatccggcaaaagccatcgtcgtgaagaaggtactggaggaggtggaccaaagatcgaagatactgaccactagacttcacagtttagaagagaagagtcagagtaactag

SEQ ID NO: 27917 - DNA, 2679 bp, synthetic construct
  source 1..2679: mol_type = other DNA; note = Synthetic coding sequence
atggaccaacccgaggcaccctgctcatctacaggccctcgtctagccgtggcacgtgagctcctgctggccgctctcgaagagctttctcaggagcaactaaagcggtttaggcacaaactgagagatgtcggcccagacgggagaagtataccttggggccgactggagcgcgcagacgcagtcgatcttgccgagcagctggctcaattctacggccctgagcctgctctggaagtggccaggaagactctcaaacgcgctgacgccagagacgtcgcggcacagctgcaggagcgcagacttcagcggttgggcttggggtccggaacactgttatccgtgtctgagtataagaagaaataccgagagcatgtgctgcagttgcatgccagggtgaaagagcggaatgcccgatctgtgaagattaccaaaaggttcacaaagctgctcatcgcacctgaaagtgcagctcctgaagaggcgatgggtcctgctgaagaaccagagcccggtcgggcaaggcgcagtgatacgcatacctttaatcgccttttccgcagggatgaggaaggacgccgacccctgacagtggtgctgcaaggaccagctggtatcgggaaaactatggccgctaaaaagatactctacgattgggcggctgggaaactgtatcaggggcaggtggacttcgccttttttatgccgtgcggtgagctactggagcgtccagggacacgcagcttggcggacctcattctcgaccagtgtcccgaccggggagccccagtcccacagatgctagctcaacctcagcgattgttatttattctcgacggcgctgatgagctccccgcacttggaggcccagaggcagcaccttgtactgatccatttgaggctgccagtggtgctagggtcttgggaggcttattgagcaaggcgctcctacctaccgccctgctcttagtcaccacaagggccgcagccccagggaggctccaggggcgtctgtgctcaccccagtgcgccgaggtgcgtggtttcagtgacaaagataagaaaaaatacttttacaaatatttcagagatgagagaagagccgagagggcctacaggtttgtgaaggaaaatgaaactctgttcgccctctgtttcgtcccctttgtttgttggatcgtgtgcactgttctgagacaacagttggagctcggacgtgacctgtccagaacatctaagaccacaacgtctgtgtatctgttgtttataacatcagtactgtccagcgcccctgtggccgacgggcctcgcttacagggggacctccgaaacctgtgccggttggccagggaaggtgttctcggcagaagagcgcagttcgcggaaaaggagttagagcaactagagttacgcggatcgaaagtgcagaccctcttcctatccaaaaaggagttacctggggtccttgagactgaagttacttaccaattcatcgaccaaagcttccaggagttcttagcagcattgtcttacttactggaagatgggggagtccctcgcacagcagccggtggtgtagggacacttctgcggggagacgctcagccgcattctcacctggtcctgaccacccgcttcctttttggtctccttagtgctgaacgtatgagggatattgagcgccacttcggctgcatggtgtcggaacgggttaaacaggaagcacttcggtgggtgcagggccaggggcagggctgtcccggagttgcacctgaagtaactgagggcgctaagggtctcgaagacactgaggaacccgaggaggaagaagagggggaggagccaaactaccccctggagctcttgtactgcctgtatgagacacaggaggatgccttcgtcagacaagccctgtgccggttcccagaattggctctgcaacgggtgcgcttttgtaggatggacgttgccgtgctgtcatactgtgttcgctgttgccctgcaggccaggcactccgacttatctcgtgtcgtcttgtcgcagcacaggagaaaaaaaaaaaaagcttaggaaagaggctccaggccagcctcggcggaggttctagctcccagggaactacgaagcagctcccagcatccctgttgcatccactctttcaggcaatgactgaccccctgtgccatctctctagtctgaccttatctcattgcaaacttcctgacgccgtttgccgggacctgtctgaggccctccgggctgccccagccctgaccgaactaggtctgctgcacaaccgcctgagcgaggccggtttgagaatgttgagcgagggacttgcctggcctcagtgtcgcgtgcagaccgttcgggtgcaattgccagacccccagcggggactccaatatctggtaggaatgttgagacagtccccagcactgactacactcgatcttagtggatgccagttgccagcccctatggtcacgtatctttgtgcggtcctgcagcatcagggttgtgggcttcagaccctgagcctggctagtgtggagctttcagagcagagtctgcaggaattgcaggctgtgaagcgggcaaagcctgaccttgtgattactcatccggctttggatgggcacccccagccgccaaaggagttgatttccaccttctag

SEQ ID NO: 27918 - DNA, 1047 bp, synthetic construct
  source 1..1047: mol_type = other DNA; note = Synthetic coding sequence
atgggcaaagactactataaaatcctgggaataccaagcggggctaatgaagatgaaattaaaaaagcgtataggaaaatggccctgaaatatcaccccgacaagaataaagaaccgaacgccgaggagaaatttaaggagattgcggaagcttatgatgttctgtcagatcccaagaaacggggattgtatgatcagtacggagaggagggcctgaagacaggaggcggtacgtctggcggttcaagcgggtctttccactacacttttcatggagatcctcatgcaacatttgcaagtttttttgggggatccaatccattcgacatttttttcgcgtcatcccggtctacacgccctttctccggatttgaccctgacgatatggatgtcgacgaggacgaagatccctttggtgcctttggtagattcggctttaacggactgtcgaggggtccacgacgcgctccagagcctctttatcccagacgcaaagttcaggaccctccggtggtgcacgagctgcgagtgagcctcgaagaaatttatcacggctcaacaaaacgcatgaagattactcgcaggcggcttaacccagatggtcgtaccgtgagaaccgaagacaagattttgcatatcgtaattaaacggggttggaaggaagggacaaaaatcacctttccgaaagaaggcgacgctacccctgacaacatcccagccgacatagtgttcgttctgaaagataaaccacatgcacactttaggcgggatgggaccaatgtactgtatagcgccctgataagtctgaaagaggccctgtgtgggtgtacagtaaatattcccaccatcgatggtagggtcattcctctcccctgtaatgatgtcataaagccaggaacagtgaagaggctgagaggggaaggcttgcccttccccaaggttccgactcagcggggagatttgatcgttgaattcaaagtcagattcccagaccgcctgacaccacagactcggcaaatcctgaagcagcatctgccatgcagctag

SEQ ID NO: 27919 - DNA, 1899 bp, synthetic construct
  source 1..1899: mol_type = other DNA; note = Synthetic coding sequence
atggatactatgatgctgaatgtgcgtaacctatttgagcagctggtcagaagagtagagattttgagtgagggtaatgaggtgcagtttattcaactggccaaggattttgaggattttcggaaaaagtggcagcgcaccgatcacgaactgggaaaatacaaggatctccttatgaaagctgaaaccgaacgttctgctctggatgtaaagctgaagcacgcacgtaaccaggtagatgttgaaattaagaggcgccagcgagccgaggctgactgtgagaaacttgagagacaaattcagctgatccgcgaaatgcttatgtgtgacacctctggttcaatccagctgagcgaggaacaaaagtcagccctggcattcttgaacaggggtcagccctcgagttctaacgccggaaacaaaagactgagcaccattgacgagtcaggaagtattttgtccgacatctcatttgacaagacagacgagagcttagattgggactccagtctggtgaaaacatttaaactgaaaaagcgagaaaaacggagatccacatcacggcagtttgtggatggtccccctggccctgtgaaaaagacccgctctataggcagcgcagtcgaccaagggaatgaatctatcgtcgcgaaaacgactgttactgtacctaacgacggagggcctattgaagcagtttcaacaattgagacggtgccatattggacccggtctagacgcaaaactggaactcttcagccttggaactccgatagtacccttaacagccggcaacttgagccgcgaacagagacagacagtgtgggtaccccacagagtaacgggggaatgcgactacacgatttcgtttctaagaccgtcataaaaccagagagctgcgtgccatgcggtaagagaatcaaatttgggaaactctcccttaagtgtcgggattgtcgcgtggtgtctcatcccgagtgtcgagataggtgtcccctgccttgcatcccaactttgattggaactcccgtcaaaattggggagggcatgctggccgattttgtaagccagacctcaccaatgattccttcaatcgtggttcactgtgttaatgagatcgagcaaagaggattgacggagacgggactgtataggatatccggatgtgacagaaccgtgaaggagctcaaggagaagtttctccgtgtcaagactgtgccgttgctgagcaaggtggacgatatccacgcaatttgtagtctcctgaaggatttcctgaggaatctaaaagaaccactgctgaccttccgattgaaccgcgcttttatggaagcggcagaaattacagatgaggataattcgattgcggctatgtaccaggctgtgggggagttgccccaagcaaacagggacactctggccttcctaatgatccatctacagcgagtcgctcagagcccccatacaaaaatggacgtcgccaatctcgctaaggtgttcggtccaaccatagtggctcatgcggtacccaatcccgatcccgttactatgctacaagacattaagcgccaacccaaggttgttgagcgtttgcttagcttgcctctagaatactggagccaatttatgatggtcgagcaggagaacattgatcctttacacgtgatagaaaactccaatgcattctcgaccccacagacccccgacattaaagtgtcccttctaggtccagtgaccacccccgaacatcagctcctgaagacaccatcttcttcatccttgtcccagcgagtgcgatccaccctgacaaagaacactccccgtttcggatcaaagtctaaatccgcaaccaatctggggcgacagggcaacttcttcgcatcacctatgttaaagtag

SEQ ID NO: 27920 - DNA, 12075 bp, synthetic construct
  source 1..12075: mol_type = other DNA; note = Synthetic coding sequence
atgtcctccgagcaggataagtccgcgtctaaagagaagagcaaaaagcctgtccgctttctgccacagctgtcaatggaaaagctggcttctaaggaaaaatttaaggccccagctagagcactccctcaattaagcatggtatcaacaaagccgcattggcagcaggcagcaccctcatttcacttgagtgtgaagcaggacgacgaatcccccgaaccattctcagtcaagaatgagcaatcccatgccgaatatatggagcggtttggcaagaagggcaagctcccccaccaagtagacgactcgtacgtgggacctagcaccagcaaatctaaggggaaaagtccccataaagagagagaaaactttagaagcaccctggtgaatgtaattatgcagcaagatgcggatctggattctgcagttcctgatggttcaacaatccccaaacccacagcttcagccatcgagaaagacatcctccgctactattactatattcaccacggcattgatacagaccatgtcgccccaatggaagacagttggctggaacacgttttggacctggtcccccagcatctgaaggtctttacggattctatcgtgactctttctgatgaaatgcgggaagattacctactgtctgtgaggaaaagcattgtggactttgtgcttaaggacccccgtgagaaaggtgatgataagaaaactgacgagctgcccgcacaccgtgcagagatggaaatcctcccgaagccctggaggaagtccttcctcgccgcaagttcctatatccgtgaccacctaaatgctatgaatccaactatgctggccgttctcgacctctggcatactaacttcaagaaactgaggttagtggatatcaaagaattccataattgccaggatgcactggaattaagcagttttcagaatattattatgcgccatatggacagcgccaaggagacgcttctgaaaatgtggttccccgaggttcagaacatctattaccaggggaataagaagaagcaactgccaactggggattctagcgccaagctagaaagcttttttaattgtgccgctgccttgatgaccttacaacttcaagatctgacactggtatcgatgcaagactttactgatctcatcgcccagccacccgactccgtcagggcttttgaacatcctggctttatcatgcgcctgattctcgataacgatactatcaaattcgagcctgaactgagtgattatatcgatatcttcctcaacgtgtacgacgtaatgattaaggctgttagcttcgtacctcgcgtagagaccaagctgtattcaaaatgggaaagcaaaagcaaaccgactacactcaagccaattattcttaacgagatcgtcgatgcccataaggagaagataaaggaggttattatgaaggagtcagtcgcacccactgagcatttacgcttgtatgacaagtacgactttctgatcaccagaaaagcagaaagggatgtggataacttcctggccgagaatcattcatatgagaagatcatcgatgagatttgcaaataccagaagttaatcgaggaaatacaatatacatccatcaaaacgatcaggctgggcatgtttgagatgcactgtgaagaattgatacgggctctggttaagcgcgctgacatcatctgcggtaagctgttggccaaaatgttccgggatcaccaggaggttaacactagactgtgtgacgagtttgagcgcattgccgagaaagccctctccactcccccaaacactgctgaactcatggagatgaaggcctatattcagaaggtggaggtgacagacatgatcgagctggaacaacgacttgtggattcaaagaactgcctggcctttctcatagagtatgttaacttcagcccagcagatatgcggctgaacaattcagtgttccagtggtacgggcgtatgggagagatattcgaagagcacaggaagattatcaaagagaaaatcgaacagtatcaggagggcctaaagctgaggtgtgaaaggttcgtggaagaactggagtcctacgcaaagcagagtgaggaattttatagtttcggagatctgcaagacgtgcaaaggtaccttaaaaaggctcagattctgaatgggaaactggaccttgctgccgataaaatcgagcaattcaatgccgaggaggaagccttcgggtggttgccatctgtgtaccctcagagaaaaaaaatacaggacgggctgaatccctatctccggttatacgagaccgcggttgaattcagtagcaattacagggcctggacagaggggccttaccataaggtaaatccggaccaggtggaagcagatataggcaattattggaggggtctgtataagttggaaaagaccttccacgattcaccctacgctctagccatgactaagaaagtccgcagcaaggtggaagatttcaagcagcacattccactgatacaggtgatctgtaatccgggactgcgacctcgacattgggaggcgatgtcagccatcgtggggtaccctctccagccttctgatgactctacggtgagcagtttcctagacatgaatttagaaccatacatagatcggttcgagggaattagcgaggctgcctcaaaggagtatagtcttgaaaaggctatggagaagatgattacagagtgggacgctgtcgaatttgtgattcactcctacagggaaactggcactttcatcctagcctctgttgacgaaattcagatgttgctagacgatcatattattaagacccagaccatgcgagggtccccctttatcaagccctatgaaaaacaaatgagagaatgggaaggaaagctgctgctgttacaagagatcctcgatgagtggctcaaggtgcaagcgacttggctttatctggaaccaatcttctctagccccgacatcatgtctcagatgcccgaggagggccgtagatttaccgcggttgacaaaacatggcgggacattatgaggagcgtaatgcaggataagcacgtcctaaccgtagttaccattgacagaatgctggagaggcttaagaagagcaacgagctcctggagctgatcctaaagggcctgaatgaatatttagagaagaagagactgttctttcctaggtttttcttcctgagtaacgatgaactgctggaaatcctcagtgaaacgaaggaccccacccgtgtgcagccacacctcaagaagtgttttgaaggtatcgccaaggtcgaatttactgaaaccttggacattacccatatgaaaagctccgagggagaagtagtggagttaatcgaaatcatttccaccgccaaggccagggggcaggtcgagaaatggttggtggaactggagagagtgatgattaactctatccataaggtgaccggcgacgccacgttcgcctacaccaagtatgaacggattaactgggtgcgggactggcccggtcagacagtcctttgcgtctcgcagatattttggacaaaagaagtgcaaaccgccattcccatggggatcaaggccttggaacagtacctcaaaacatgtaataggcagattgacgatattgtcacccttgtacggggaaagttgagcatgcagaaccgtgtcacacttggggctctggtcgttctggacgtacacgccagagacgtcctctcatctctggttaagaaaaacatatctgacgacagtgattttgagtggttaagtcaactcaggtactactggcaggaaaatcatctggaaacgaaaatgattaacgccggactgcggtacggctatgagtacctgggcaattccccccgactcgttatcacgccgttgaccgaccggtgctatcggaccttattcggtgcactccacctccacctggggggagcaccggagggcccagccggaactgggaaaacagagacaaccaaggatctggcaaaggcagtggcaaagcagtgcgttgtcttcaactgtagtgacggcctggattatctcgcgcttggcaagtttttcaagggcctgctttcatgcggggcatgggcttgcttcgatgaatttaacaggattgacctagaggtgctctccgtcgtcgctcagcagattctaacaatccagcgcggtataaacgccggagccgatattctgatgttcgaaggcacagaactcaagctcgatccgacctgtgccgtgtttattaccatgaaccccggttacgccggtagaagtgagttgccggacaacctgaaagcattgtttaggacagtagcgatgatggtgcctgactacgcgatgatagccgagatcgttctctattcctgcggctttgtgactgccagaccattaagcgtgaagatcgtggccacatacaggctgtgctcagaacagctgtcaagccagcaccattacgactacgggatgcgggcagttaaaagtgtgctaaccgcggcaggaaatctgaagttgaagtatcctaatgagaacgaggagattctactcctgcggtcaattattgacgtgaacctccctaaattcctcagtcatgacctacccctcttcgaagggatcacatctgacctgttccctggggtcaaattacccaagcctgactacaatgatttgctcgcagccatcaaagataactgcgcctcaatgaacttgcagatgactgcctttttctctgagaaaattctacaggtctatgaaatgatgatcgtccgacatgggttcatgatcgtcggggagcccttcggcggaaagacatcagcttaccgcgtcttagctggggctctcaacgacatctgcgaaaaaggattaatggaggagaataaggttcagatcactgtgcttaatcccaagtccgtgacaatgggacagctgtacggacagttcgactcggtttcccacgagtggagcgatggagtgttagccgtgtccttccgcgcattcgctagttccgtcacacccgataggaaatggctgatctttgatgggccagtggatgcggtgtggattgaaaatatgaatactgtccttgatgataataagaagctatgcctaatgagtggtgaaataattcaaatgtcaccacagatgaatctcatcttcgagccgatggatctcgaagtagcatccccagccacagtatcaagatgcggcatgatctacatggagccacacatgctgggctggaggcctctgatgctgtcctgggtcaacctcctgccagcaagcgtcagtgtgattcagaaggaattcatcatgggactgttcgacaggatggtgcccgtatcagtggagttcataagaaagcacacaaaggaactgtcgcctacctccgacacgaaccttgtgcgctccctaatgaacctgatcgactgcttcatggatgactttgcagatgaggtcaagctcaaagagaggaacgaccgcgaaacatactccctcttggaaggcatcttcctattttctttaatctggagcgttggggcaagctgcaccgacgacgacagactgaagttcaataagatcctgcgggagctgatggagagcccaatttctgaccggactcgcaacaccttcaagctccagtccggcacagaacagacgagctcaaaggctctcacagtcccctttcctgaaaaggggactatctacgattaccaattcgtaacagagggaatcggaaaatgggagccctggatcaagaagctaaaggaagcccctccaatccctaaggacgtgatgttcaacgaaatcatcgtcccaacactggacacaatcagatattccgccctgatggaactgttgaccactcatcagaagcctagtattttcgttggccctacgggcaccggcaagagtgtgtatatcacgaatttcttgctgaaccagttgaacaaggagatctataaaccacttctgattaatttcagtgctcagacaacagctgcccaaactcaaaatatcgtgatgagtaaacttgacaaacggagaaaaggagtatttggtccgccacttggcaaaagaatggtggtgtttgtcgatgatgtgaatatgcccgctagggaggtctacggcgcacagccaccaatcgagttattacgccagtggttggatcattggaattggtacgacctgaaggattgtagtatgatcaaattggtagacatccaaatcatgtgcgccatgggccctcccggaggcggtcgcaatcccgtgacacctcgctacatgagacactttaacatcattaccattaatgaattctcagacaagtctatgtatactatcttcagcagaatactaacgtggcacctcgagatatgttacaagttccctgatgagtttctcgaccttacaacacagattgtgaatggtaccatgaccctctacaaggaggcaatgaagaacctgctccctacacccgctaagagtcactatctatttaatctacgcgacttctccagagttatccagggggtatgtctttccagacccgagacaactgagaccacggaggtaatcaaacgcctctgggtgcatgaggtgctccgggtttattacgatcgccttttggacaacacagataggtcctggctgattaactatatccaggagatcctgcgaaactatatgtacgaggattttcatgagctttttcagcgcctcgatttcgataacgatggaatggtggaggccgacgacttgaggtccttaatgttctgcgacttccacgatccgaaacgagaagatacaaactatcgtgagattgcagatgtagacaatttacgcatgattgtcgagatccacctggaagaatacaacaacatttctaagaagcctatgaatctggtgctgttcaggttcgcaatagagcatatcagtcgaatctcgcggatactgaagcagcccaggtctcatgctctcttggtcggcgtgggtggatctgggaggcagtctgtgacccgcctagctgcacacatggcagactactccgttttccaggtcgagatttccaaaggctatgacacaacagaatggcacgaagaccttaaggtcatcctgagaaaatgcgctgaaggggagatgcaaggcgtattcctgttcacagacacccaaatcaaggaggaatccttcttggaagacgtttccaatcttctgaatgctggagaaatccccaatctctttgcacttgatgaaaaacaagagatctgcgacaagatgaggcagctggaccggcagagagacaagactaaacagacggatggaagccccatcgccttgtttaatatgttcatcgatcattgtcgcagccagctccacgtggtcttggctatgtctcccattggagacgcttttagaaatcggctgcggaaatttcccgctctggtgaactgttgtactattgactggttccagtcatggcctgaagacgcactacaggctgttgcatcccggttcctggaagagattgaaatgtctgaagagattcgtgacggctgcattgacatgtgtaagtcatttcatacctccaccatcgacctcagcaaatccttcttcgtagaactgcagcgctacaattacgttacacctaccagctatcttgagctgatcagcacatttaaattgctgttagagaaaaagcgctccgaagtgatgaagatgaagaaaaggtacgaagtggggttggaaaaacttgattctgcatcctcccaggttgccacaatgcagatggaattggaggccctacatcctcagctgaaggtggcctcaaaggaggtcgatgagatgatgattatgatcgaaaaagagtctgttgaagtcgcaaaaactgaaaaaatcgtgaaggctgatgaaaccattgccaatgaacaggctatggccagcaaggccattaaggatgaatgcgacgccgaccttgctggcgctctgcctatccttgagagcgctctcgcagcactggacacgctgactgcacaggatatcacagtcgtgaagtcaatgaagtcaccacccgctggcgttaagctcgtgatggaagccatctgtatcctgaaaggcatcaaggccgacaagattccagatccaactggctctggcaaaaagatagaagacttttggggtccagcaaagcgtttgcttggggatatgcggttcctacaaagcctccacgagtacgacaaagataacattcctccagcatatatgaacataattaggaaaaactatattccaaaccccgattttgtgcccgagaagatccggaacgcaagcacagctgccgaaggcctctgcaagtgggtgatcgcaatggacagctacgacaaagtggctaagatcgtagcaccgaagaagattaagctggcggcagccgaaggagagctgaaaatcgcaatggacgggttgcgcaagaagcaggctgccttgaaggaagtgcaggacaaactcgcccgattacaggataccctggagctgaacaagcaaaagaaagccgatctcgagaaccaggttgatctgtgttctaagaagctcgaacgggcagagcaattgataggcggactggggggagaaaagactaggtggagccacaccgccttagaactgggacaattgtatatcaatctgactggggacatcctgatatccagtggggttgtggcttatctgggagcattcaccagcacttatcggcagaatcaaacaaaagagtggacaacactgtgtaagggaagggatattccttgtagtgatgattgctccctcatgggcaccctaggagaagcagtgacaatacgcacctggaatatcgcgggattacctagtgatagttttagcatcgacaacggtatcattattatgaacgcacgcagatggcccctcatgatagacccacagtctcaagctaacaaatggatcaagaatatggagaaagccaactctctctacgtgatcaaacttagtgagccagactatgtccgtacgttggagaattgtatccaatttggtacgcccgtgctgttagaaaacgtgggcgaggagctggaccctatcttggagcctctccttctgaagcagacctttaagcaaggcggaagtacatgcatcagactgggcgattctaccatagagtacgcaccagacttccgtttttatatcacgacaaaactgcgcaatccccactatctcccagagacttccgtaaaagttaccttactgaatttcatgataacacctgagggaatgcaagatcagctcctgggcatcgtcgtcgctcaggaacgccctgacttggaagaggagaaacaggcgttgatcctgcaaggcgcagagaacaagcgccagctcaaggagattgaagacaaaatccttgaggtgctctcctcttccgagggtaatattctggaggacgagacggccattaagatcctctctagttcaaaggcactggctaacgaaatatcacagaaacaagaggtcgccgaagaaacagagaagaaaatcgacacaacccgcatgggctacagacctatcgcaattcattcctctatactgtttttttcgttggccgacttggcaaacatcgaaccaatgtatcagtatagcctgacctggttcattaaccttttcatcctaagcatcgagaatagcgagaaatcagaaatcctcgcgaaaaggctgcagatcctaaaagatcacttcacatacagcttgtatgtgaacgtgtgtcggagcctgtttgaaaaggacaaactgctgttctccttctgcctgacaataaacttgttactacacgaacgagctatcaataaggcagagtggagattcttactgactgggggtataggcctcgacaacccctacgcaaatttgtgtacctggctgccacaaaaatcctgggatgaaatctgtagattagacgatctgcccgcttttaagaccattaggcgggagttcatgaggctcaaggatggatggaagaaggtgtatgactctttggagcctcaccacgaggtcttccctgaagagtgggaagacaaagcaaacgagtttcagcggatgcttattatacggtgtctgagacctgataaagtgattccaatgctgcaggagtttattatcaatcgtctgggacgcgctttcatagagccacccccattcgaccttgctaaagcatttggagattcaaattgctgcgcaccactgatatttgtgctcagcccaggagcggatcctatggccgctctcctgaaatttgccgacgaccaggggtacggagggtctaagctcagctctctttcattgggacaagggcaaggacccatcgcgatgaagatgctcgagaaagccgtgaaggaagggacttgggtggtactccaaaattgccacttggcaacatcctggatgcccaccctcgagaaggtgtgtgaggagctttcccccgagagcacgcatcccgactttcggatgtggttaactagctacccaagcccaaacttccccgtgagcgtgctccagaacggggtgaagatgacaaacgaggcccctaaagggttgcgtgccaacatcattcgaagttacctaatggaccccatttctgatcctgagttttttggtagctgtaagaagcccgaggaatttaagaagttactgtacgggctctgcttcttccacgccctcgtgcaggagcgacgaaaattcggtccactcgggtggaatataccctatgagtttaatgagaccgaccttagaatctcggtgcagcaactccacatgtttctcaatcaatatgaagaactgccttatgaagctcttcggtatatgacaggggagtgtaattacggcggacgcgtcaccgacgactgggacagaaggacactgaggagtatactcaataagtttttcaaccctgagcttgtggagaattcagactacaagtttgatagttcaggcatctatttcgtgcctccctctggtgaccataagtcttatatcgaatacaccaaaaccttgccactgacacctgctcccgaaatctttggcatgaacgccaatgccgacattacaaaagaccagtcagagacccaactcttgtttgataacattctgctgacccagtcaaggtccgccggagcgggtgccaagtcaagtgatgaggtcgtgaatgaagttgccagcgacattctgggaaagctccctaacaacttcgacatcgaggcagccatgcggaggtacccgacaacatacacacaatccatgaacaccgtattagtacaggagatgggaagatttaacaagctcctgaaaacgattagggatagctgtgtgaacatccagaaagcaatcaaaggcctcgccgttatgtcgaccgacctggaggaggtggtgtcgagcatcctcaacgtgaagattccggagatgtggatgggcaagtcttaccccagccttaagcccttaggtagctacgttaacgacttcttggcgaggctaaagtttctgcagcaatggtacgaggtgggacccccacccgtgttctggctaagcgggtttttttttacccaggcttttcttacaggcgcacaacagaattatgcacgaaaatatacaatccctatcgacctactcggctttgattacgaggtcatggaagataaagagtataaacacccgccagaggatggagtctttatccatggattattcctggacggggcttcatggaaccgcaagatcaaaaagctggccgagagccaccccaaaattctctatgataccgtgcccgtaatgtggctaaaaccatgcaaacgcgcagacatccctaagcggccttcttacgtggccccactttataagacaagtgagcggagaggcgtgctgtccaccacaggacattctactaattttgtcattgcaatgacgttgccatctgatcagcccaaggaacattggatagggaggggcgtggcactgctttgccagctcaactcctag

SEQ ID NO: 27921 - DNA, 1506 bp, synthetic construct
  source 1..1506: mol_type = other DNA; note = Synthetic coding sequence
atgagctctcgacaggacaaaagcgcatccaaagaaaagagtaaaaagcccgtgcgctttctgccacagctgtcaatggaaaaattggcctccaaagaaaagttcaaggcacctgctagagcgctgccccaactgagcatggtgagtactaagccacactggcagcaggcagctccttcctttcatctttctgtgaaacaggacgatgagagtccagagccctttagcgtgaaaaacgaacagtcacatgcagaatatatggagcgctttgggaaaaaaggcaagttgccacatcaagtcgatgatagctacgttggcccatcaaccagcaagtcaaaaggcaaatcacctcataaagaaagggaaaatttccgctctacacttgttaacgtgattatgcagcaggatgctgacctcgattctgccgtgcctgacgggagcacaatcccaaagccaaccgcatccgcaatcgagaaagacatcctccgatactattactacatacaccatggcattgacaccgatcacgtggcccctatggaggattcttggcttgaacatgtgctagacctcgtcccgcagcacttaaaggtgttcacagatagtattgtaacactgagtgatgagatgcgagaggattacctgctgtccgtgcgaaagtcaattgtggacttcgtgctaaaggaccctcgcgagaagggcgatgacaagaagacagatgaacttcctgcacatagggcagaaatggaaattttgcccaagccctggcgtaagtcattccttgctgcctcatcgtatatcagagatcatttaaacgctatgaatcccacaatgctcgccgtcctggacctgtggcacaccaatttcaaaaaattgaggctggtcgacatcaaagagtttcacaattgccaggacgcccttgaattgtccagcttccagaatattattatgcgccatatggactctgcaaaggagaccctgctcaagatgtggttcccggaagtgcaaaatatttattaccagggcaataaaaaaaaacagcttcccaccggggatagcagcgcaaaactagaatcattctttaattgtgcagcagccttaatgaccctgcagcttcaggacctcactctggtgtccatgcaggactttactgaccttatagcccaacccccagatagcgtgagagcgttcgaacaccctggtttcatcatgagacttattctggataacgacactataaaatttgagcccgaattatctgattacatcgacatattcctgaacgtgtatgatgtgatgatcaaagcggtaagtttcgtgcccagggtggagacaaagttgtactcgaagtggagaaataaggccaagccgggacacttttatttttcgcacatccaacgttctgtgaccttccagcacagcgaagtcagttcaccccagaacagccactttaaaattgtgtcaccatttagcgtgttgggcttcacgtggcgttgccagctctag

SEQ ID NO: 27922 - DNA, 840 bp, synthetic construct
  source 1..840: mol_type = other DNA; note = Synthetic coding sequence
atggcagctcctgttcgccgaaccctgttaggggtggccggagggtggcgccgattcgagagactctgggccggtagcctgtccagccgttcactcgcgctggccgctgccccttcatccaatggttcaccctggagactgctgggggcattgtgtttgcaaagacctcccgtggtgagcaagccgctgacccctctgcaagaggagatggccagtcttcttcagcagatcgagatcgagcgttccctctattcagatcacgaacttagggcacttgatgagaaccaaagacttgctaagaaaaaagccgacctccatgatgaagaagacgaacaggatattttgctcgctcaagacctcgaagatatgtgggaacaaaagtttcttcaattcaaattaggagcaagaatcaccgaggctgacgagaaaaatgatagaacctcccttaatcgcaaactggacaggaatctggtgctgctggttcgagagaagttcggtgatcaggacgtttggattctgcctcaggctgagtggcaacccggagagaccctgcgtgggaccgctgaacggactttggcgacactgtccgagaataatatggaggctaaatttctcggcaatgccccttgcggtcattacacattcaagtttccgcaagctatgaggacagagtcaaatctgggcgctaaggtttttttcttcaaggcactgttgctcacaggcgatttttcacaggccggaaataaggggcatcacgtgtgggtgacaaaggatgagctcggggactacctgaaacccaagtaccttgctcaagttcgacggttcgtgtctgatttgtag

SEQ ID NO: 27923 - DNA, 609 bp, synthetic construct
  source 1..609: mol_type = other DNA; note = Synthetic coding sequence
atggaggctgaggctggtggcttagaggaactcactgacgaagagatggcagctctgggtaaggaggagctggtcagacgactgcggcgtgaggaggccgctaggctggccgctctggtacagagagggaggctgatgcaggaggtcaatcggcagctgcaggggcatctcggcgagattcgagagctgaagcagcttaaccgaaggttgcaagcagagaatcgcgagctccgggatctttgctgcttcctggacagcgagcgtcaaagagggcgacgagccgctagacagtggcagctgtttggtacacaggccagccgggctgtgcgcgaggacctgggaggttgctggcagaagttggccgagctggaggggcgtcaagaggagctcctaagggagaacctggccctgaaagaactctgtttggcattaggagaggaatggggccctcgcggagggccaagtggggcaggcggatctggtgcagggccagcacccgagctggcgctgcctccatgtgggccacgggacctgggggacggctcgtcatccacaggaagcgtcgggtcacctgaccagctgcccctggcctgctcacccgatgactag

SEQ ID NO: 27924 - DNA, 1353 bp, synthetic construct
  source 1..1353: mol_type = other DNA; note = Synthetic coding sequence
atgcgcgagtgtataagcatccacgtgggacaggcaggggtccaaatcggaaatgcctgttgggagctatactgccttgaacatggaatccaacctgacggccagatgccttccgacaagaccatcgggggtggggacgattccttcaatacgttcttcagcgaaacaggtgctggaaaacatgtccctcgagccgtgttcgtggatctcgagcccaccgtagtggacgaagtgcgtacgggaacatacaggcaactctttcaccctgaacagttgatcaccgggaaagaggacgctgccagtaactacgcacgcggtcattacactataggcaaagaaatcgtcgacttagtactcgatcgcatcaggaagctggccgatctctgcacgggactgcagggctttttgatctttcattcattcgggggaggcaccggatctggattcgcatctctgttgatggagcgtctgagcgtcgactattctaagaaaagtaagcttgagttcgcgatttacccagcccctcaggtttcaaccgcggttgtcgagccatacaacagcatcctcacaacacatacgactctggagcatagtgattgcgctttcatggttgataatgaagcaatctatgacatttgccgcaggaatcttgacattgagcgaccaacgtatacgaacttaaatagactgattggccaaatcgtgtcttctattacagcaagcctgaggtttgacggtgccctgaacgtcgatctcaccgaatttcagaccaatcttgtgccttatcccagaattcacttccccctcgctacttatgcacctgtgataagcgccgagaaggcataccacgagcagctttccgtcgcagaaattaccaatgcatgtttcgagcctgctaaccagatggttaagtgcgatcccaggcatggcaagtatatggcctgctgtatgttgtatcggggagatgtcgtccccaaagatgtgaacgcagccatcgccaccattaagactaaacgtacgatccagtttgtggattggtgtcccacaggattcaaagtcgggattaattatcagccaccaacagtcgtgcctgggggagatcttgcaaaggtccagcgggcagtgtgcatgctgagtaatactaccgcaatcgctgaggcgtgggctcgtctggtacacaagtttgaccttatgtacgcaaagtgggcctttgtccactggtacgtcggtgagggcatggaggagggtgaattttcggaagcgagagaagacctggccgctcttgagaaagattgcgaagaagtgggcgtagattccgttgaggctgaggccgaggagggtgaagcttactag

SEQ ID NO: 27925 - DNA, 3078 bp, synthetic construct
  source 1..3078: mol_type = other DNA; note = Synthetic coding sequence
atggtagctatggcagaggcggaggccggtgtcgccgtagaggttcgaggactcccccctgctgtcccagacgagcttctgaccctttacttcgaaaatcgacgccgtagcggcggtggaccagtgttaagttggcagcggctgggttgtggaggggtactcaccttccgggaacctgcggacgccgaacgtgtcttggctcaagccgaccacgagctacacggggctcagctttctctgcgacccgctcccccaagagccccagccaggttactgctgcaggggctgcccccaggcacgactcctcaacgcctggagcaacatgtgcaggcactactgcgcgcttctggtcttcctgtgcagccatgttgcgctttggcaagcccaaggccagaccgagccctggtgcaactgcccaagccgctcagcgaagctgacgtgagggtgcttgaagagcaagcacagaatttgggtctcgagggcacacttgtgagtctggctcgggttccccaggctcgcgcagtacgggtggttggcgatggggcttctgttgacttgctgttgctcgagctgtacttggaaaatgaacggcgaagcggcggagggccactagaggatttgcagagactcccaggccctctgggcaccgtggccagctttcagcagtggcaggtggcagagcgcgtgctgcagcaggaacacagactgcaaggctctgagctgtctctggtgccacattacgatatcctggagccagaagagctcgcggaaaatacctcaggcggtgaccacccaagcacgcagggccctagagccaccaaacatgccttactgagaactggaggcctggttaccgcactgcaaggagccggtactgtgaccatggggtccggcgaggaaccaggacagtcaggagcgtccctccggacagggcctatggtgcagggacggggaatcatgaccacaggaagcggccaggagcctggccagtctggtacgtcattaaggactggtcctatggggagcctcggccaggccgagcaggtgtcatccatgccgatgggatcacttgagcatgagggactggtgtcactccgacctgttgggttacaggagcaggaaggacctatgtctctcggaccagttggctccgcgggaccagtggaaacatccaaaggcctcctgggtcaggaagggctggtggaaattgctatggattcaccagaacaagaaggactggtggggcctatggagatcaccatgggcagcttggagaaggcaggccctgtgagccccggatgtgtgaaactcgcaggccaggaaggcctcgtggagatggtcctgctgatggaacccggtgccatgagatttcttcagctgtaccacgaagatcttttggctggccttggggatgttgcactgctgccactggaagggcctgacatgacaggattccgcttgtgcggcgctcaagcgagttgtcaggccgcagaggagtttctccggtcccttctggggagtatctcctgccatgtgctctgcctggagcatcctgggtccgccagatttctccttgggccagaaggccaacacctgctccagggtctcgaggcccagttccagtgcgtcttcgggaccgaacgcctggccactgccacccttgatacaggcctcgaagaagttgaccccacagaagccctgcccgtgctcccagggaacgcgcacacactgtggacacccgactctaccggcggagaccaggaagatgtgtccttagaagaagtgcgtgagctgctcgccaccttggaggggctggatctggatggggaggattggcttccaagggaacttgaagaggaaggaccacaggagcagccagaggaagaggtgacaccaggccacgaggaagaggagcctgtggccccttctactgtggccccacggtggctggaagaagaagccgcactgcaactggctctgcacaggagtctcgagcctcagggacaggtggccgaacaggaggaagccgctgccttgagacaggccctcaccctctctctgctggagcagcctcccctggaagccgaggaacccccagatggagggacagacggaaaagcccagttggtggtgcactcagcctttgaacaagatgtcgaggagctggaccgagcccttcgggcagccctagaagtccacgtgcaggaggaaaccgtgggcccatggcgacgcaccctgcccgctgaactccgggcacggcttgaaaggtgtcacggggtgagtgtagctctgaggggagattgtaccatcttaaggggcttcggggctcatcctgccagggctgctcggcatctggtcgcgctgctcgctggaccttgggaccagagtcttgccttccccctggctgcctccggcccaacactcgcgggacaaacccttaaaggcccttggaacaatctggaaaggttagctgagaatacgggcgaattccaggaggttgtgcgggcattctacgatactttggatgcagccaggagttcaattagggtcgtcagggtcgagcgggtctcacaccctctgctccagcaacaatacgaactatatcgcgagcgactcttacagcgttgtgagagacgacccgtagaacaagttctatatcacggcactactgcccctgccgttccagacatctgtgcccacgggtttaatagaagcttttgcgggaggaatgctactgtctacggtaaaggcgtctattttgcacggagagcctccctgtctgtgcaagaccgctactctccacctaacgcagatgggcataaggccgtttttgtcgcacgcgtgctgacgggagactatgggcagggaaggaggggactgcgagccccacctctgcgcggacccggtcacgttctcctccgatacgacagcgcggtggactgtatctgccagccttctattttcgtcattttccatgacacacaggcactccctacccatctcattacatgtgaacacgttccccgagccagccccgacgacccttcaggcttgcctgggaggtcccccgatacgtag

SEQ ID NO: 27926 - DNA, 390 bp, synthetic construct
  source 1..390: mol_type = other DNA; note = Synthetic coding sequence
atgagtcatctgcagtctctactcctggatacactactcgggactaagcacgtggactccgctgcactgattaagattcaggaaagaagcctgtgtgtggcttctcccggttttaacgtgactcccagcgatgttagaacacttgtaaacgggttcgcgaagaaccctctccaagccaggcgcgagggcctttatttcaaggggaaagattatcgatgcgtcagggcggatgagtacagtctgtacgcgaagaatgagaatacgggcgttgttgttgtgaagactcacctgtacctgttggtggcaacatacactgagggcatgtaccctagtatctgtgtggaggccactgaatctctcggagactatctgaggaagaagggctcctag

SEQ ID NO: 27927 - DNA, 945 bp, synthetic construct
  source 1..945: mol_type = other DNA; note = Synthetic coding sequence
atgttgggtaaaggcggaaaacggaagtttgatgaacatgaagacggactcgaggggaagatcgtttctccttgcgacggcccttccaaagtctcttatacactgcagaggcagacaatcttcaatatctctctaatgaaactgtataatcataggcccctcaccgagccatctcttcaaaaaactgtgctgatcaacaatatgttgcggaggatccaggaggagctgaagcaggagggcagtctgcgacctatgttcacaccctcaagtcagcctaccaccgagcccagtgatagttatagggaggccccacccgctttctcgcatctggcctccccaagcagccatccttgtgacttgggatcaacaactccacttgaagcctgtttaactcctgcctccctgctcgaggacgatgacgacacgttctgtacaagtcaagcaatgcagccaaccgctcctacgaagctcagccctcctgctctgctccccgaaaaggactcatttagcagcgcgttggatgaaatcgaagagctttgtcccacgtctacatcaacggaggccgcaaccgcagcaacggactctgtgaagggaacgtcatctgaagccggtactcagaaacttgatggaccccaggagagccgcgctgacgattctaagctcatggacagtcttcccggaaattttgaaatcacaactagcactgggttcctgaccgatctgaccctggacgacatcttatttgcggacatcgacacgtccatgtatgatttcgacccatgtacttcgtctagcggcaccgcttccaagatggctcctgtcagcgcagatgacctgctgaagacactggccccttactcatcacagccagttacaccttcccagccgttcaagatggatttgacggagttagatcacataatggaggttctggtcgggtcatag

SEQ ID NO: 27928 - DNA, 246 bp, synthetic construct
  source 1..246: mol_type = other DNA; note = Synthetic coding sequence
atgaaaggctctcgcatagagctcggcgatgttacccctcataacatcaaacagctgaagagactgaaccaagtcatttttcctgtgtcatataatgataaattttacaagaagttcgggtttgagatcatagaaacgaagaagaattattacaaaaggattgaaccggctgacgcacatgtattacagaagaacctgaaagtcccttcaggacagaatgccgacgtgcagaaaaccgataattag

SEQ ID NO: 27929 - DNA, 1437 bp, synthetic construct
  source 1..1437: mol_type = other DNA; note = Synthetic coding sequence
atggcgtccgcaactgaggacccagtactcgaacgatactttaaaggccataaagcagccatcacctctctcgacctctcccccaatggcaagcaactggccacagcaagctgggacacctttctgatgctgtggaacttcaaacctcacgcaagagcctatcggtatgttggccacaaagacgttgtcacctccgtgcagttttcaccacacgggaatcttctggcaagtgcctctagggaccggaccgtcaggctctggattccggacaagcgtggcaaattttctgaatttaaggcacacactgctcctgtcaggagcgttgatttcagtgccgacgggcagtttctcgccactgcatccgaggacaagtccatcaaagtctggtctatgtaccgacagcgattcttgtactctctgtatagacatactcactgggtgcggtgcgcgaaatttagtcccgacggacgtctgatcgtctcttgctctgaagataagactatcaaaatctgggatactacaaataaacagtgtgtgaacaactttagcgattccgtgggctttgccaattttgtggatttcaacccctccgggacctgcatcgcgtcagcgggaagtgaccagacggttaaggtctgggatgtacgggtcaacaagttgttgcagcactaccaggtgcactccggcggagtcaattgcatatctttccatcctagcggaaactacctgattacggcatccagtgacggaacccttaagattctggatctgctcgaggggcgtttgatctacacactgcaaggtcacaccggaccagtttttaccgtcagctttagtaaagggggtgagctgtttgcatccggaggcgctgatactcaggtactcttatggcgtactaacttcgatgagctccactgtaaaggcctgaccaagcggaacttaaagcgcctgcacttcgactcccctccacacttgcttgacatatatccccgtactcctcacccacacgaagaaaaggttgagaccgttgagatcaatccaaaactggaagttattgacctccagatctctacaccacccgtgatggacattttgtcgtttgattctacaaccacgaccgaaacttcaggacggaccctccctgataagggcgaagaagcctgtggatactttcttaaccctagcttaatgtctcctgagtgccttcccaccacaactaagaagaaaacggaggacatgtcagacttaccgtgcgagtcccagcgtagtatccccttggccgtcactgacgccctcgagcatattatggaacagctgaacgtgctgactcaaaccgtttcaatcctcgagcaacgtttgacattgaccgaggacaaattgaaggactgtctggagaaccaacagaagttgtttagcgctgttcagcagaaaagttag

SEQ ID NO: 27930 - DNA, 1263 bp, synthetic construct
  source 1..1263: mol_type = other DNA; note = Synthetic coding sequence
atgcttaaggcagttatcttaatcgggggtccccagaagggtacacgtttccgtcccttatcttttgaagtcccaaagccactcttcccggttgccggagtgccaatgattcaacatcacatcgaagcctgcgcccaagtcccaggtatgcaggagatcctcctaattggattttaccaacctgatgagcccctaactcagtttctggaggctgcccaacaagagttcaacctcccggtccggtacctgcaggagttcgcacctcttggcactgggggaggtctatatcactttcgcgatcagattcttgctggaagccccgaagccttcttcgttctgaacgccgatgtatgctccgactttcctttgagtgcaatgctcgaggcacacagaagacagaggcaccctttccttctgctcggcaccacagccaaccgaactcagagtctcaattatgggtgcatagtcgagaatccgcagacccacgaagtgcttcactatgtggagaaaccttccacatttatctctgatataatcaattgtgggatctatctcttcagccctgaggcactgaaacccttgagggatgtgttccagcgaaatcagcaggacggccagcttgaagatagcccaggtctgtggcctggggcaggaactatcagattggaacaggacgtgttctctgccttagcaggtcaagggcaaatttatgtgcatcttactgacggtatatggagccaaatcaagagcgctggatctgcactgtatgcgtctcgtctgtatctgtctcgatatcaagacactcaccctgaacgactggccaagcatactcccggaggcccttggattcgcggaaatgtgtacatacaccccaccgctaaggtggccccttcagccgtgcttgggccaaacgtgtcaatcggcaagggcgtcacggtgggggagggcgtgcggctgcgagagtcaatcgtgcttcacggcgcaacgctgcaggagcatacgtgcgtcctccactccattgtcggctggggatccaccgtgggccgatgggctagggtcgaaggcactccctcggaccccaaccctaacgatccaagggccaggatggattctgagtccttgttcaaagatggaaaattgcttccagccatcaccattttggggtgcagagtgcggatccccgctgaggtacttatactgaactccattgtgcttccgcataaggagctgtcaaggtccttcacgaaccagattattctctag

SEQ ID NO: 27931 - DNA, 1215 bp, synthetic construct
  source 1..1215: mol_type = other DNA; note = Synthetic coding sequence
atggaccaggattacgaacgcagactgctgagacaaatcgtcattcagaatgaaaacaccatgccgagagtgaccgagatgagaagaacactgactcctgcttcttctccagtgagttccccaagtaagcacggtgaccgattcatccccagcagagcaggtgctaactggtccgtgaacttccaccgaattaacgaaaacgagaagagtcctagtcagaacagaaaggctaaggatgcaacctctgacaatggcaaagatggcctggcatatagtgctctgctgaagaatgaattactaggggctgggattgaaaaggtccaggatccgcagacggaggatcgcagattgcagccttccacccccgaaaagaagggcctttttacggttacccgtttatgcgacctttccgtcgaaggagactctgttacatcggttggctggagcgaacgaggcaatctggtagccgttggaacccacaaggggttcgtccagatctgggatgccgctgcaggcaaaaaattgagcatgctcgaaggtcacacagcacgagtgggagctctggcctggaatgccgagcagttaagctctggttctcgggatcgcatgatcctgcagagggacattaggaccccccctctccagagcgaacgcaggctccaggggcaccgacaggaggtctgtgggctcaaatggagcacagaccaccagctcctcgcctcagggggaaatgataataagctgctggtgtggaaccattcttctctgtctcctgtgcaacagtataccgaacacttagccgctgtgaaagcaatcgcttggagccctcatcaacacggattactcgcctcaggcggaggcaccgccgaccgctgcattcggttttggaacactctgacaggccagccgctgcagtgcatagacacaggctcacaggtttgcaacctggcctggtcaaagcacgcaaacgagcttgtaagcacccatggttactcccagaatcaaatcctcgtttggaagtaccccagcttgactcaagtagcaaagctgaccggccacagctatcgggtgctgtatttggctatgtctccagatggcgaggccatcgtcactggcgcaggcgacgagaccctacgtttctggaacgtgtttagcaagactaggtctactaaagagagcgtgtcggtgctcaacttgttcacacgcatccgatag

SEQ ID NO: 27932 - DNA, 5892 bp, synthetic construct
  source 1..5892: mol_type = other DNA; note = Synthetic coding sequence
atgaagcagcggaagggacaagggtccggtggaagccgagggagaaaaaaacggggtctctctgacatttctccctccacttccctgccacctttggttgagggacagctcagatgttttttgaagctaacggtgaatcgggttatttggaagatagctaaaccccctacatgcgttctagtgcgcgtcagatggtggggtgagactagcgatgggacccttttttgccctagggatgctttacagacagaaccgaaagctgtacgcacaaccacgaggtacgctatcagatgtggaccaaagcagttcaccagctacctgaccgacatggcggtcttggtacttgaggttattaccaagttggatggattgcctatcggaagggtacaaatcaacggcctggcacagctctcccccacacaccagatcaatggcttcttcacaatcgtgagcagcacctccaagaagcttggagagctgcaggtgagcctggctctggagccactaagcgagacttacgatagctatcacccacttccaactacagacatgaccgaaaacgtcctgctgtccaagcagggcttccgagaaaacacggaaccttctagcacccagtttcaggtgccgagtagaccacgcgatatacatactataaagattgacggcaaagaattagccgctaactcaagcagaagtaccacgcccagaggtaaagatcatgtgtgcttcgccgaaaatccggacactatcaaagatagctccttcggccttcagcactcgcttaacagtggccagagcctggagtccgtgacacttaaaggtcgggcaccaagaaaacagatgagtctcctgaattcctccgagttccagcctcagattcggactgtggccaagtctcactccgattcttgtattttaagcagcaacaatctccctacgaaggacttgctttcagcactgctcgagcagggcaataagctgagaaatgctatggttatcagcgctatgaagagtagcccagaaacatctatgctgctggaccaggtgcatcctcccatcaatgaagacagtctgagggccagcacccagattagggccttctcccggaatcggttcaaggatcatatcgaagatcacttgctgccgtccactgagaacacgttttggagacatgatacgaaagctgataccagggccattcagctcctgcttggcagcgcagagttgtctcaggggaacttttgggacggactgggcagccctcccgactccccatctcctggttctgatgtatattgtatatctgagcttaatgatccccagtacgatcagtccctcttagagaacctgttttacactgctcccaagagcgatacttcgataagtgactttctttcggaggaagacgacatcgtccccagcaagaaaattagccaatctaccgcgctcgcgaggtcaagcaaagtgttagaaagcagcgaccacaagctcaagaagcggagtgctggaaagcgaaatcgcaaccttgtcgaacagcagatgttgagcgaaactccagaagacgcccagacaatgacgctgagtgtggacaggctggcactactgggccgaacccatagcgtgcggatcattatagagactatgggggtgcccccagacagccctcaaatgactccagggaagaagtcatacgccggacccccacctaaagtgacaactgctaagaagagaacattcttcgtagagtatcacttcccggtaggcttttctgagagcggccttggcaagacggcactgatcaccgaagtcgtaaggctcgcttcatccaagattaccgatggcaaagtgaagttccagcagcgcttcgtctttcccgtccagtttgggggtccgatgatcgaacactggtggaactccaacttaaccttccaaatctatgtcaagaaaactccccagaagaagcccgaagtaatcggctctgtatccctatccctgagggccgtgattcagtctgaactcctctcattctccgaccagctgcccgtgcaacaagagaatggccagagcccctttgggccactcaaagtgaccatggagctcatcactgacaacaaggacttcactggcataaatactaagctgagtgggaacactcactataccccattgtgtgcccctactagccctaacaaagctcttcccgaactcaaccaggatatgacttgcactaaaaacccacagaatctaaatcaaatacacgaggagaccgccaaaaaggcccagaacctggttctgcctaacagaaagtcaccttctcccgtcgccccacacccatctacattcgtcgctacacctgcttcacacaatctggttaaccagaccaacggtactacgaaggaatctgctcttcttctgcacgtcttgttgatggtccccgatggaaaggattttatcagcggtgaatctgagaaacagagtccatgtaacgtctatttgaactgtaagttgttcagtacagaagaagtgacccgatcagtgatcgcctggggaaccactcagcctgtcttcaacttctcacaggtgatacctgtgtccctctcctcaaaatatctggagcgtctgaagaacaacgtcatggtgatagaaacttggaataaggtgcgcagcccaggccaggataagctgctagggctggtaaagctgcccctgcaccagttttatatgagctttaaagacgcaaagatctccaggttgcttcttgacgcgcagtacccagtggtggctgtggattcttacatgcccgtgatcgacgtgtttagcgggcaccaaaacgggagcttgagggtgttcctggctatgggctcttccaatcagatcatggctctgcagagattgaagaacgaggagggcacactgccgcctttctcacccaggcccgctcattttcttgatcagccaactgccgcttccgtggcgatggccgaggaccggggtaacggactcatggaacactgcttcgagatccacatagaaatggtaaaaggcctggctccacttcaggccacggtgtggggcgaagccgattgctatgtgcagtattatttccctgtacagcacagtcagtccagcgtccttaaagggccagaattcctagaaaatggcattactcttaagcccttccggaccgcgacaaccctgtgtgtccctgatccgatcttcaattccgagcatcaccactcactgttgttgccagccgaagtccccgttcaacggttgctcctgtctgccttcagcgcacagggcttagtgccaggcggaggggttcagttcgaaatatggtgcagatactactatcctaatgtgagagaccagaaagtcgctaaagggacacttcctctttctagaatttgtgctatggttacaacccagcatagagaggacgtgggaatacaaacgttcaacctgccactcaccccacgtatcgaaaatcgcaaagagctgagaaaccagagctcaggcctgctggacgtaggcttgcgctaccgaagaagtccgaggaccgcagaaggggtacttgctgccagaacggtcagtatatcggtgcaaattattcgagcctgcgggctacaggccgctgctaaagccctggcagaaagagagcctgcccttcagttctctgccaccgtcggtgtaaacgcttctgtcacaacccatctgagttttttaccgcagggggaacagaggcgaacccaccctgttgcctgctccttttgcccggagttttcccaccatgtcgagtttacctgcaatctcgttacccagcattgctccggtgaggcttgcttcctggcagaacttctggaatttgcggaagtcatttttgccgtctatcatgaaaacaccaaatcagccagtgacatcattagcattgagtcatgcaaggagtatctgctaggggtcgtaaaggtgcctacaaaggaactcttaattaagcggtctggcataactggatggtatcccatcatcctcccagaggatggagggctgccccacggcctagaactaatgcagaaaattgtgggagggcttgaactgagtatcagttttacacacaggggtgatagggagagggtattggaagctgctgagcatctgggatggagttttgagaattctctgaaggactttgtgcggatggatgagggcgagccagcaacagtgactatcagtaccccaaggctatggttacccattcattgcgtactgctcgcgggtcataaccacattcacaagaacacgtattgttatctccgctataagttctacgatcatgaagcattttggaccccactgaaaaaacccaaggaaagcgtgaacaagaaacaaattatggtcacttttaaagcaagcaaacgtgccgaagttacacggggaccgagccttctgtggtatttcagggaagagcgtctggaaatacaggtgtggagggcgtacggcaatgacagcgttgaacgcccacaccagacagacagctggatagggtctgcatatgtcgacttagcaagactcggggagagatctgcacggactctgactgttagtggagtataccctctgtttggacgtaacgcatcaaatctctcgggggctgcacttcgcgtgcacgtggtgctttcttcacttagcagtcatttggaacctacacacgaactcgacagcatggactgttcatcccacagcgaaagcgaacagctgcccaggagaaacgatgaagtgcagctgtctcctccagaagtgatttcgtgtcaccagaagtcgcctgctagtacccaggtgccgtgcagttccacaacagcagaagtccggctcacacaagaaggcccagcagatctcgatggcacattcgccgtgagcattctggtggagcgagctatgcacctctctctgaaagggtcacccctgactgaacgtaaggtgtcaatcccctcatgctgcgtgagctttgctactgctgatgagagctctccagtgtatacccaggtcgtggagaacactgactcgcctatatggaattttcagcagcaatcaaggttatcaaaggagctcttgctcgaccctcagcagactctggtgtttaaggtatggcacaaaggtgacgaggaaagggttatcgggtttgcatcagtggacctctcccctctgctgtctggttttcagttcgtttgtgggtggtataacatcacagacttttctggggaatgccagggtcaaatcaaggtggccgtatctcccctggagtcccttattcatttcaaggaggaaagacaagccaggcgaggggtggaaacaagcaagagcctgatccctatttactcaccattctcctttcctgcttccgatacatacgccgcattcagctcacatatggctagacagacactggaccaactggcccacgcaagctctaaggaattagactttagcagcccgggtcgtagcgacaccacgagatctcaggcctcccggcacgaagagcatgtgcagaacatcaggcgcttccatgagtccctacatctgcagggcgaggcccctctgccttgtgatgataagcttacaacctctcccctctcatcacaaacaagtattcttacaagcctgcgtaaaaacctgagcgagctcgaccaaatccagcggtattttcgacagaagcttacgaaaccttttctgcctctgtcccctcagacacagacggccatctcccaacatcaggaaagctgtcgggaccaccttggaccaggagcaagctccttagatcctgggagccagtgcatcctggaaaagtcatcaaatctggtgctccaggtgtcatcactcatcaccgggtcctattat

SEQ ID NO: 27933 - DNA, 5586 bp, synthetic construct
  source 1..5586: mol_type = other DNA; note = Synthetic coding sequence
atgaaacagcgtaagggacaaggatctggagggagtaggggtcgcaagaagagaggactgtccgatatttcccccagcacctccctgcctcccctcgtcgaaggccaattacgatgtttccttaaactcaccgttaacagggtgatttggaagatcgcaaagccacccacctgtgtgttagtgagagttcgctggtggggtgaaacgagtgacggtactctgttctgccccagagatgcactgcaaacagagccaaaggcggtgcggaccacgacccgctacgctattagatgtggccctaagcaatttacttcgtacttaacagatatggcagtactcgtgctggaggttattacaaaacttgacggcctgccgataggcagagtgcagattaatggtctggcccaattgagccctactcaccagattaacggattttttactattgtctcttccacaagcaaaaaactcggtgagttacaggtgtcccttgctcttgaacctctatcggagacctatgacagctatcacccgctccctaccacagacatgactgagaacgttctgctgtccaaacagggtttccgggaaaatactgagcccagcagtacacagttccaagtgcctagccgcccacgggacatacacaccatcaaaatcgacgggaaggagctggccgctaactccagcagaagcacgaccccaagagggaaggatcatgtctgctttgccgaaaaccctgacacaataaaggattcatccttcggcctccagcattccttgaattctggtcagtcccttgaatcagtcacgctcaagggcagggctcctcgaaagcagatgtcattactcaacagctcagaatttcaaccccaaatccgcacagttgcaaagtcccattctgactcatgcatactcagctcaaataatcttcccactaaagatctcttaagtgccttgttagagcaagggaacaagctgcgcaacgcgatggtcatttccgccatgaaaagttcacctgagacctctatgctgctagaccaggtgcacccacccattaatgaggactcattgcgagcaagcacccaaattcgggctttttccagaaatcgctttaaggatcatattgaggaccacctgctcccttcgaccgagaacaccttttggagacacgatactaaggccgacaccagagcaatccagctgcttctcggcagtgcagaactcagccaggggaatttctgggatggcctcgggtctccaccagattccccttcgccaggatccgatgtttactgcatcagcgagctgaatgacccccagtacgaccagtcccttctcgagaatctgttctatacagcaccaaagtccgacacgtccatctccgatttcctcagcgaggaagacgacatagtccctagtaagaagatatcccagagcactgccttggctcggagttcaaaagtgctagagtcgagcgaccataagctgaagaagagaagtgcgggaaaaaggaataggaatctagtggagcagcaaatgctgagtgaaactcctgaggacgcccagacaatgactctgagcgtcgatcggctggcactgctaggacggacccatagtgtcagaatcatcatcgagactatgggggtgcctccagacagcccccagatgacccccggaaaaaagagctatgccggaccaccaccaaaggtaaccacagctaaaaaaagaactttcttcgtggaatatcattttccagttgggttctctgaatccggtctaggcaagacagcactgatcacggaagttgtgcgcctagccagctccaagatcacagatggcaaagtgaaattccagcagagattcgtcttccctgttcagttcgggggtccaatgatagagcattggtggaatagcaatttgacttttcagatttacgtgaaaaagaccccccaaaaaaagcctgaggtaatcggctctgtgagcttgagcctgagagcggtgatacagagtgagctgttatctttttcagatcagctgcccgttcaacaggaaaacggccagagcccatttgggccactcaaggtcactatggaactgatcacagataacaaggactttactggcattaataccaaactctcaggcaacacacactacacccccctctgcgccccaacatcccctaacaaggccttgcctgagttgaaccaggatatgacctgtacaaagaatccacaaaacctgaatcagatacacgaggagaccgctaagaaggctcagaacctagtgctgccaaacaggaagtctccatccccggtcgccccacacccttccacttttgttgccacacctgcctcgcacaatcttgtgaaccagacgaacggtaccactaaggaatcagctttgctgctacatgttcttctgatggtccccgacgggaaagatttcatttctggagagagcgagaaacaaagcccctgcaacgtttatttgaattgcaagctgtttagtaccgaggaggtaacgcgttctgttatagcctggggcactactcaacctgtgttcaatttctctcaggtcatcccagtctcactgagttccaagtatttggaaaggctaaagaacaacgtcatggtgatagaaacttggaacaaggtgcgatcccctggtcaggataaactcctgggcctggtgaaactgcctctgcaccaattttatatgtcattcaaggacgccaagattagcaggctcctattggacgctcagtaccccgtcgtggccgtagactcatatatgcctgtgatcgacgtcttttccggtcatcagaatggatccctccgcgttttcctggccatgggatcgtcaaaccagatcatggcccttcagagacttaagaatgaagagggaacattacccccattcagtcctagacccgcacactttctcgaccagcctactgctgcctccgtggcgatggccgaagatcgaggcaatggcctgatggagcattgcttcgagatccacattgaaatggtgaagggccttgctccattacaggcaaccgtatggggcgaggctgactgttacgtgcagtattacttcccggttcagcacagtcaaagttctgtgctcaaaggccctgagttcctggagaacggcatcacgctgaagccctttaggacagcaactacattatgcgtgcctgatcctatctttaattcagagcaccaccacagtctgctgctgcctgctgaggtccctgtccagcgccttttattgtctgcattctcagctcaaggccttgtcccagggggtggtgttcaattcgagatttggtgtcggtattattaccccaatgttcgtgaccagaaagtggcgaagggaaccctgccgctgtctcggatttgcgcaatggtgacaacgcaacacagagaggacgtgggaatacagaccttcaacttgcccctcacacccaggatcgagaacaggaaggagctgaggaatcagtcatccggcctgctcgacgtaggtctacgctatcggaggtctccacggactgctgagggcgtgctggctgcccgaacagtgtctatcagcgtgcagatcataagagcatgtggcctgcaggctgcagccaaggcactcgcagagcgcgagcccgctttgcagtttagcgccacagtaggagtaaacgcctcagtgactacccacctgagtttcctgccccagggtgagcagaggcgcacacatcccgtcgcttgttcattttgcccggagttctcacatcacgtcgagttcacctgcaatctggtcacacaacattgctctggagaggcttgcttcctggccgagctgctggaattcgccgaagttatttttgccgtttatcatgagaacacaaagtcagcgtcagatattatatcgatcgaatcttgcaaagagtatctgctgggggtcgtcaaagtcccaacaaaagagctgctgatcaaacgcagtgggattaccggttggtatccgattattttgccagaggacggagggctgccccacggcctggagctgatgcaaaagattgtcggaggtctagaacatctcggctggtcctttgagaatagtctgaaggactttgtgcgtatggacgaaggagagcccgcaacggtaaccatcagcactcctaggctttggttgcctattcactgcgttctgctcgcagggcataaccatatccacaagaatacttattgttacctgcgatacaagttttatgatcatgaggctttttggacacccctcaagaaaccaaaagaaagtgtcaataagaagcagataatggttacatttaaggcctccaaacgggcagaagttaccaggggtcctagcctactatggtatttcagagaggagagacttgaaattcaagtatggagagcttatggtaatgattctgttgaacggcctcatcaaaccgattcctggattggatccgcctacgtcgaccttgctcgcttgggcgaacggtcagcacgcacattgacggtcagcggtgtataccctctgttcggcagaaacgcctctaatttgtctggagccgcactccgcgtgcatgtggtcctgtcttctctgagctcccatctagaacccactcatgagctggacagtatggattgcagttcgcacagcgaatccgagcagttgcccagacggaacgacgaagtccagctatccccgccagaagtcatcagctgccatcagaagagtcccgcatccacgcaagttccctgctccagtacaactgctgaagtcaggctcactcaagagggccctgctgaccttgacgggacctttgcagtctctatcctcgtggagcgggctatgcacctgagtcttaagggcagccctctgaccgagaggaaggtgagcatcccttcatgctgcgtgagctttgcgaccgcagatgagtccagccctgtctacacccaggttgttgagaacacggactccccaatctggaactttcagcagcaaagcagactgtctaaggagctgctactagatcctcagcagacgttagtcttcaaggtctggcataagggtgacgaggagagggtgatcggctttgcaagcgtggacctgtctcccctgctgtctgggttccagttcgtgtgcggttggtacaatattacagatttttctggggagtgtcagggccagattaaggtggcagtcagccccctggaaagcctgatacacttcaaggaagagcgccaggctcgacgaggggtggagacaagtaaaagcctcatccctatttattcgcccttctcatttcccgcttcagatacatacgccgcattcagctctcacatggctagacagactctggaccagttagctcacgcgtcgagcaaagaacttgatttttccagccccggtcgcagtgatacaacccggtcacaggcttcgagacatgaggagcacgtccaaaatatcagacgctttcatgaatccttgcatcttcaaggcgaagccccactcccctgcgatgacaagctgaccacctctccgctatcttctcagacttaa

SEQ ID NO: 27934 - DNA, 1131 bp, synthetic construct
  source 1..1131: mol_type = other DNA; note = Synthetic coding sequence
atgctcacttttcttcagcagttgcgcgtggattggcccgctgccagtgagcgagcttcgagccataccctcagaagccatgctttagaggagctgacgagcgccaatgacggcagaaccctcagtcctggcatcttggggaggctctgtttgaaggagctcgtagaagagcagggacgcactgcgggttacgaccctaacttagataactgcctggtgacagaggatttgctgtccgtgctggcagagctgcaggaggcattatggcattggcccgaagattcccaccctgggctcgccggagcatccgacacagggactgggggatgtcttgtcgttcacgtggtcagctgcgaggaggagttccaacaacagaaattagatttactgtggcaaaaactggtggataaggcaccacttagacaaaagcatcttatatgtggcccagtcaaagttgctggagctccaggcacgctgatgactgcacccgagtattatgagttccggcatacacaggtttgtaaagcatccgcgttaaagcacggaggtgacctcgcccaggaccccgcttggaccgaaattttcggcgtgttgagtgtagcaactattaagtttgagatgctgagcaccgcacctcaaagtcagctgttcctggccctggccgatagctcaatatcaaccaaaggcacgaagagcggcacatttgtgatgtacaattgtgccagactggccacacttttcgagtcctacaagtgctcaatggaacaaggactgtatccgactttccctccggtttccagcttagatttttctctgctacatgatgagggcgaatggctcctcctgtttaatagcattctcccctttccggacttgctatcccgtaccgccgtgctggattgtaccgcaccaggtttacatatcgccgttcgcactgagatgatctgtaaatttctcgtccagctttcaatggatttcagcagctactataatcgcgtgcatattttgggagagcccaggccccacctatttggccagatgtttgtaagactccagctgttgcgagcagttcgtgaggtcctgcatacaggtctagcgatgctgggcttaccacccctgtctcacatctag

SEQ ID NO: 27935 - DNA, 1572 bp, synthetic construct
  source 1..1572: mol_type = other DNA; note = Synthetic coding sequence
atgaaccagccctgcaattccatggagcccagggttatggacgatgacatgttgaagctagctgtgggggatcaggggccacaagaggaggccggacagctcgctaagcaggaaggcattcttttcaaggacgtgttgagcctgcagctggatttccgcaacatcttacgtatcgataacctgtggcaatttgaaaacctccgcaagctccaacttgacaacaacatcatagaaaagatcgagggactggagaatcttgcccacttagtttggttggatctctcgtttaataacattgagacaatcgaaggtctcgatacattggttaacttggaagatttgagcttattcaacaacagaattagcaaaatcgatagccttgatgccctggtgaaattacaggtgctgtctctcggaaacaatagaattgataacatgatgaacatcatctacctcaggcggttcaaatgcctcaggacgctgtctctctccaggaaccctatcagcgaggcagaagattacaagatgtttatctgtgcctacctcccagacctgatgtatcttgattatagaaggattgatgatcacacaaaaaagctagctgaggcaaagcatcagtatagcatcgacgagctgaagcatcaggaaaatttaatgcaggcacagctcgaagatgagcaggcccaacgcgaagaactcgagaagcataaaaccgcatttgtggagcatctcaatggatcctttctcttcgatagtatgtatgccgaggattctgaaggcaacaaccttagttacctgccgggtgtgggggaacttctggagacttacaaagataaattcgtgattatttgtgtgaacatcttcgagtacggactcaaacagcaggagaaaaggaagaccgagcttgatacctttagcgaatgcgtaagggaggccatacaggaaaatcaggaacaggggaagaggaaaatcgcgaagttcgaggagaagcatctgagttctctctcagccattagggaagagcttgaactgcctaatattgagaagatgattctggaatgttctgcggacatctcagagctgttcgatgccctaatgacgctggaaatgcagctcgttgaacaactggaagagactatcaacatgtttgagagaaacatcgttgacatggtgggcctctttattgagaatgttcagtccctgatggcgcaatgtagagacctggaaaatcatcatcatgaaaagctgctggagatcagcatcagcacgctcgagaagattgtagagggtgatctcgatgaagatctgccaaacgatctcagggcactatttgttgataaagatacaattgtcaatgcggtgggtgcgagccacgatatccatttattgaagatcgacaacagagaagacgagctggtgacccggattaattcttggtgcacaaggttaattgatcggatccataaagacgaaatcatgagaaaccggaaacgggttaaagaaataaatcaatacatcgatcacatgcaaagcgaactcgacaacctcgagtgtggcgatattttggactag

SEQ ID NO: 27936 - DNA, 1680 bp, synthetic construct
  source 1..1680: mol_type = other DNA; note = Synthetic coding sequence
atgaaggtcatcacctgtgaaatcgcatggcacaacaaggagcctgtatatagtctcgatttccagcatggaaccgccggaaggatccaccggctggcatccgcgggtgttgatactaatgtgcgtatatggaaggtggaaaagggaccagacggtaaggctattgtggaatttctcagtaacctggccagacacacaaaggccgtaaacgtggtaagattcagtcccaccggcgaaatcttagcgtctggaggcgacgacgccgtgatcctgctctggaaagtgaatgacaacaaggaacctgagcaaatcgcttttcaagatgaagatgaagcgcagctcaataaagagaactggaccgtagtgaaaacgctcagaggtcacctggaagacgtgtacgatatttgttgggctactgatggtaacctgatggcttctgccagcgtggacaacaccgccatcatttgggatgtgtccaagggtcagaaaatctcaatctttaacgagcataaaagttatgttcagggggttacgtgggaccccctggggcaatatgtggcaactctcagctgcgatcgcgtgctgcgtgtgtatagcattcagaaaaagcgggttgccttcaacgtatcgaagatgctcagcggcatcggggcagagggcgaggcccgaagttatcgaatgtttcacgacgatagtatgaagtcatttttcagacgcctgtctttcaccccagacggctctctgctgctgactccggcaggttgtgtagaaagcggcgaaaacgttatgaacacgacctacgtcttcagccggaagaatctgaagcggcctattgcccacctcccctgccccggaaaggctaccttagccgtaaggtgctgccctgtctacttcgagctccgaccagttgtggagacaggagtggagttaatgtcactcccctaccgcttggtatttgctgtggctagcgaggattctgttttgctgtatgatacccagcaatcatttcccttcggttacgtgtcgaacatccactatcatacgctgagcgacatttcctggtcttccgacggagcatttctggctattagctctaccgacggatactgcagctttgtgacatttgagaaagatgagctcggcatcccactaaaagaaaaacccgtgttaaatatgcgcacccctgatacggcaaagaaaaccaagagtcagacccacagaggtagttccccgggaccaaggcccgtcgaaggtactcctgcttctcgtacccaagatccgtcctccccaggaactactccacctcaggcgaggcaggcaccagcacccacggtgataagagacccccctagtattacccccgcagttaagagtcccctgcctggaccttccgaggagaagacactgcagccgtccagtcagaacactaaggcacatccctcaaggagggtgaccttgaatactcttcaggcttggtcaaaaactactcctcggaggataaatctgacaccccttaagactgatactcctccctctagtgtgcccacatcagtcatctctactccatccactgaggagatccagtctgaaacacccggtgatgcacagggatctcccccagagctcaagcggcctcgcttagatgagaacaaagggggtaccgaaagtttggatccctag

SEQ ID NO: 27937 - DNA, 1527 bp, synthetic construct
  source 1..1527: mol_type = other DNA; note = Synthetic coding sequence
atggccgacggtcaggttgccgagctgctccttcgccgattggaagcgtctgatggaggcctggattccgcagagctggcagcagagttggggatggagcatcaagccgtggtgggggctgtgaaatccctccaggcacttggagaagtgatagaagctgaactgcgcagcaccaaacactgggaattaaccgccgagggcgaagaaatagccagggaaggctctcacgaggccagagtgttccggtctattcctcctgaagggctcgctcagtccgagctgatgagactcccatcaggtaaagtgggtttttccaaagcaatgtctaataagtggatcagggtggacaagtcagccgcagacggaccacgcgtcttcagggtggtggattctatggaggacgaggtgcagcgaagacttcagcttgtcagagggggacaggctgagaaattaggggagaaggaacgatccgagttgaggaaaagaaaactcctcgcggaagtcaccctgaagacatactgggtcagcaaaggttctgcattttccactagcatcagcaaacaggagactgaactctcgcctgaaatgatatcatccggaagctggcgcgaccgtccttttaagccctacaattttctggctcacggcgtgctgcccgactcaggccacctacacccactgctgaaagtgcggtcccagtttcggcagatcttcctggaaatgggcttcacagagatgcctaccgacaacttcattgaatcttcattttggaattttgacgcactgtttcagccacagcagcacccggcaagagatcaacacgacacattctttctcagggatcccgctgaagccttacagctgccgatggattacgtgcaaagagtgaagcgtacgcactctcaagggggttacggatctcaggggtataagtataattggaagttggacgaagccaggaaaaatctcttacgtacccataccacctcagcgagcgctcgtgccctgtatcgcctggcccagaagaagccttttacacctgttaaatattttagtattgaccgtgtgttccggaatgagaccctcgacgcaacccacttggccgagtttcaccagatagagggcgtagtggctgatcacggactcacactcgggcacttaatgggtgttctcagggaattcttcacgaagctggggatcactcagctcaggtttaagccggcttataatccttacacagaaccttctatggaggtcttttcctatcaccaaggcctgaaaaaatgggtggaagtgggaaactccggagtgttcaggcccgagatgctgctcccaatgggtcttccagagaatgtgagcgtaattgcctggggcttatcattggaacgtcccacaatgatcaagtacggcattaataacattagagaactcgtgggacataaggtgaatctgcagatggtgtacgacagtccattgtgcagactggatgcagagccccgacctcctccaactcaggaagctgcctag

SEQ ID NO: 27938 - DNA, 1203 bp, synthetic construct
  source 1..1203: mol_type = other DNA; note = Synthetic coding sequence
atgtcgtcaccattggcatcattgagcaagactcgcaaggttccactacctagtgaacctatgaatccgggtcggaggggtatccggatctacggagacgaggatgaggtcgatatgctttctgatggttgcgggagcgaggagaagattagcgtgcctagctgctatggtggcataggcgctcctgtcagtcgccaaggtgattcgttggcgcctcccgaggtcgactttgaccggctcctggcttcacttcaggacctgtccgagctggtggtggagggagacacccaggtgaccccagtgcccggaggcgctcggctccgcacccttgaacctatcccattgaagctgtataggaacggaatcatgatgtttgatgggcctttccagcccttttacgacccaagtactcagcgctgcctgagggacattttggatggattttttccatccgaacttcagcgcctttatcctaacggcgttccatttaaagtgagtgatctgcggaaccaggtttacctggaagacgggcttgatcctttccccggtgagggcagagtggtaggcagacaactcatgcacaaggcattggacagggtggaggagcaccccggtagcaggatgacagcagagaagtttctgaaccgcctgcctaagttcgtgatccgacagggggaagtcatcgatattaggggaccaatcagggatacactccaaaactgctgccctcttccagccagaatccaagagatagtggtggaaactcccacgctggccgctgagcgggagcggtcgcaagaatcaccaaatactcccgcacctcccctgtctatgctgcgaattaaatctgagaacggagagcaggccttccttctgatgatgcagccagacaacacaatcggcgacgtgcgggctctgcttgcccaagctcgtgtcatggatgcgagtgccttcgaaatattcagcaccttccctcccactctgtaccaggacgacaccctcactcttcaagccgcaggcttggtcccaaaggccgcactcctgctccgcgcaagacgggctcctaagtcatctttaaagttctcccccggaccctgccctggtcccggacctggaccttcacctggcccaggtcccggtccctcacccggtcccggtcctggcccaagcccctgtccaggccctagtccgtctccacagtag

SEQ ID NO: 27939 - DNA, 1350 bp, synthetic construct
  source 1..1350: mol_type = other DNA; note = Synthetic coding sequence
atggctagcgcgctcagacctcccagggtccccaaacccaagggagtcctgccttcccactactacgagtccttcctggagaagaagggcccatgtgacagagactataaaaagttttgggctggcctgcaaggcctgaccatctacttttacaattccaacagagacttccagcatgtggaaaagctaaatctaggcgctttcgaaaaactgacagacgagattccgtggggctcatcacgggatcccggaacacatttttccctcattctgcgcgatcaagagataaagttcaaggtagagaccttggaatgcagagaaatgtggaagggattcatcctcactgtggtggagctgagggtaccaacagatctaaccttgttgccagggcatctttatatgatgtcagaagttttggctaaagaggaggcgagaagagccttggaaacaccatcttgtttcctgaaagtgtccaggctggaggcccagcttctccttgaacggtatcctgagtgtgggaacttactactaagaccctcgggcgacggagccgatggggtgtcggtgacgacacggcaaatgcacaatgggactcacgtggttcgtcactacaaggtgaagcgagaagggccaaagtatgtcattgatgtggagcaacctttcagctgtacaagtctggatgctgtggtgaattattttgtgagccacactaaaaaggccttggtcccatttttgctcgacgaagattatgagaaggtgttaggatatgtcgaggccgacaaggaaaatggagagaacgtttgggtcgccccttctgctccaggacctgggccagccccatgtacaggcggacctaaacccttgagcccagcgtcatcccaggataaactccctccacttcctccactgcccaatcaagaggagaactatgtgacacctattggagacggacccgcagtggattacgagaatcaagatgtggctagctcatcctggccagtgattttaaaaccaaagaaactccctaagccgcctgctaagctgccaaaaccaccagtgggacctaagccagtcgagaagggattccatcacgttgcacaggccggactggagctcctcacttcatcagatccacctacctctgcatcgcaaagcgccggaatcaccggcgtgagtcaccacacgtggccccacctgagcagtctccctgaacccaaggtcttcaacggaggcctcggacgcaagctgcccgtgtcatctgcgcaacccttattcccgacagcgggactggctgatatgacagctgagctgcagaaaaaacttgaaaaaagacgtgccctggaacactag

SEQ ID NO: 27940 - DNA, 1239 bp, synthetic construct
  source 1..1239: mol_type = other DNA; note = Synthetic coding sequence
atggatcccattagatccttttgtgggaaactgagaagcttagcctccacactggactgtgaaacagccaggctccagcgtgccttagatggcgaggagtccgatttcgaagactatcctatgcgcattctttatgacctgcacagcgaggtgcagaccctgaaggatgatgtgaatatcctcctggataaagcccgtctggagaaccaggagggaatcgatttcatcaaggctaccaaagttttaatggaaaagaacagcatggacattatgaagattagggaatatttccagaaatatggttactcccccagggtaaagaagaatagcgtgcacgagcaggaagccatcaacagcgacccggaactttctaattgcgaaaacttccagaagaccgacgttaaagacgacttgtctgatcctccagtagcaagctcctgtatttcagaaaaaagccctcgctcaccgcaattgtctgattttggactcgagcgctatatagtgagccaagtgctgcctaatccacctcaggcagtcaataactacaaggaagagcccgtcatcgtaacgcctcccaccaaacaatctcttgttaaggtgctcaagacccccaagtgcgctctgaagatggatgattttgaatgcgtaacaccaaaactggagcacttcggaatctcggagtataccatgtgtctcaacgaggactacactatgggactcaagaacgccaggaataataagagcgaggaagcaatcgatacagagagtaggctgaacgataatgtgtttgccacccccagcccaattattcagcagctcgagaagtcagatgctgaatacacaaattctccacttgtccctacattctgcactccaggactaaaaataccgtctacaaaaaacagcattgctcttgtcagtacaaattatcccctgtcaaagactaactcctcttcaaatgatctcgaagtggaagatcgaacgagcctggtcttaaattctgatacatgcttcgaaaatcttaccgacccttcctcacccacaatctcttcatatgagaatttgctgcgtaccccgacacctcctgaagttaccaagatccctgaagacatattacagttacttagcaaatacaattcaaatctcgcgactccaatcgccataaaggctgtgccaccttccaaacgattcctcaaacacgggcagaatattagagatgtcagcaacaaagaaaactag

SEQ ID NO: 27941 - DNA, 2583 bp, synthetic construct
  source 1..2583: mol_type = other DNA; note = Synthetic coding sequence
atgacagagggcaccaagaagacctccaaaaaatttaagttctttaaattcaagggctttggttccctctctaacctcccgagatctttcacactccggaggtcttccgctagcatctctaggcaaagtcaccttgagcctgatacttttgaggcaacgcaggacgatatggttactgttcctaagtcccctccagcctacgccagatcctcagatatgtattcgcatatgggcacgatgcctcgacctagtatcaagaaggcccagaatagtcaagccgcaaggcaggcccaggaagccggaccgaagccaaacttagtgccaggaggggtccccgatcctcctggcctcgaggctgccaaagaggtcatggtaaaggccactgggcctttggaggatactccggcaatggagcccaacccatcagcggtggaggtggaccctatacggaagcctgaggtgccgacgggagacgttgaggaggaacgcccaccgagagatgtgcatagcgaaagggcagcaggagaaccagaagctggcagtgattacgtgaaattttccaaagagaagtacattctggacagctcacctgagaagcttcacaaagagctagaagaagaactgaagctatctagtacagacctgagatcccacgcctggtaccacggcagaatccccagggaggtgagcgaaacactcgtgcagaggaacggcgattttctgatccgtgatagtctcacgtcccttggagactatgtactgacgtgcagatggagaaaccaggctctgcacttcaaaatcaacaaggtggttgtaaaggccggagaatcttatacgcacatccagtacctctttgaacaagagtccttcgatcacgtgccggcactcgtaagatatcacgtgggatccagaaaagccgtctccgagcaatcaggggctatcatttactgccctgtcaacaggacctttccgcttcgatatctggaggccagttatggcttgggacaaggttcaagcaaaccagcctccccggtgagcccgtccggcccaaagggttcccatatgaagcggagatctgtgactatgacagacggcctcacagcagacaaggtgactagaagtgatggatgtccaacctcaaccagcctccctagacccagggactctatcaggagctgcgcccttagcatggaccagatccctgatctgcacagccccatgtccccaatctcagagagcccctcatcgcctgcatatagcacggtgacaagggtgcacgccgctcccgcagctcccagcgcaacggcactacccgcttccccggtggcacggagatcatcagaaccccagctgtgtcccggtagcgcccctaagacacatggcgaatccgacaaaggtccccataccagcccttcccatacccttggaaaggccagcccatctccttctctgtcttcctattctgaccccgattctgggcactactgtcagctgcagccacctgtcaggggatccagagagtgggccgctacggaaacatctagtcaacaagccaggagctacggggagaggttgaaagagttatctgagaacggggctcccgagggcgattggggaaagaccttcacggtgccgatagttgaggtcacgagcagcttcaatccagcgacctttcagagtctgttaatccccagagataacagacctctcgaggtgggcctgttgcgtaaggttaaggagctgctggcagaggtggatgcccgaacactggctagacacgttactaaggtcgactgcctggtggccagaatcctgggtgttacaaaagaaatgcaaactttgatgggagtgcgttggggcatggagctcctcacattaccacacggccgtcaattacggctggaccttctagagagattccacaccatgagtattatgttagccgtcgacattctgggttgtacaggatcggcagaagagcgcgctgccttgctgcataaaaccatacagctggctgcggaactgagaggaacgatgggcaacatgttttccttcgccgcagtgatgggcgctctcgatatggcgcagataagccggttggagcagacgtgggtaaccttgaggcagcgccataccgaaggagcaatcctatacgagaagaaactgaagcccttcctcaagagcctgaacgaggggaaagaggggccacccttaagcaacaccactttcccacacgtgttgccgttgatcaccttgctcgagtgcgactctgcccctcctgagggtccagaaccttggggtagcacagaacacggggtggaagtagtgctggcacacttggaggcagcacgtaccgtggcccaccatggcggtctgtaccacacaaacgccgaggttaaactgcagggattccaggccagacctgagctgttagaagtgtttagtacagaattccagatgcgcctcctttggggttcccagggagcctccagttcacaggcaaggaggtatgaaaaattcgacaaggtgctgacggccctgtcccacaagctggagcctgccgtacgctcctccgagctttag

SEQ ID NO: 27942 - DNA, 573 bp, synthetic construct
  source 1..573: mol_type = other DNA; note = Synthetic coding sequence
atgaccgtcccatggaggccgggaaaaaggagaattacttacaaggaggaggaagatctgactctccagcccagacctgcctctagcgcccctgaaagcctggtggggttacaggaaggcaaatcaacggaacagggaaatcacgaccaactgaaggagctatattctgcgggaaatctgactgtgcttgcaaccgaccctctgttgcatcaagatccggtgcagctcgattttcattttcggcttacaagccaaacgtccgcccattggcacggactcctgtgtgaccggagactgtttttggacatcccttaccaggcactcgatcaaggcaatcgggagagtctgacagccacactagaatacgttgaagaaaaaaccaacgtggactcggtgttcgtgaatttccagaatgaccgtaacgaccgcggtgcgttgctgcgcgctttcagttacatgggcttcgaagttgtgcgtcccgaccatcctgcccttcctcctctcgataatgtgatctttatggtttaccccctggagcgcgacgtagggcacctccccagtgagcccccatag

SEQ ID NO: 27943 - DNA, 1527 bp, synthetic construct
  source 1..1527: mol_type = other DNA; note = Synthetic coding sequence
atggcaacagattggctcggatctatcgtgtccattaattgtggcgactcactgggcgtgtatcaggggagagtgtctgcagtggatcaggtgtcccaaaccatctcgctcacaagaccttttcacaatggtgttaaatgcttagtgcccgaggtgacattccgggctggtgatattacggagctgaaaattctggaaattccgggacctggagacaaccagcacttcggcgacctgcatcagaccgaactgggccctagcggtgccggatgccaagtggggattaatcaaaatggaactgggaagttcgtgaagaaacctgcaagcagcagctccgccccacaaaatataccgaagcggaccgacgtgaaaagccaggatgtcgctgttagcccccagcagcaacagtgctccaagagctatgttgataggcacatggaatctctgtctcagagcaaatcttttcggaggcgccacaattcttggtcgtctagctcgagacaccccaatcaggccaccccaaagaagagtggtctcaaaaatggccagatgaagaacaaagatgacgaatgtttcggggatgacatcgaggagattcctgatacagatttcgactttgagggcaacctagccctttttgacaaagctgccgtttttgaagagatcgacacgtatgaacgccgaagtggcacaagatccaggggaattccaaatgaaaggccgacgcgatatagacatgatgagaacattctggaatccgagccaattgtgtatcgcaggatcatcgttccccacaacgtctccaaagaattctgcactgacagcggcctcgtggtgcctagtataagttacgaacttcataaaaaactgctgtccgtagctgaaaaacacggactcaccctcgaaaggcgtctggagatgacaggagtctgcgcctcgcagatggcacttaccctgctgggcggtccaaataggctgaaccctaagaatgtgcatcagaggcctaccgtagcgctgctgtgcggcccacacgtgaaaggagcacaaggaatctcttgcggccgtcacctggccaatcacgacgtgcaggtcatcctgttcctccccaacttcgttaagatgctagagagcatcactaacgagctgagtctttttagcaaaacacagggccagcaagtgtcatccttgaaagacctgcccacaagccccgtggaccttgttataaactgcctggactgtcctgagaacgtcttcttacgcgatcagccttggtataaagcagccgtggcatgggcgaaccaaaatagagccccagtgctgagcattgatccccctgtccacgaggtggaacaagggatagacgcaaagtggtccctagccctcggcctgccattacccctgggtgaacacgcaggacgtatctacctgtgcgacattgggatcccacaacaggtgttccaggaggtagggatcaattaccactcgccgtttggatgtaagttcgtgatcccattgcattccgcatag

SEQ ID NO: 27944 - DNA, 1158 bp, synthetic construct
  source 1..1158: mol_type = other DNA; note = Synthetic coding sequence
atgggccgttggtgccagacggtcgctagaggtcagcggccacggacaagcgccccatcccgtgccggagctctgctattgctcctcctcctgctcaggtcagccggttgctggggagccggagaggcccctggcgcactctcgaccgccgaccccgcagaccagagtgtccagtgcgtacccaaagctacatgcccgtcttcgaggccacggctcctgtggcagaccccaactacccagactctgcctagcactactatggaaacccagtttccagttagcgagggcaaggtggacccctaccgatcatgtggattctcatatgaacaggacccaacactccgggacccagaagcggtcgctagaagatggccttggatggtttctgttcgagctaacggaacacacatttgcgcgggtactatcattgcttcccagtgggttctcaccgtcgcccactgtctgatctggagagacgtgatttactctgtcagggtcggctctccttggatcgatcagatgacacagactgcatctgacgtccccgtgctccaggtgatcatgcatagtcgatacagagcccagcgtttctggtcctgggttggccaggccaacgacatcgggctactgaagttaaaacaggaattgaaatattctaactacgttagaccaatctgtctacctggaacagactacgtcctgaaggaccattctagatgcactgtcaccgggtggggcttaagcaaggctgatgggatgtggccgcaatttagaacgatccaagaaaaggaagtgattatcctgaataacaaagaatgcgacaatttttatcataacttcaccaagattcccacactggtccagatcataaagagtcaaatgatgtgcgcggaagacactcacagagagaagttctgttacgaattgacaggggagcctctcgtctgctcaatggaaggcacctggtacctagtgggcctggtgagctggggagccggatgccagaaaagtgaagctcctcccatatatcttcaggtgagttcttaccaacattggatttgggattgcctgaacggacaggcactggcacttccagctcctagccgcaccctgctgctggccctgccgttgcccttgtcgctcctcgccgctctgtag

SEQ ID NO: 27945 - DNA, 750 bp, synthetic construct
  source 1..750: mol_type = other DNA; note = Synthetic coding sequence
atggtggaccgtctggccaactctgaggcgaatacccgaaggatctccatagttgaaaattgttttggagctgctgggcagcctctgaccattcccggaagggttctgatcggggagggggtcttgactaaactttgtaggaagaaacctaaagctcgacaattctttctcttcaacgacatcctagtatacggtaatatcgtcattcagaaaaagaagtataacaagcagcacattattcccctggagaatgttaccatagattcgatcaaggatgaaggagatctgcgcaatggttggctgattaagactcccactaaaagttttgccgtgtacgcggctacggccaccgaaaagagtgaatggatgaaccacatcaacaaatgcgtgactgacctgctgtcaaagtcagggaaaacaccctctaacgagcacgcagctgtgtgggtccccgactcggaagctaccgtgtgtatgcgttgccagaaggccaaatttactccggtgaaccgcaggcaccattgtcggaaatgcggtttcgtagtgtgtggcccttgttctgaaaagcgtttcctgctgccttcccagtcaagtaaacctgtcagaatttgcgacttctgctacgacctgctctccgcgggagacatggcgacctgccagccggcaaggagcgacagttactctcagtcactgaaatccccactaaacgacatgtccgatgatgacgacgatgacgactctagcgattag

SEQ ID NO: 27946 - DNA, 2745 bp, synthetic construct
  source 1..2745: mol_type = other DNA; note = Synthetic coding sequence
atgggcgatagtcgtgacctgtgcccccatctcgactccatcggtgaagtgactaaagaggacctgttacttaagagtaaagggacctgccagtcttgtggcgtgactggacccaacttgtgggcctgcctgcaagtggcatgcccttatgtcggctgcggagaaagttttgcagaccactctaccattcacgcgcaggcgaagaagcataatttgactgtgaatctgacaaccttcagactctggtgttatgcctgtgaaaaggaggtgttcttggaacagcgcttagctgcccctcttcttggtagcagtagcaaatttagcgagcaagactcccctcccccttcacaccccctgaaagccgtacctatcgccgtggccgacgagggggaaagtgagtctgaggacgatgacttgaagcctcgagggctgactggcatgaaaaacttaggcaacagttgctatatgaacgccgcattgcaagctttgtcgaattgtccacccttaacgcagttcttcttggagtgcggaggactcgtgcgcaccgataagaaacccgcactgtgcaagagctatcaaaagctagtcagcgaggtttggcataagaagcggcctagctacgtcgtgcctacttccctttctcacggaataaagctggtcaatccgatgttccgaggatacgctcagcaggatacacaagagtttctgcgatgcctgatggaccagttgcacgaagaattgaaggagccggtggtagctaccgttgctttaactgaagcccgtgacagcgattcgtccgacaccgacgagaagagggagggagacaggagcccctccgaggacgagtttctgtcttgcgatagctcctcagacagaggagagggcgatggacagggccgaggtggtggctccagccaggctgagactgagctgttgatccccgacgaggctggtcgggctatttctgagaaagagcggatgaaagaccggaaattctcctggggacagcagcgcaccaactctgagcaggtcgacgaggacgccgacgtggataccgctatggcagccctggacgatcaaccggctgaggcacagccacccagtccccgatcatcatctccttgtcgaactcctgagccagataacgacgcccatctccggagttcctcccgcccttgcagcccagtgcaccatcatgaggggcacgctaaactctccagcagtccaccgcgagcctcccctgtcagaatggctccaagttatgtgcttaaaaaggcccaggtgctatctgctggctccagaagaagaaaagagcagcggtatcgatctgtaatctctgacatctttgacggatctatcctgtccctggtgcagtgccttacatgtgatagggttagtactaccgtcgagacctttcaggatttgagcctccccattccaggaaaagaagaccttgccaaactgcattccgccatataccagaacgtgcccgctaagcctggcgcttgtggagattcgtacgctgcacagggttggttagccttcatagttgagtatatccgcagatttgttgtttcctgcaccccctcttggttctgggggcctgtagttaccctggaagactgtctcgctgcatttttcgcggcagacgagctcaagggagataacatgtacagttgtgagcgttgcaaaaagcttcggaatggagtgaagtactgtaaagtgcttagattacctgaaatcctgtgcatccaccttaagcgctttcgacacgaagtgatgtactcgtttaagattaacagtcacgtgagttttccactcgagggcctggatttgcggccatttcttgccaaggagtgtacctcacagattactacttacgatcttctgtccgtcatctgtcaccatggcactgccggaagcggccactatatcgcctattgccagaacgtaatcaacgggcagtggtacgagttcgatgatcaatatgtgaccgaggtgcacgagactgtggttcaaaacgcagagggctacgtcttgttttatcggaagtcttccgaggaggctatgagggagaggcagcaggtcgtgtctttggcggcaatgcgggaaccgtcgctgttacgtttctatgtttcgcgtgagtggctgaataaattcaacactttcgccgaaccaggacctattaccaatcaaacgtttctttgtagtcacggtggcattcccccacataagtaccactacatcgacgacctggttgtgattctacctcaaaacgtatgggagcacctctacaatcgctttggcggtgggcctgccgtgaaccatctctacgtgtgttccatctgtcaagtggaaattgaggccctcgctaaacggagacgaattgagattgataccttcataaaactcaacaaggcattccaggctgaagaatctccgggagtcatctactgtataagtatgcaatggttccgtgaatgggaggcgttcgttaaagggaaggataatgaaccccctgggccaatcgacaactcccgcattgcccaggtgaaaggtagtggccacgtccaactgaaacagggagccgactatggtcagatttccgaggagacatggacctaccttaacagcttatacggcggagggcctgaaatcgccatacggcagtcagtggcacagcctctgggaccagagaatctacacggtgagcaaaagattgaggctgaaaccagagcagtgtag

SEQ ID NO: 27947 - DNA, 1341 bp, synthetic construct
  source 1..1341: mol_type = other DNA; note = Synthetic coding sequence
atgagagcggctaggagaggactccattgcgcgggagccgagaggcccaggaggcggggaaggctgtgggactcgagcggagttcctcagcgccagaagagacccggtccatggcgcactcagactcaagaacagatgtccagagacgtatgcatacatacatggccctgtacttattatcttgagcccaagagacgttgggtaacgggtcagctgtccctgacttccctatcgttaaggttcatgacggactctacaggcgagattttagtgtctttcccgctgtcttccattgttgagattaagaaggaggcttctcacttcatcttctcctccatcaccatcttagaaaagggtcatgccaaacattggttttcctcactacggccaagccgcaatgttgtcttcagcatcatcgagcacttctggcgcgaactgcttctctctcagccaggggcagttgccgatgcgtctgtgccccgtaccagaggcgaagaactcacaggacttatggcaggaagccagaaacgacttgaggataccgccagagtcctgcaccatcagggacagcaattggattcggtcatgcggggactggataagatggaatccgacctggaagttgccgaccgcctgctcacagagctcgagagccccgcttggtggccttttagctctaaactctggaagacaccccctgaaaccaagccgcgagaagatgtgagcatgacttcatgcgaaccttttggcaaggaggggatccttataaagattccagccgttatctcccatcgaactgagagccacgttaaacccggtcgcctgactgtgcttgtgagcggtttggagatccacgattctagcagcttactcatgcaccgatttgagcgtgaggatgttgacgatatcaaggtccactccccctacgagattagcatcagacagagattcattggcaagccagatatggcctacagactgatttcagcaaagatgccagaggtgatacctatactagaagtccagttcagtaagaaaatggagttgttagaggatgcactggtgctacggtctgccaggacatcgtcaccggctgagaaatcatgcagtgtgtggcacgcagcgtctgggctaatggggaggacactacatcgggagcctcccgctggtgatcaggaaggtaccgcgctccatctgcagaccagtctcccagccctgtccgaggctgacacgcaagaactgacccagggtttcagaccaatgagtcttagcactcagacggttctggtaatgctgtgtagcgaatcggccggagccttatggcgacagagactgagctag

SEQ ID NO: 27948 - DNA, 1896 bp, synthetic construct
  source 1..1896: mol_type = other DNA; note = Synthetic coding sequence
atggctattgtccagaccctgccagtgcctctcgagcctgcccctgaggcggctactgcccctcaggcgcctgtaatggggagtgttagctccctgatctctggcaggccctgtcccggtgggccagcaccccctaggcatcacggccctcctggacctacgtttttcaggcagcaggacggactactgcgcggtggctacgaagcccaggaacctctatgccctgccgtccctcctaggaaggctgttcccgttactagttttacctatattaacgaggacttccgcacagagagcccaccgtctccatcctctgatgtcgaggatgccagagagcagcgggctcacaacgcccatctccggggaccaccaccgaagttaatccctgtgagtggcaagcttgagaaaaacatggaaaaaatactgattcgcccaacagccttcaaacctgtgctgccaaagcctcgtggagcgccatctttgcccagttttatgggaccgagggcaaccggcctgtcaggcagccagggcagtctgacccagctattcggaggccctgcatcctctagcagcagtagcagctcaagcagtgcggcagacaaacctctggccttctctggttgggccagtggttgcccaagcggaacacttagtgatagcgggagaaattcactgagttcacttccaacatatagcaccgggggagccgagcctaccacgagtagtcccggagggcatctgccctcacatggctccggacggggagctctccctggacctgccaggggcgttcccaccggcccatcccactcggactccggaagatcttcctcctctaagtcgactggaagcctagggggacgcgtggcgggaggcctgctggggtctggcacaagggcaagcccggattcaagctcttgcggggagaggagccccccacctccgccacccccaccatccgacgaggctctgttacattgcgtgcttgaaggaaaactgcgcgaccgtgaagccgagctgcagcagctacgcgattctctcgatgaaaacgaggctacgatgtgccaagcgtacgaagagcgacagagacattggcagcgtgagcgggaggccctccgcgaagactgcgccgcacaggcacagagagcccagcgagcccaacagttgctgcagcttcaagtgtttcagctgcaacaggaaaagagacagctgcaggatgattttgcgcagctgctgcaagagcgcgagcagcttgagcgaaggtgcgcaacactggagagagaacaaagagagctgggacccagactcgaggagacaaagtgggaagtctgccaaaagtcaggagaaatttccctgctgaagcagcaactaaaagagagccaagctgaattggtgcagaagggctcagaattagtggcccttagagtcgcacttcgggaggccagggcaacattgagagttagcgagggccgtgcccgtggactgcaagaggccgctcgggctagggagttagagctggaggcctgcagtcaggagctgcaaaggcataggcaggaggccgagcagttacgagaaaaggccggtcaattggacgcagaggccgctggactgagagagcccccagttccacccgcaactgccgatcccttccttttggccgagtctgacgaggctagcgcaaccgccaacccagtacacagacggttccaacctacaccggcaagaggggctgggaaaaaaaaggggctgccgccactccatatcccacccgaccctaaggcgagagagtcccagatggctcctgcggctccagacgtccctgcccacatcggcggacaggggagggcctgggcgagatttccgggtcttagttctgcagcgtctctcctggagtag

SEQ ID NO: 27949 - DNA, 1473 bp, synthetic construct
  source 1..1473: mol_type = other DNA; note = Synthetic coding sequence
atgaatggggctctggaccatagcgaccaaccagatcccgacgccatcaagatgttcgtaggtcagattcccaggagttggagtgaaaaggaattgaaagaactgttcgaaccctatggtgcagtgtatcagatcaacgtccttcgagatcgcagccaaaacccccctcagtctaagggttgctgctttgtcaccttttacactcgaaaggccgctctcgaggctcagaacgccctgcataacattaagacactgcccggaatgcatcatcccatacagatgaagcccgctgactccgagaagagtaatgccgttgaggacagaaaattgtttataggcatggtgagcaaaaaatgtaatgaaaacgacatccgcgtgatgtttagcccctttggacagatagaggaatgccggatccttaggggacccgatggactctcgcgtgggtgtgcctttgtgaccttcagcaccagggcaatggcccagaacgcaattaaggctatgcatcagtcccaaaccatggaagggtgctcttcacccatcgtggtgaagttcgccgatactcaaaaagacaaagaacagcgcagactgcagcaacagctggcacagcagatgcagcaactgaatacggccacctggggtaatttgaccggcctaggcggacttacgcctcaatatctggcacttctccaacaggccacgagctcgtcaaatcttggagcattctctgggatccagcagatggcaggaatgaacgccttgcagttacagaatctggccacgttggccgctgctgctgcagcggctcagactagcgccaccagtaccaacgctaacccgctgtccaccacatcaagcgccctcggcgctttaacatcacctgttgccgcatccaccccaaattctacagctggcgctgccatgaacagtctgacttctctcgggacgctgcagggactggccggagccactgtcggcctgaacaacatcaacgccctggccgtggcccaaatgctatctggaatggccgctctgaatggaggtctgggcgctaccgggctcacgaatggcacggcaggcacaatggacgctctgacgcaggcgtacagtggaatccagcagtacgcggctgccgcacttccaaccctgtattcccaaagtctattgcaacagcagagtgcagccggatcacaaaaggagggtcccgagggagccaatttgtttatctatcacctccctcaggaatttggagatcaggatatcctgcagatgtttatgccgttcgggaatgtaatcagtgccaaagtctttatcgataagcagactaatttgagcaaatgttttggtttcgtgtcttatgataatccagtgtcagcgcaggcggcaattcaggcaatgaacggattccaaatcggaatgaagcggcttaaagttcagcttaagaggagcaagaatgactcaaaaccatactag

SEQ ID NO: 27950 - DNA, 627 bp, synthetic construct
  source 1..627: mol_type = other DNA; note = Synthetic coding sequence
atggcggcaagcgtggaacagagggaaggtactatccaggttcaggggcaggccctcttctttcgtgaggccttacctggctcaggccaagcacgcttctccgtattgctgctgcacgggattagattcagttcagaaacttggcagaatcttggaacccttcataggctcgctcaggctggatatagggccgtggctattgacctccctgggctcaagggagaaccacctgcccaggaaccccttctgtcacagtcgcgagcatcttttctggcagccgtggttgacgcattggagcttggccctcccgtggtaatttcaccatccctaagtgggatgtactctctgccctttctgacagcgcctggcagtcagctcccgggattcgtccctgtcgctccaatctgtaccgataagattaacgccgcaaactatgccagcgttaagactcctgctctcatagtgtacggtgaccaggaccccatgggtcaaactagtttcgaacaccttaagcagctcccaaatcatcgggtgcttatcatgaagggggctgggcatccgtgttacctggataagcctgaggagtggcatacggggctactggatttcctgcagggtctccaatag

SEQ ID NO: 27951 - DNA, 546 bp, synthetic construct
  source 1..546: mol_type = other DNA; note = Synthetic coding sequence
atggagagccgaagcgtagcacaggctggcgtgcagtggtgcgatctggggtctctgcagccgcctccccctggctttaagcagtttagttacttctccttgcagagcagctgggactacagatacgtccccccatgccccgcaaattttgttttcttggtcgagatgggattccttcatgtggaccaggccggactgaaactcttgacaagtggcatcgatttcgccactcggaagattgcaaaactactgaaaccccagaaggtcattgaacagaatggggacagttttacgatccacactaattcctcgttacgtaattacttcgtgaaattcaaagtgggagaggaatttgatgaagataacagggggcttgacaacaggaaatgtaaaagcttggtgatttgggataacgataggctcacatgcatccaaaaaggggagaagaaaaatcgcggatggacccactggatcgaaggggataagctgcatctggagatgttctgtgagggacaggtctgtaaacagacctttcagcgggcttag

SEQ ID NO: 27952 - DNA, 1647 bp, synthetic construct
  source 1..1647: mol_type = other DNA; note = Synthetic coding sequence
atgagtgccagtctcaattacaagagcttctctaaggaacagcagaccatggacaacctggaaaagcagcttatttgcccaatttgcctggagatgtttaccaagcccgtcgtcatcctgccgtgtcagcacaacctgtgtagaaaatgtgcttccgatatctttcaagcaagcaacccatacctcccaacacggggaggtacaactatggcgtcagggggtaggttccgctgcccctcatgcaggcatgaagtagttcttgaccgacacggggtatacgggttgcagcggaatctgttagtggaaaacatcatcgatatctataagcaggaaagcactcgccctgagaagaagtccgaccagcctatgtgcgaggaacacgaggaggagaggatcaacatctattgcctgaattgtgaagtgccaacatgttcactgtgtaaagtgtttggcgcacataaagattgccaggtggcccctctgactcacgttttccaacggcagaagagtgaattgtctgatgggatcgctatactggtcggtagtaacgatagggttcaaggggtgatttcgcaacttgaagacacatgcaaaactatcgaagaatgctgccggaaacagaagcaggagctgtgcgaaaaatttgattacctctatggaatcctggaagagagaaagaacgagatgacacaggttatcacacggactcaggaagaaaagctggaacacgtaagagctctcataaagaagtacagcgaccacctggaaaacgtgagcaagttggtcgagtcgggtatacaattcatggatgagcctgaaatggcagtctttctgcagaatgctaaaacattgctcaagaagatttccgaagccagcaaagccttccaaatggagaaaatagagcacggctacgagaacatgaatcattttacggttaatctgaatcgcgaagagaagatcatcagagaaatcgacttttatagagaagacgaagacgaagaggaggaggaaggcggtgaaggcgaaaaagaaggcgagggtgaggtcggaggcgaggccgtcgaggtcgaagaagtggagaatgtgcagactgagttcccaggagaagatgagaaccccgagaaagcaagtgagctcagccaggttgagttacaggccgctccgggagcattacccgttagcagcccagaaccacccccagcactgcctccagctgccgatgcacctgtcacccagggcgaggttgttcctactggttcagaacagacaacagagtctgagacaccagtgcctgctgctgccgagactgctgaccccctgttctacccttcctggtataagggccaaacaagaaaggcgactaccaatcccccttgtacaccaggaagcgagggacttggccagataggtcccccaggctccgaagactctaatgtcaggaaggccgaagtagcggctgccgctgcatccgagcgtgcggctgtctctgggaaggagacaagtgcgccagcagcaacaagtcagattgggtttgaggcccctccactgcaggggcaggccgcagcaccggcttcaggaagtggagcagattcagaaccagcaagacatatcttttcctttagctggctgaactcactcaatgaatag

SEQ ID NO: 27953 - DNA, 1374 bp, synthetic construct
  source 1..1374: mol_type = other DNA; note = Synthetic coding sequence
atgtttccaaagttctccttacggtccatgtttcacggggcaggaggcggaaacgacatccagtggtgcttctcccaggttaaaggcgctgtggatgatgatgtggcagaggcagacatcatctcaaccgtggaattcaatcattcaggtgagctgctcgccaccggagataaaggcggacgcgtagtcattttccaacaggagcaggagaacaaaatccagagccattctcgcggagaatacaacgtttactctaccttccagtcccacgaaccggagtttgattaccttaagagcctagagattgaggagaagattaacaaaattcggtggcttccacagaaaaatgccgctcagttcctgttgagcacaaatgacaaaaccatcaaactatggaagatctccgagcgggacaaaaggccagaagggtataacctaaaagaggaggacgggaggtaccgcgatcccacgactgtcaccacattgcgggtcccagtcttcagacctatggatctgatggtggaggcctccccacggaggatattcgccaatgcacacacataccacatcaatagtatttcaatcaatagcgactatgaaacatacctttcagccgacgatctcagaataaatctgtggcatctggagatcactgaccgttctttcaatatagtagacatcaaaccagccaacatggaagaacttactgaagttataacggccgctgagttccaccctaactcctgcaatacgtttgtgtactcaagttccaaaggaaccatccgtctctgtgatatgcgcgcttccgctctgtgtgaccgccacagcaagctttttgaagagccagaagatcccagtaaccgcagtttcttcagcgaaatcatcagtagtattagtgacgtgaaatttagccacagcggacggtacatgatgactagggactatctttcagtaaaaatttgggacctcaacatggagaatcgccctgtcgagacctaccaggttcatgagtatctgcgcagcaagctctgctccctgtatgaaaacgactgcattttcgataaatttgagtgctgttggaacgggtcagactccgtcgtgatgaccggatcatataacaacttttttcgcatgttcgacaggaacacaaagagggacattacccttgaggcctctcgggagaataataagcctagaactgttctaaagccacgaaaagtgtgcgccagtggaaagcgaaaaaaggatgagattagcgttgactctttggatttcaacaaaaaaatcctgcacactgcatggcaccctaaggaaaatatcattgccgtggccacaacaaacaatctatatatcttccaggacaaggtcaactag

SEQ ID NO: 27954 - DNA, 738 bp, synthetic construct
  source 1..738: mol_type = other DNA; note = Synthetic coding sequence
atggccggactggagctgctcagcgaccagggctatagggtggatgggcgaagggccggtgaactgcgcaagatccaagctagaatgggtgtctttgcgcaggcagatggaagtgcttacatcgagcaagggaatacgaaggccctggctgttgtgtacggaccacacgagattcgtggcagtcgcgctagggccctcccggatagagctctggtgaactgtcagtactcctccgcaaccttctctaccggggaacgcaagcgtcgccctcatggggatcgtaagagttgtgagatgggactgcagctgcggcagacatttgaggccgctatcctcacccaactgcatcccaggagccagatcgatatctacgtgcaggtcttgcaggctgacggcggaacgtacgcagcttgcgtgaatgccgcaaccctggctgtactggatgcaggcatccccatgcgcgatttcgtgtgcgcctgttctgcaggcttcgtggacggcaccgctctggccgacttgagtcatgtggaagaggccgctggaggcccacaacttgccctggccctgctgcccgcatccgggcagatagctctgctggagatggatgccagattacacgaagaccatctggaaagagtgcttgaggcagccgcacaggctgctcgtgacgttcacactcttttggaccgcgtggtaaggcaacacgtccgcgaggcttctatcctcctaggtgactag

SEQ ID NO: 27955 - DNA, 2631 bp, synthetic construct
  source 1..2631: mol_type = other DNA; note = Synthetic coding sequence
atgatggcagacggcgcagctgcgggagctgggggatccccgagtctgcgcgaattacgtgcaaggatggtggctgcagccaacgagattgccaaagagcgcaggaaacaggacgtcgtgaatcgcgtcgccactcattcctctaatatacgatcaacattcaagcctgtcatcgatggctcaatgttaaagaacgacataaagcagcgcctggctagagagcgacgcgaagagaaacgcaggcagcaagatgctaacaaagagactcagctgctcgaaaaggaacgcaaaaccaagctgcaatacgaaaagcagatggaggaacgccagcgaaagttaaaggagcgaaaggagaaggaagaacagcgacgaatcgcagccgaagagaagcgccaccagaaagacgaggcccagaaggagaagttcacagcaatactgtaccgaacactagaacgaaggagacttgcagatgactaccaacaaaagagatggagttgggggggttctgccatggctaactccgagtccaaaacggcgaacaagcgctcagcgtccaccgagaagctggagcagggcacttccgctctgataaggcaaatgccactctcatcagcaggccttcagaatagcgtggcgaagagaaaaaccgataaagagaggtctagttccctcaatcgacgcgactctaatctccacagcagtacagacaaagaacaggcggaacggaaacctcgagtgactggcgttactaactacgtaatgcagtacgtaactgtgcctctgagaaagtgcaccagcgacgaattgcgtgccgtgatgtttccgatgtcgaccatgaaaatacctcctcagactaaggttgaagagtcacctttagaaaaggttgagaccccacctaaggcttcagtcgatgccccaccgcaagtaaatgtggaagtcttttgcaacactagtatggaggcctcccccaaggccggtgtaggcatggctcccgaggtcagcaccgatagtttccctgtcgtcagtgtggacgtgtctccagtggtctccacttacgactccgaaatgtctatggacgcaagccctgagttatctatcgaggcattaccaaaagtcgacttagagaccgtgcccaaggtctcaatcgttgcaagtccagaagccagcttggaggcaccacctgaagtgtccctggaagctttacccgaggtaagcgtcgaggccgctcccgagggatccttggaagcccctcctaagggaagcgcagaggtggcccctaaggagagcgttaaaggctcccctaaagaaagtatggaagcttcccccgaagcgatggtgaaggcttctcccaaaacatccctggaggcaagtatggaagcctctcccaaggcgaaagcaagagatgcaccaaaaaagtctgagatggacaagcaggcactgatcccaatagccaagaagcgactttcctcatatactgagtgttacaagtggtcttcgagcccagaaaacgcctgcggcctgccaagccccatatctacaaaccgtcagatccaaaagaactgtccgccatcccctctgcctcttatctctaaacagtctcctcagacatcttttccgtataagataatgcccatacagcacaccttgtccgtgcagtctgcgtccagtacagtgaaaaagaaaaaggagactgtctccaaaacaaccaataggtgcgaggctctgtctcagcggcacatgatttatgaagagagcggcaacaagagtaccgccggtattatgaacgctgaagccgctactaaaattttgaccgaattgcgtcggctcgctagagagcaaagagagaaggaagaagaagagcggcagcgcgaggaaatgcagcagcgcgttattaagaagtctaaagacatggccaaggaggccgtgggcggacaggcggaagaccaccttaagctaaaggacggtcaacagcagaatgagacaaaaaagaagaagggatggctcgaccaggaggaccaagaagcccctctgcagaaaggagacgccaaaatcaaagcccaggaggaagctgataaaagaaaaaaggagcacgagcggattatgctgcagaacttgcaggaacgactggaaagaaaaaaaaggatcgaagagatcatgaaaagaacccgtaaaaccgacgtcaatgcctcaaaagtcactgagacatctagtcatgacatctacgaggaggcagaagccgataacgaagagagtgacaaagattcactcaacgagatgttcccttcagccattttaaatggcaccggcagtcctaccaaattcaaaatgcctttcaacaatgccaaaaaaatgacccacaagctcgtgttcctagaagatggaacatctcaggtgcgaaaagaacccaagacttatttcaatggtgatctcaagaattttagacagaagtcaatgaaggatacctctatacaggaagtggtctcgaggccttcctccaaaagaatgacttctcacacgaccaagacaaggaaagctgatgaaactaacactacctcacggagctccgcccagacaaagtctgaggggtttcacgacattctgccgaaatcttccgacacatttcggcagtag

SEQ ID NO: 27956 - DNA, 6290 bp, synthetic construct
  source 1..6290: mol_type = other DNA; note = Synthetic coding sequence
atgtgctccacccccggaatgccagccccaggggctagcctagctctgcgcgtgagcttcgtggatgtgcatcctgacgtgattccagtccagttatggggattggtgggtgaacgcaggggggagtacctccgcctttcacgggaaatacaggaagccgcagctaccaggggtcagtgggccctgggcagtgcgtccgcttcacctggagagctctgcctggtccaggtagggctgctctggcaccgctgtcgcgtggtcagcagacaggctcaggagagtcgggtttttctgcttgatgaaggccgaactattactgccggtgccggatccctggcgccaggtcggagagagttttttaatctgcctagcgaagtactcggctgtgtgcttgctgggctggtgcccgctggatgtggggctggcagcggagaacctccccaacactggccggctgacgccgtcgatttcctcagcaacctacaggggaaagaagtgcacggatgtgtgttagacgttctgcttctgcacaggctggtcctgctcgaagtacctgacgtctttcaacagatgagagagctgggtctcgcacgtagggtgcccgattcgctgttccgctccttactggaacgatatctgacggcggctaccgcatcagttgggtccggtgtgcctgtgctgtccagagttcctctgaaacagaagcagccagggctagactatttctatccacagctacagttaggggtcacagaggcagtggtgatcactcaggtctgccacccccatcgcattcactgccagcttcgtagcgttagtcaggagattcaccgcctgtccgagtcaatggcccaggtgtatagaggaagcactgggaccggtgacgagaactcaacttccgccacatgggaggagcgggaggaatctccagacaagccaggctccccatgcgccagttgtggactggacgggcactggtaccgcgctctgctgctcgaaacttttagacctcagagatgtgctcaggtccttcacgtcgattatgggcgaaaggagcttgtgagctgcagcagtttaagataccttctgcctgaatatttcaggatgccagtcgtcacatacccatgcgctctctacgggctgtgggacgggggaagggggtggagccgatcccaggtgggcgacctcaagacactgatccttggcaaggctgtgaatgcgaagatcgaattttattgctcatttgagcacgtatactatgtaagcctctacggcgaggatggaattaatttaaaccgggtgtttggagtacagtcatgctgcctcgccgatagagtcctgcagtctcaggctacggaggaggaggaaccagagactagccagtcacagagccccgcagaggaggtagacgaggagatcagcctcccagctctacggagtataaggttaaagatgaacgccttctatgatgcccaggtggagtttgtcaagaatccctccgaattctggatacgtctgcggaagcacaatgtgacattcagcaagctcatgcgtcggatgtgtggtttctatagctcggctagcaaactcgatggtgtggtgttaaaacccgaacctgatgacctttgttgtgtgaaatggaaagagaatggatactatcgggcaatcgttaccaagctagacgacaagagtgtcgatgtttttctggtggaccggggtaattctgaaaacgtggactggtatgatgttagaatgcttctccctcagttcagacaactcccaatccttgctgtgaagtgtacgctggctgacatatggccgctgggtaagacttggagtcaagaagccgtgagctttttcaaaaaaactgtgcttcacaaggagctagtaatccacatcttagataagcaggatcatcagtatgttatcgaaattctcgatgaatcaaggaccggagaggaaaatatttcgaaggtgatcgctcaggccggatacgctaagtaccaggaattcgagaccaaagagaatattctcgtgaatgctcatagccctggccacgtcagcaaccattttacaaccgaaagcaacaagattccattcgccaaaaccggcgagggggagcagaaagctaaacgggaaaataaaactactagcgtctccaaggccttgagtgataccaccgttgtcacaaacgggagcacagagctggtggtgcaagaaaaggttaagagagcttccgtgtacttcccattgatgcagaactgtctggagataaaaccagggtcttcttccaagggggagttggaggtgggatccacggtcgaggtgagagtctcatacgtggagaacccaggatatttttggtgccaactcacacggaatattcaggggttaaaaaccctcatgagtgacattcagtactattgtaagaatacagcggctcctcatcagcggaacactcttgcctgcttagcaaagcgcaccgtcaatcgccagtggtccagagcgctgatctctgggatccagtccgtggagcatgtcaatgtgactttcgtggattatggtgatagagagatggtgtctgtgaaaaacatatacagtatttcagaggaatttctgaaggtgaaagcacaggcattccgatgctccctctacaacctgatccagcctgtgggtcagaaccctttcgtgtgggatgtgaaggccatccaggctttcaacgagtttatcgacaatgcctggcaaaagaatttggagctaaagtgtactatttttgcattggcatcaattaatgaagaattgtttaacatagtggatcttctgacaccctttcagtcagcttgccactttctggtagagaagcggctcgcccgacccgttaagcttcagaagcccttggagagttccgtgcagttgcactcctacttttatagcacacacgacatgaaaattggatcagaggagctggtgtatatcacacatatcgacgacccatggaccttttactgtcagctcgctaggaacgccaacattctggagcagctgtcttgttcaatcacgcagctgagtaaggtcctcctgaatctgaagacctctcctctgaatcctgggacgttgtgtctcgctaagtatactgacggcaactggtacagaggcattgtcatcgagaaagagccaaaaaaggtttttttcgttgattttgggaatatttatgtcgtgacctccgacgacctcctgcccattccttccgacgcatatgatgttttattattgcctatgcaagcggtgcgctgcagcttgtcagatattccagaccatatccctgaggaggttgtcgtctggttccaggaaaccatccttgacaagtctttgaaggccctggttgtagctaaagaccctgacgggaccctgattatagaactgtatggggataacatccagatatctgccagcattaataagaagctcggcctcctgtcatacaaggataggatccggaaaaaggagtccgaggtgctgtgttcgactacagagactctggaagaaaaaaacgagaatatgaaactgccttgcaccgagtatctgtctaagtcagtgggttataagctgcctaataaagagatcttagaagaatcatacaagccacaaataaatagctcttataaagaactcaaactgctccagtcactgaccaagaccaatctggtgactcagtatcaggattccgtgggcaataaaaattctcaggtgtttcctttgacaactgagaaaaaagaagaaatctcggccgagacccctctcaagaccgctagggtcgaggccaccctctcagagcggaaaatcggggactcttgcgacaaggaccttcctctgaagttctgtgagtttccacaaaaaactatcatgcctgggttcaagactacagtctacgtgtctcacataaacgacctgagcgacttctacgtgcaattgatagaggacgaggccgagattagccatctgagtgaaagattaaatagcgttaagacccgccctgagtactacgtgggccctcctctgcaaaggggggatatgatctgtgctgtcttccctgaagataatttgtggtacagggcagtgattaaagagcagcagcctaacgaccttctgagtgttcagttcattgactatggaaacgtgagtgtggtgcacacaaataagataggacgtctcgacctcgttaacgctatactcccaggtctgtgcattcattgctctctgcaggggtttgaggtgcccgacaacaaaaattcaaaaaagatgatgcactacttttcccaaagaacttccgaggctgcaattaggtgtgaattcgtcaaatttcaagatagatgggaggtcatcctggccgatgagcacgggattatcgcggatgatatgatcagtaggtacgcactttcagaaaaaagtcaggttgagctttcaacccaggttattaaatcggcttcttctaaatccgtgaacaaatccgatatcgacacttcagttttcttgaattggtacaaccctgaaaaaaagatgattcgcgcttatgcaaccgtgattgatgggccagaatacttttggtgccagtttgccgatacggagaaactgcagtgtctcgaagtggaagtgcagaccgcgggagaacaggtggcggatcgacgcaattgtattccctgtccctacatcggcgatccgtgtatcgttcgataccgggaggacggccattactatagggccctgatcacaaacatatgtgaagattaccttgtttcagtgcggctagtggatttcggtaacattgaggactgcgtggatcccaaggctctctgggccataccctccgaactattgagcgtccctatgcaggcattcccttgctgcttatccggctttaacatctctgagggactgtgctcccaggagggaaacgattacttctacgaaatcatcaccgaggacgtcctggaaattacaattctagagattcgcagggacgtctgtgacattcctctggcgattgttgacttaaaatccaaaggcaagtccattaacgagaagatggaaaagtactctaaaacaggtatcaagtccgcactgccatacgagaatatcgactcagagatcaagcagaccctgggaagctacaacctggacgtggggctcaaaaaactgtcgaacaaggccgtacagaataagatctacatggagcagcagacggacgaactggccgaaataacagagaaagatgtgaacatcataggtacaaagccgtccaattttagggatcctaagacggataacatttgcgaagggttcgagaatccctgtaaagataagatagacaccgaagaactggagggcgagcttgagtgccacctggtagataaagccgagttcgatgataagtacctgataaccgggttcaatacactgctcccacatgccaatgagacaaaagagatcctggaactaaatagcctggaagttcccttgtctcccgatgacgagtctaaagaatttctggagctggagtcaatcgagctccagaactcactggtggtcgatgaggaaaagggagagctgtctccggtcccgcctaacgttcccctgtcccaggagtgtgttaccaaaggagccatggaacttttcaccctacaattgcccctgtcatgcgaggctgagaagcagcctgaactcgagctccccacagctcaactgccactagacgataagatggacccgctgtccctgggcgtctctcagaaggctcaggagtccatgtgcaccgaggacatgaggaaatcgtcgtgcgtggagagctttgacgatcagcgaaggatgagtctacaccttcatggtgcagactgtgatcctaagacccagaatgaaatgaacatttgcgaagaagagtttgttgaatacaaaaaccgcgacgcaatcagcgctctgatgcccttatttagcgaggaggagtctagcgacgggagcaagcacaacaatggcctccctgaccatatctcagctcagctgcaaaacacatacacgctgaaggcctttacagtagggtctaagtgcgtggtgtggagctcacttcgcaacacctggagtaaatgcgagattctcgagactgccgaagaggggactcgagtgcttaacctatcaaatggaatggaagagatcgtaaaccccgaaaatgtgtggaatgggatacctaagcttgacaagagcccgccagagaagaggggcttagaggtgatggaaatcta

SEQ ID NO: 27957 - DNA, 690 bp, synthetic construct
  source 1..690: mol_type = other DNA; note = Synthetic coding sequence
atgggtaaaagttgtaaagtggttgtgtgtggacaggcaagtgtaggcaagaccagtatcctggaacagttactctatggcaatcacgtggtgggaagcgaaatgatcgaaactcaggaagatatctacgtagggagtattgagaccgatcggggagtccgggaacaggtgagattctacgacaccagaggcctgcgtgacggtgctgagttaccacggcactgcttcagttgcactgacggctatgttctggtgtactcgacggacagtcgggaaagttttcagagggtggaattgctcaaaaaagagatcgacaaaagtaaggacaaaaaggaagggcttacgctccccccaagactcgagtgctctggaatgattactgctcattgtagcttaaacctgccaaggctcagatggagctcttgtctgtctccactgctccgcctgcaggtgacgatcgtcgtgctgggtaacaagtgcgatttacaggagcaaaggcgcgtggatcctgacgtggcacagcactgggccaagagcgagaaagtgaaactgtgggaagtgagcgtcgctgaccggaggtcattgctcgagcctttcgtgtatctggcctctaaaatgacccagccccaatcaaaatctgcattcccactgtcgcgcaaaaataaaggtagtgggtcacttgatgggtag

SEQ ID NO: 27958 - DNA, 2412 bp, synthetic construct
  source 1..2412: mol_type = other DNA; note = Synthetic coding sequence
atggagtccggacctcgagcggagttaggagccggtgcccctcctgctgtcgtcgcgagaaccccacccgagcctcgcccttctcctgaaggggatccctctcccccacctccccctatgagcgcgttagtgcctgatacgccaccggatactcctcctgccatgaagaatgccacatcctcaaagcagctccccttggagcccgaatccccctcggggcaggttgggcctaggccggctccccctcaggaggagagcccttcctccgaggctaagtctaggggccctacccccccagcaatgggacctagagatgcccgacccccacggagaagctctcaacccagccctaccgccgtaccagcatcagacagccccccaacaaagcaggaggtaaagaaagctggcgagcgacacaaactcgcgaaagaaaggcgggaggagcgggcaaagtatctggccgctaagaaagccgtctggttggagaaggaagagaaggccaaggccttgcgggaaaaacagctgcaggaacgccgaaggcgcctggaggaacagcgactgaaagctgagcagcgcagagcagctctcgaagagcgtcaacgacagaagctggagaagaataaggaaaggtacgaagcagccatccaaagaagtgtgaagaagacttgggctgagattcgacagcagaggtggtcctgggccggtgccttacatcacagctcccctggccacaagacaaacaggagtctgcagttatccgcttgggaaagtagcatagtggaccgtcttatgactccaactctctcatttctggccagatcacgctcggccgtcaccctgccacgtaatggcagagaccaagggaggggttgcgaccctggacggggacctacctggggcagggcgggtgcttcacttgccagagggcctcagccggatcggacccatcccagcgctgcggtccctgtgtgcccgagaagtgcaagcgcctccccgctgaccccttgtagcgtcacgaggtccgtccaccgttgtgcacctgccggagaacgcggagaaaggaggaaacctaacgcagggggttcccctgcacccgttcggaggcggccagaggcatctcctgtgcagaaaaaggagaagaaagacaaagaacgggagaacgagaaggagaagtccgcactggcgagagaacggtcccttaagaagcgacagagcctgcccgcttccccacgcgctcgactcagcgcaagcactgcctcagagctcagccccaaatccaaggcgagacctagttctccaagcacatcttggcatcggcctgcctctccgtgcccttcccccggaccaggccatacattgcctcctaagcccccttcccctcggggtacgacagcctctccaaaggggagggttaggcgcaaagaggaggcaaaagagagcccgagtgcagcaggcccagaagataagagccaatcaaaacggagagcgtccaatgaaaaggaaagtgccgctcctgcctcccctgccccttcgcctgccccaagtcctactcctgcgcctccacagaaggagcaaccccctgctgaaacacctacagatgccgctgttcttacttcccctcccgcaccagcaccccctgtaaccccctctaagccgatggccggaaccaccgatagagaggaggcaaccagactgctggcagagaaacgcaggcaagcgagagagcaaagggagagagaagagcaggaaaggcggctgcaggctgaacgcgacaagcgcatgagggaggaacagttagcacgggaagccgaggcgcgtgctgagagggaagccgaggcgcgacggagggaagagcaggaggcccgagagaaggcccaggccgagcaggaggagcaagagcggctccagaaacagaaggaggaagccgaagccaggtctagagaagaggcggaaagacaaagactggagcgcgaaaagcactttcagcagcaggagcaagagcgccaagaaaggagaaaacggctcgaggaaattatgaaacggacgcgtaagagcgaggtgtcggaaacaaaaaaacaggattctaaggaggccaacgccaacggaagtagccccgaaccagtgaaggcagttgaagctaggtcccccggactgcagaaggaggccgtgcaaaaagaagaacccatcccacaggagccccagtggtccctcccgagtaaggaactgcccgcttcactagtcaacggtctgcagcctctacccgctcaccaggaaaatgggtttagcaccaatggcccatccggcgataaatcacttagccgcacccctgaaacgcttcttccgttcgccgaggctgaggcctttctgaaaaaggcagtagttcaaagtccgcaagtgacagaagtgctgtag

SEQ ID NO: 27959 - DNA, 1125 bp, synthetic construct
  source 1..1125: mol_type = other DNA; note = Synthetic coding sequence
atgcgcgctccaatgttgcaaaaacaacaagcccctcgcatggacaccccaccgcctgaagaacggttagagaagcagaacgagaagctgaacaatcaggaagaggagactgaatttaaggagcttgatggcctgagagaagctctggcaaacctgagaggtttgtcagaagaggaacggagcgagaaagcaatgcttcgctctcggatcgaggagcaaagccagctgatctgcatactaaaaaggcggtctgacgaggccttagagcgttgccagatcctggagctcctaaacgccgagctggaagaaaagatgatgcaggaggctgagaaactcaaggctcaaggtgagtacagccgcaagctggaggaacgttttatgactctggccgctaaccatgagttgatgctccgattcaaggacgagtacaagtccgagaacatcaaactcagagaagagaatgagaaactccgcctcgaaaacagctcactattctcccaagcgctcaaggacgaggaggcgaaggtgcttcagctgaccgtgcggtgcgaggcgctgaccggggaactggagacactgaaagaaaggtgtgctcaggacgcttgccaagcccaggcccgtgagaaggaactgctggagctgcagagccaacaggcttgcacccacactaaagagacagaacagttacggagtcaactccagacactgaagcagcaacatcagcaagctgtcgaacagattgcaaaggccgaggaaactcacagtagtctcagtcaggaacttcaggccagactacagaccgtgacaagagagaaagaggaactgctgcagctgagtatagagcgtggtaaggtcctccagaacaaacaggccgaaatctgccagttggaggagaagttagagatcgccaatgaggatcgcaagcacgctctggaacgctttgaacaagaggcagtggcggtggatagtaacctgcgagtccgggagctgcaacggaaggttgacggaatccaaaaggcctacgacgaacttagactgcaatcagaggcattcaaaaaacactccctggacttgctctctaaagaaagggaactgaatggcaaattgaggcatctatccccctag

SEQ ID NO: 27960 - DNA, 585 bp, synthetic construct
  source 1..585: mol_type = other DNA; note = Synthetic coding sequence
atggaagatgggcttttggagattatgacaaaagacggcggagatatgccggcacctctggaggtgtccacagttccagcagtgggcgacgtgatctcaggggagtacaatgggggtatgaaggaactgatggagcatctaaaagcacagttacaggccctcttcgaggatgtgcgggcaatgaggggggcactcgatgagcaggcttcccatattcaagtgcttagcgacgatgtctgcgctaatcagcgagctattgtatcaatgtgtcagattatgacaacggcaccaaggcaggggggactcggggtggtcggtggtaaaggatccttccaatctgaccctcaggaacctgaaacccccagccctggcatcggtgacagcggcttattggggagggatcccgaagatgaagaggaagaggaagaagaaaaggagatgccaagtcccgcaacaccaagttctcactgcgaaaggcccgaatccccctgcgcaggcctactcggcggtgatggtcctctagttgaacctctggacatgccggatattaccctgttgcagttggagggagaggcttccctatag

SEQ ID NO: 27961 - DNA, 1281 bp, synthetic construct
  source 1..1281: mol_type = other DNA; note = Synthetic coding sequence
atggctcatctgaggggcttcgccaatcaacactcacgcgtcgacccggaggagctgtttaccaagcttgaccgaatcggaaaaggtagcttcggggaagtctataagggcattgataatcacacgaaggaagtcgtcgccattaagatcatcgaccttgaggaggccgaagacgagatcgaggatattcagcaggaaatcaccgtcctctctcagtgcgactccccttacattacccggtattttggaagttacttgaaatcaacaaaactttggataatcatggagtacctcggaggagggtccgcattggatctcctcaaaccaggacccctcgaggagacatatattgctaccatcctgagggaaatcttgaagggtcttgactacctccattctgagcgtaaaatacatagggacatcaaagccgctaatgtgcttctctctgagcagggtgatgttaaattggccgattttggagtcgctggccagctcaccgatacacagatcaaacgaaatacatttgtgggtactccgttctggatggcccctgaggttatcaagcaaagtgcttacgatttcaaagcagacatatggtcgctggggatcacagcaatcgagttggccaagggggaaccgcctaactccgacctgcatccaatgcgcgtgctttttcttattcctaaaaatagcccaccaaccctcgaaggccagcactctaagcccttcaaggaattcgtggaagcatgtcttaacaaggatcccaggttcagacccacagccaaggagctacttaagcacaagtttatcactcgttatactaagaaaacttcattcctgacagaactcatcgaccgatacaaacgatggaaatccgagggtcacggtgaggagtcatcaagtgaggacagcgatattgacggagaggcagaggacggtgagcaggggcctatttggacctttcctccaactatcaggcccagcccccattctaaattgcataagggaacagctctccattcctctcagaaacctgccgagccggtgaaaaggcaacctcgttctcagtgtttgagcacactggtccgtcccgttttcggcgaacttaaagaaaagcacaaacaatcaggtggcagtgtcggggctctagaggaattggagaacgcttttagcttggccgaagaatcttgtccaggtataagcgataagctgatggtgcacctggttgagagagtgcaacgatttagccacaatcgcaaccatctcacttccacccggtag

SEQ ID NO: 27962 - DNA, 1350 bp, synthetic construct
  source 1..1350: mol_type = other DNA; note = Synthetic coding sequence
atgatgctcagtaccgaaggaagagaaggctttgtggtgaaggtgagagggctaccctggagttgttcagctgatgaagtaatgcggtttttcagcgactgcaagatccagaacggcaccagtggcattcggtttatctacacccgggaagggaggccgagcggcgaagcatttgtagaacttgagagcgaagaggaagtgaaactggcactcaagaaggatagggaaaccatgggccatagatacgttgaggtattcaaaagcaattccgttgaaatggactgggtccttaaacacactgggcctaacagcccagacactgcaaatgacggctttgtccggctgagggggttgcccttcgggtgttctaaggaggaaatcgttcaattcttctctggtcttgaaatcgttcccaatgggatgaccttaccagttgactttcagggccgttcgaccggcgaagcattcgtgcagtttgctagtcaggaaattgccgagaaagcgcttaagaagcataaggagcgaataggccatcgatatatcgaaatctttaaaagcagcagagccgaggtgaggacacactacgacccaccgcgtaagctgatggccatgcagagacccggtccttacgaccggcctggagccggacggggttacaacagcattgggaggggggctggttttgagagaatgagaaggggtgcctatggcggaggctacggcggatatgatgactatggcggatacaatgatggttacggcttcggaagcgatcgatttgggagagacctgaactattgctttagtgggatgtctgatcaccggtatggcgatggcggatcttctttccaatccacaacaggccattgcgtccacatgcggggtcttccataccgggctactgagaacgacatctacaactttttttcacccctcaatccgatgcgagtccacattgagattggcccagatggcagggtaacaggggaagctgatgttgagtttgccacccatgaggatgcggttgctgccatggccaaagataaagccaatatgcagcatcgttatgtggaactcttcctcaactcgactgccggtacatcaggtggagcgtacgatcattcctatgtagagttgtttctgaatagtactgccggagcttcagggggagcctacggttctcagatgatgggcggtatgggcttgtccaatcagagttcatatgggggtccagcaagccagcagctctcaggtggctacgggggtgggtatggagggcagagctcaatgtctggctatgatcaggtgctacaggagaatagttctgattaccagtccaacttggcatag

SEQ ID NO: 27963 - DNA, 1317 bp, synthetic construct
  source 1..1317: mol_type = other DNA; note = Synthetic coding sequence
atgtgccctaaaaacgcttcatattacggaaaccgagcggcaaccctgatgatgttaggacggttccgggaggcactgggcgatgcccagcaatccgtgaggcttgacgactctttcgttcgcggtcaccttcgcgaaggcaaatgtcacctgtccctgggtaacgcaatggctgcatgccgttcctttcagagggctctcgaacttgatcacaagaatgcacaggcacagcaggagtttaaaaacgctaacgccgtcatggaatacgagaagatagccgagacagacttcgagaagagagacttccggaaggtggtgttctgtatggatagggctctggaattcgcgcctgcatgtcacaggtttaagattctcaaagccgagtgcctcgcaatgctaggtagataccctgaggcccagtcagtggctagcgatattttacgaatggactcaacaaatgcagatgctctgtacgtacgtggactctgtctctactatgaagactgcatagagaaggctgtccagttcttcgtgcaagcattgcggatggcacctgaccatgagaaggcctgcatcgcatgccgcaatgcgaaagctctcaaggccaagaaggaagatggcaataaagcgttcaaagaaggtaattataagctggcctacgaactttacacggaggccctgggcatcgaccccaacaatattaaaactaatgccaagctgtattgcaaccgaggcacagtaaacagcaaattaagaaaactggatgatgcaattgaagactgtaccaatgccgtcaagctggatgacacctatatcaaggcttacctgagacgagctcagtgctacatggacaccgaacagtatgaggaggcggtcagggattatgaaaaagtttaccaaacagaaaaaacgaaggagcacaagcaacttctgaagaatgcacagcttgaactcaaaaaaagcaagcgaaaggattattacaagatcctgggggttgacaagaacgcatctgaggatgaaatcaaaaaggcctataggaaacgggcactgatgcatcacccggatcgccattctggagcaagtgccgaagttcagaaagaggaggagaaaaaatttaaagaagttggagaagcttttaccatcctgagcgatcccaaaaagaaaactcgatacgacagtggtcaggatctagatgaagaaggcatgaacatgggtgattttgatcctaataacattttcaaggccttttttggcggacccggtggattctccttcgaagcgtccggcccaggaaatttcttctttcagtttggctag

SEQ ID NO: 27964 - DNA, 165 bp, synthetic construct
  source 1..165: mol_type = other DNA; note = Synthetic coding sequence
atgcctggcaagaaagctagaaagaatgcacaacctagcccagccagggccccagcagagttagaggtcgagtgtgctactcagcttcgcaggtttggcgataagcttaacttccgccagaaactgctcaatttgatcagcaaactgttttgttccggcacttag

SEQ ID NO: 27965 - DNA, 1404 bp, synthetic construct
  source 1..1404: mol_type = other DNA; note = Synthetic coding sequence
atggcttctgtagcagctgctcgggctgtgcctgtcggaagtgggctgcggggacttcagaggacgctgccattggtagtcattctcggggcaaccggcaccgggaaatcgacactggctttgcagttaggccagaggctgggtggtgaaattgtgtccgctgatagcatgcaggtgtatgaagggctcgacatcataacgaacaaggtctccgcccaggagcagagaatttgcaggcatcatatgatcagcttcgttgatcctctggttacgaattatacagtggtcgatttcaggaaccgtgcaacagcactgattgaagacatcttcgccagggacaaaattccaattgtcgtgggcggaacgaactactatattgagagccttctttggaaagtgctagtgaacaccaagccacaggagatgggaactgagaaagtaatcgataggaaggtggaactggaaaaagaggacggcttggtcctgcacaagaggctatcacaggttgatcctgagatggccgctaaattacacccacacgataagagaaaagtggccagaagtctgcaggtctttgaagaaacgggaatatcacactctgagtttctacatagacagcataccgaagagggaggcggtcctcttgggggaccactaaaattcagtaacccgtgcattctgtggcttcatgcagaccaggccgttctggacgagagacttgacaagcgagtagacgatatgctggccgctgggctcctcgaagaacttagggacttccatcgccgatacaaccagaagaatgtatccgaaaacagtcaggattaccagcatgggatcttccagtccatcggtttcaaagagttccatgaatacctgattacggagggcaaatgcactcttgaaactagcaaccagctgcttaaaaagggtatcgaggccttgaagcaggtgaccaagaggtacgcgagaaagcagaatcgatgggtaaaaaaccgcttcctgtcccggcctggacctatagttcctccggtttatgggcttgaagtgtcagatgtctcgaagtgggaggagtccgttcttgaaccggcattggagattgtccaatcttttatccaaggtcacaaacccaccgctacccccatcaaaatgccctataacgaggccgaaaataaaagatcgtatcatctctgcgatttgtgtgatcggattatcatcggcgaccgagagtgggctgcccacattaagtccaagagtcacttaaaccagctgaagaaaaggcgtagactggactccgacgctgtgaacacaattgagagccaaagcgttagcccagatcataacaaagagcctaaagagaaaggtagtcccggtcagaatgatcaggaactgaaatgttccgtatag

SEQ ID NO: 27966 - DNA, 558 bp, synthetic construct
  source 1..558: mol_type = other DNA; note = Synthetic coding sequence
atgggggtgaacctgacaaggtcgaataaggaaaccgtaaaacatagtgacgtattgttccttgccgtgaaaccacacattattccgttcatcctggacgagatcggcgctgatgtacaagcgaggcatatcgtcgtgagttgtgccgctggcgtgactatttcatcagtagagaaaaagctcatggcttttcaacccgctcccaaggtcatcaggtgcatgacaaacactcccgtggtcgttcaggaaggtgcaaccgtgtacgcgacaggcacacacgcgctggtggaggacggacaattgctcgagcagttgatgtccagcgtgggtttctgcaccgaggtcgaagaggatcttatcgacgcagtgaccggattgagtggtagcggaccggcttaccagagcatggcggatcaggagaagataagccccgctgcccttaagaagacgctgctggacagggtcaaattagagtcgccaaccgtgtccacactgactccttccagccctggaaaactcctgacacgcagcctcgctctggggggaaaaaaagactag

SEQ ID NO: 27967 - DNA, 960 bp, synthetic construct
  source 1..960: mol_type = other DNA; note = Synthetic coding sequence
atgtctgtcgggtttattggtgcgggacagctcgcaatgctctggaggggagccagcaggccccagcaccctgtggggtctcaagacaattctcaactccccaggaacgagcctgcccatggtgttcgcgctcaagaagacgggtgtgaaccagatactcaacagcaaggggacggtgaggcccagaggagaccggtaagcggttgtgaagctcatattatacctttcattctggacgagatcggagccgatgtccaagcgaggcacattgtcgtcagttgcgctgcaggagtgacgatcagttccgtggagaagaaactaatggcattccaacctgcacccaaggtcatccgctgcatgacaaatactcccgtagtggtccaagaaggagccaccgtctacgccacaggaactcatgcacttgtggaggacgggcagttgctcgagcagctcatgtcgagtgtgggattctgcaccgaggtagaggaggacctgattgacgccgtcacaggcctctcagggagtggtccagcctacgctttcatggctctagacgcgttggccgacggtggagtgaagatgggcttgcctaggcggctggctatccaattgggggcacaggccctgctcggcgcagctaagatgctgctcgacagcgaacagcacccatgtcaactaaaggacaatgtttgttctccaggcggagctactattcatgctctgcattttttggaatcaggtggctttaggagtctactcatcaacgccgtagaggcctcttgtatccggactcgagagttgcaatctatggctgatcaggagaaaatttcacccgctgcattaaagaagacactgctggatcgagtgaaactggagagccctaccgtgagcactttgactccgagcagtccgggtaagttactaacacgatcactggccttaggcggaaagaaagactag

SEQ ID NO: 27968 - DNA, 708 bp, synthetic construct
  source 1..708: mol_type = other DNA; note = Synthetic coding sequence
atgctgagcgcaactagaagggcctgtcagctgctcctcctccactcattattccctgtgcccaggatggggaactctgctagtaatatcgtatccccacaggaggcgctacccggacggaaagaacagacaccggtggcagctaaacaccatgttaacggtaatcgcaccgtcgagcctttccctgaaggcacacagatggccgtctttggaatgggttgcttctggggagccgaaagaaagttttgggtcctgaaaggggtatactccacccaagtcggcttcgcaggtggatacacatcaaaccccacatataaggaagtgtgttcagaaaaaaccgggcacgccgaggttgtgcgcgtggtatatcagcccgagcatatgagttttgaagagcttcttaaggtgttttgggagaaccatgatccgacacaggggatgcgccaaggcaacgaccacggaactcagtatcgtagcgccatctacccgactagcgcgaaacaaatggaagccgctctttcctctaaggagaactatcagaaggttctatcagagcatggcttcggcccaattacaaccgatatccgcgaaggtcagaccttttactacgcagaagactaccaccagcagtacctctccaagaaccccaacggttactgcggactgggaggtactggcgtatcgtgcccagtaggaatcaaaaaatag

SEQ ID NO: 27969 - DNA, 3873 bp, synthetic construct
  source 1..3873: mol_type = other DNA; note = Synthetic coding sequence
atgagcggtcccctcgaaggggctgacggcggaggggatcccagacctggcgaaagcttttgtccgggaggggttccaagtcctgggcctccgcagcatcggccatgccctggtccgagcctggccgacgacacagatgcaaactcgaatgggtccagcggaaatgagtccaatggacacgaatcgcggggagcaagccagcgatcttcacatagcagttcctcaggcaacgggaaggacagtgcgctcttagagaccactgaatcctctaaaagtaccaattcccagtcaccatcgccacctagttccagcatcgcgtatagcttgctgtctgcatcttcagagcaggataacccatcaaccagtggctgctctagtgaacagtcggcacgagctagaacccagaaggaactcatgactgccctccgggagctcaaactgcggcttccccctgaacggagggggaagggccgttctggaactctggctacactgcagtacgcgctcgcgtgtgttaaacaggttcaagccaatcaggagtattaccagcaatggtcactggaagagggtgaaccctgctcaatggacatgtctacctacaccttagaagaactagagcacatcacaagcgaatataccttacagaaccaggacaccttctctgtagccgtgagctttctaaccggccgtatcgtctacatctccgaacaggccgcagtgttactcagatgcaagagagatgtgttccgagggacacgtttctcagaactgctcgcgccacaagacgtgggcgtgttttacggatcaacggctccaagtcgactgcctacctggggaaccggcgctagcgctggctcaggacttcgcgacttcacacaggagaaatccgtcttttgccggattagagggggacctgaccgggaccctgggccacgctatcagcctttcagattgaccccatacgtgaccaagattagagtatccgacggtgcccctgcacagccgtgctgcctgctgattgccgagcgcattcattccggctatgaagctccaagaattcccccagacaagcgcatttttaccactcggcacacccccagctgtctctttcaagatgtggacgagagggctgctccgctcctgggttacctgcctcaggatctccttggagcccctgtcttgttgttcctgcatccagaggatcgtccacttatgctcgccatccacaaaaagattctgcagttggccggacagccatttgatcacagccccattcggttctgcgccagaaatggagagtatgtcactatggatacgagctgggcgggatttgttcacccctggtctcgcaaagtggcctttgtgcttggacggcataaagtgcgcactgctcctctgaatgaagacgtgttcaccccacccgctccctccccggcacctagcttggacacggacattcaggaactaagtgagcaaattcaccggctgcttttgcagcctgttcactccccaagcccaacagggctttgtggagtgggcgctgttacctccccaggacccctgcactcacccggttctagcagcgactctaacgggggagatgctgaggggcctggtccccctgcacctgtaacattccagcagatatgtaaggatgtccacctggtcaaacaccaaggacagcagttgttcatcgagtcccgagctcggcctcagtctcggcctcggttgcctgctactgggacctttaaggccaaggccttgccatgccagagccccgaccctgagctggaggccggaagtgctccggttcaagccccactcgccctcgttccagaggaggcggagcggaaggaggcctcaagttgtagctaccagcagattaattgcctggactcgatcttgaggtacctagagtcatgcaacctgccatcaaccacgaagcggaagtgcgcaagttccagttcctacaccacaagctcagcctcggacgacgacaggcagcggaccggccctgtgtctgttggtaccaaaaaggacccacctagcgccgcactttccggcgagggagctacccctcgcaaagagcctgtggtgggtggcacactaagtcctttggctctggccaacaaggccgaatctgtagtcagtgtgacatctcagtgctcattctctagcacaatcgtccatgtcggcgataaaaagccacctgagagcgacatcatcatgatggaggacttacccggacttgctcccggacctgctccctcacctgcccctagccctaccgtggctcctgaccctgccccagatgcttatcgtcctgttggcttaacgaaagctgtgctctcgcttcacacccagaaagaagagcaggcctttctttcacgcttcagagatctgggcagactccgtggtctggattccagttcaacggccccttccgccttaggggaaaggggatgtcatcacgggcctgcacctccgtcaagacggcaccactgcaggtctaaagcgaaaaggtccaggcatcaccagaacccacgagctgaggcaccatgctatgtgagccacccgagtccagtccccccatcgacaccctggccaactcctcccgctaccactccattcccagccgttgtgcaaccatacccgctgccagtgttctccccaagggggggacctcagcctcttcccccagcaccaacctccgtgccccctgcagccttcccagcgccactcgtgactccaatggttgcccttgtgctcccgaactaccttttccctacaccttccagctacccctatggtgccctccagaccccagccgagggcccacctacgcccgcttcgcattctccgtcccctagtctgcctgccctggccccttcacctccccacaggcctgacagtccgctcttcaacagtcgctgttcatctccgctgcaactgaacctgctccagctggaagaattgccccgagcggagggcgctgccgtggctggaggacccggtagctccgcgggacctcccccaccaagcgccgaagcggcagaaccagaggctcgtctcgccgaagtgaccgaaagctccaaccaggacgctctgtctggatcttccgacttgctagagcttctgctgcaggaagacagcagatctggcaccggaagcgccgctagtggttccctggggagcgggctgggttccgggtcagggtctggctctcatgagggcggatccactagtgcatcgatcacacggtcaagccaatctagccacacctcgaaatattttggttcaattgattcctctgaggctgaggcaggtgccgcaagaggcggagccgagcctggagaccaggtcatcaagtacgtgcttcaagaccccatatggttgctcatggccaacgcagatcagcgggtaatgatgacctatcaggttccgtctcgcgacatgacttcagtgctcaaacaagatagggagcgcctgcgagctatgcaaaaacagcagccaaggttcagcgaggaccagcggagagagctgggagccgttcactcttgggtgagaaagggacagcttcctcgcgcactggatgtgatggcctgcgtggactgcgggagctccacacaggatccagggcaccccgacgaccctcttttctctgagctagatggccttggactggagccaatggaagaaggcggaggcgagcaaggcagtagtggcggtggctcaggcgaaggagaagggtgcgaggaggcccaagggggtgcaaaggcatcctccagtcaagacctcgctatggaggaggaggaggaaggacgaagctctagctccccagccctgcctactgctgggaactgcacctcatag

SEQ ID NO: 27970 - DNA, 2022 bp, synthetic construct
  source 1..2022: mol_type = other DNA; note = Synthetic coding sequence
atggaaaaagctgtgaacgatggctcgcactcggaggagctattctgccacttgaaaaccatttccgaaaaagaagatcttccaagatgtacctccgagagccatttgtcttgtcttaaacaggacatcctgaatgagaagactgagctggaagccactctcaaagaagctgaactggtgacacattccgtagaactgctcctacccctcttcaaggatacgattgaaaagataaacttcgagaatgcaaacctttctgcgctgaacctgaaaatttcagaacagaaagagatcctgataaaggaactcgatacatttaagagtgtaaagctggctctggagcacctgctaaggaagcgtgattacaaacagactggtgataacctgtcttctatgctgcttgaaaatcttaccgataatgaaagcgaaaacaccaatctgaaaaagaaggtgttcgagaaggaagctcatattcaggagctcagttgtctgtttcaatccgagaaggccaatactcttaaggcaaaccgcttcagccagtccgttaaggtggttcatgagaggctgcagattcagatccacaaaagggaggctgagaacgacaagctgaaagagtacgtcaagtccttggaaaccaagatcgctaaatggaacctccagtcacggatgaataaaaacgaagccatagtcatgaaggaagcatcccgccagaaaacagtggcgctgaaaaaggctagcaaagtttacaagcagaggctagatcacttcacgggagcgatagagaaactgacttctcaaatccgagatcaggaggccaaactctcggagactatctctgctagcaatgcttggaaatcccattacgaaaaaattgtgattgagaaaactgagttggaggtacagatcgagaccatgaagaagcaaattatcaatcttctcgaagatttgaaaaagatggaggatcatggtaagaactcatgcgaggagatcctccgcaaggttcactcaatcgagtacgaaaatgaaaccctgaacttggagaacacaaagctcaaactcagattcccatgccggataaccgaaagtaagaacatgaacattctcattgtgctggacatgttgtgttatatctcttcagagaagaccacactcgccgcacttaaggatgaagtcgtgtccgtggaaaacgagctctcggaactacaagaggtcgagaaaaagcagaagacactgatcgaaatgtacaagacacaagtacaaaaactgcaggaagcggcagaaatcgtgaaatcacgatgcgagaacctgctccataaaaataaccagattactaagacaaaaaacaagaatgtggagaagatgagaggacagatggaatcccatttgaaagagttagagcgcgtgtgtgactccttgactgcggcagaacggaggctccacgagtgtcaggagagtttgcagtgctgcaaaggtaaatgcgctgaccaggagcacacaattcgggagctgcagggtcaagtagatggaaaccataatctgcttactaaattatccctggaagaagagaactgcctgatccaactaaagtgcgagaacctccagcagaagctcgagcagatggatgccgagaataaggagctggaaaagaagctagccaatcaagaagaatgtctgaagcattctaacttaaagttcaaagagaaatcagcggagtataccgcgctggctcggcagctcgaggcagccttggaagagggacgtcaaaaggtggccgaggaaatcgagaagatgtcttcccgcgagtcagccttacagattaaaatcctggacctcgaaacagagcttcgcaagaaaaatgaggagcagaatcagcttgtctgcaagatgaacagtaaggctcagcatcaagaagtgtgtctgaaggaggtgcagaacagcctggaaaagtccgaaaatcagaacgaaagcatcaagaattatctccagtttctcaaaacatcatacgtgacaatgttcgagtag

SEQ ID NO: 27971 - DNA, 798 bp, synthetic construct
  source 1..798: mol_type = other DNA; note = Synthetic coding sequence
atggatgacaaggcaagcgtgggaaagatctctgtatcaagtgactctgtgagcacattgaacagcgaggacttcgtactggtcagtagacagggggatgagactccctctactaacaacggaagtgatgacgagaagaccggccttaagatcgtgggtaacggctcagagcagcagctgcagaaagagcttgcagatgtcctgatggatccaccaatggacgaccagcccggtgaaaaggaactggtcaagcgtagtcagctggacggcgaaggggacggccctctgtctaaccagctgtctgcttcctccacaatcaaccccgtgccacttgtggggctgcaaaaacccgaaatgtcccttccagtgaagccgggacagggcgactccgaagctagctcgcctttcactcccgtggccgatgaagacagtgtggtgttcagcaaactgacctacctgggctgtgcttcagtgaatgcccctcgttctgaagtggaggccctgaggatgatgtctatcctgcggtcacaatgtcaaatatcgctcgacgttactcttagtgtgccgaacgttagtgaggggattgtgcggctcttggatcctcagactaacaccgagattgctaattacccgatatataaaatactcttctgtgttcggggtcatgacggaactcccgagagtgattgcttcgcttttactgaatcccactacaatgccgagctcttccggatccacgtcttcaggtgtgagatccaggaggccgtgagcccacaagaaaagacactgtgtaaatag

SEQ ID NO: 27972 - DNA, 636 bp, synthetic construct
  source 1..636: mol_type = other DNA; note = Synthetic coding sequence
atgtgggcaagcctaagccttgatcaccccagtgccaaagagaatcaggctcttagactcatagagatgcgtgaggagaacggtaacgtgccgaagactgagcaagccggaagtttgaagccactacgcgataccggcaagtcaaatctgaaggagaagaaggcaaacagtaaattaaaacaaattgagaaggagtacacacagaagctggccaagagcagccagataattgccgagctgcaaactacaatttcctccttgaaggaggagaatagtcagcagcagttggccgctgaacgacgtctgcaggacgtgagacaaaaatttgaagacgaaaagaaacaactcattcgcgacaatgaccaagccataaaggttctccaggatgagctggagaacaggtcgaaccaggtcagatgtgcggaaaagaaactgcaacacaaggagctggaaagccaggaacagattacctacattcgtcaggaatacgaaaccaaactaaaaggtttaatgccagccagtctgcggcaagagttagaggacactatctcaagtcttaagtcacaggtaaactttctccagaagcgggcttctattctacaggaggagctgaccacttatcaggggagaaggtag

SEQ ID NO: 27973 - DNA, 867 bp, synthetic construct
  source 1..867: mol_type = other DNA; note = Synthetic coding sequence
atgtcatcaagcatgtggtatatcatgcagagcattcagagtaagtattcattatccgagagattgattaggacgatcgctgcaattcgatcttttccgcacgacaacgtcgaggatcttattcgaggcggtgctgatgtgaattgtacacatggcactttaaaacctctccattgcgcttgtatggtaagtgacgcagattgcgtcgagcttttgcttgagaagggcgctgaggtgaatgctctggacggctacaacaggacggcgctgcactatgccgcagagaaggacgaagcttgtgtggaagtgcttctggagtacggcgctaatcccaacgcattggatggaaatcgggataccccgctccactgggcagcgttcaagaataatgcagagtgcgtgagagcgttactggagagtggagcctccgtgaacgctctggactacaacaatgatactccccttagctgggctgcaatgaagggaaatttagagtccgtgtccatactgctcgattatggtgctgaggttcgtgtgattaatctcatcggacagacaccgatctcccggctggtcgccctcctcgttcgcggtctaggtacagagaaggaagattcatgctttgagttgctgcatcgtgcagtcggtcatttcgagctacgcaagaatggcactatgcccagggaagtagccagagacccacaactgtgcgagaagctaaccgtcctctgctcggcaccaggcaccctgaaaacactggctagatatgccgtcaggcggagcctgggccttcagtacctccctgatgccgtgaaggggctgccactgcccgctagtctgaaggaatacctcctcttactggagtag

SEQ ID NO: 27974 - DNA, 1341 bp, synthetic construct
  source 1..1341: mol_type = other DNA; note = Synthetic coding sequence
atgagagagatcgtgcatatccaggccggacagtgcggcaaccagattggcactaagttctgggaagtgatctcggatgagcatggaatcgacccagccggtgggtatgtgggggatagcgccttgcaactcgagaggatcaacgtatattacaacgaatcctcatctcagaagtacgtgccacgtgctgctctggtggacctggaacccggaaccatggactctgttagatcagggcctttcggtcagttgttccggcctgacaatttcatctttgggcagacaggcgctggcaacaattgggctaagggacactataccgaaggggctgagctggtggatgcagtactcgacgtggtgcggaaagagtgtgaacattgtgactgcttacagggctttcagctcacccatagtctggggggagggacaggtagcggcatggggacgctgttgataagtaagatccgcgaggagtttcctgacaggattatgaacacgttttcagttatgccaagcccaaaggtctcagacacggttgtagaaccgtataatgcgaccctcagcgtccaccagctggtcgagaatacagacgaaacatactgcattgataacgaagcattatatgacatatgctttaggaccttgaaactgacaaccccaacgtacggggatctgaaccatctggtgagcgccaccatgtctggagttacgacttcattacgattcccgggacaattgaacgccgacctgcgaaagctggccgtcaacatggttccctttccaagactgcatttcttcatgcctggattcgccccattgacctcccgaggctctcagcagtacagagcacttacggtgccagaactaactcagcaaatgtttgatgctcgtaacatgatggctgcctgcgatcccaggcacggcaggtatctgaccgtggccacagtgtttcgcggacccatgtccatgaaggaagtcgatgagcagatgctagcaatccagagcaagaactcctcttattttgtagaatggatcccaaacaatgttaaggttgccgtctgtgatatccccccacgaggcctcaaaatggcgagtacttttattggaaatagcactgcaatccaggagctattcaagcgcatctcagaacagttctccgccatgttccggagaaaggcctttctgcactggtttacaggggagggcatggatgaaatggagtttacagaggcggagagcaacatgaatgacctggtttctgagtatcagcagtatcaggatgccacggcaaatgacggggaggaggcgttcgaggatgaagaggaagagattgacggttag

SEQ ID NO: 27975 - DNA, 792 bp, synthetic construct
  source 1..792: mol_type = other DNA; note = Synthetic coding sequence
atgctgagctcaaagggtttgacagtagtggacgtatatcaaggctggtgcggtccttgtaaacctgtagtctcacttttccagaagatgcgcatcgaagtgggcctggatctgctgcatttcgccctggcagaggccgatcgcctggacgtgctcgagaagtatcggggtaaatgtgaaccaacgttcctattttatgccattaaggatgaggcgctgagcgacgaggatgaatgcgtctcacacgggaagaacaacggtgaggacgaagatatggtcagctctgaacgcacttgtaccctggcaatcattaaacctgacgctgtggcccatggcaaaactgacgagattataatgaagatacaggaggcgggattcgaaatactgactaacgaagaaagaactatgacagaagcagaagtgaggctcttctatcagcataaagccggtgaggaggctttcgagaagcttgttcaccacatgtgttccggcccatcccacttgctgattctgaccaggaccgagggatttgaagacgtagtgacgacttggcgcaccgtaatgggcccacgcgatccaaacgtggccagacgagaacagcctgaaagtctccgcgctcagtatggcaccgaaatgccattcaatgccgtgcacggatcccgcgacagagaggacgccgaccgggaattggcgctgctattcccgtctctcaagtttagcgataaagatactgaggcccctcaaggagagtcctcgactcagccacgattgaaaattactgacctcgattag

SEQ ID NO: 27976 - DNA, 1089 bp, synthetic construct
  source 1..1089: mol_type = other DNA; note = Synthetic coding sequence
atgttgaaaaacaagggacactcttccaaaaaggataatctggcagtaaacgctgtcgcactgcaggatcacatccttcatgatctacagcttagaaatctgtccgtggccgaccacagtaagactcaagtgcagaaaaaggagaataaatcacttaagcgagacacgaaagccattatagatactggcctcaaaaagacaacacaatgtccaaagttggaagattcggagaaagaatatgtgctggaccccaagcctccacccctgacattagcccaaaagctgggactgatcgggcctccacctcccccattgtctagcgacgaatgggagaaggtgaaacagaggtccctcctccagggagacagtgtgcagccatgccccatctgcaaagaggagttcgagctgcgaccgcaggtgctcctgtcctgctctcacgtcttccacaaagcctgcctgcaagcttttgaaaagttcactaataaaaaaacctgcccactgtgccgcaagaaccaataccagaccagggtgatccatgacggcgctcgcctattcaggataaaatgtgttactaggatccaggcttattggaggggctgtgtcgtacggaagtggtatcgcaatttgagaaagacggttccaccaactgacgccaagcttcgaaaaaagttcttcgaaaaaaaatttaccgaaatttcccatcggatcctgtgttcatataatacgaatattgaggagttgtttgctgagattgatcagtgcctcgctattaatcgaagcgtcctgcagcagctcgaggagaaatgtggccatgagatcacagaagaggagtgggagaagatccaagtgcaggcactgagacgcgagacccacgaatgctccatatgtttagccccactgagcgctgccggagggcagagagtcggcgctgggagacggagtagagagatggccctgctgtcatgttctcacgttttccatcatgcctgcctgctggccctggaggaattcagcgtgggcgatcgaccaccttttcatgcctgccccctgtgtaggtcctgctaccagaagaaaatccttgaatgctag

SEQ ID NO: 27977 - DNA, 291 bp, synthetic construct
  source 1..291: mol_type = other DNA; note = Synthetic coding sequence
atgatcgaaaagatgcaagggtctagaatggacgaacagaggtgctcttttccaccacctcttaaaacagaagaggactacataccttacccctccgtacatgaagtactgggtcgcgaaggccctttcccattaattctcctgccacagtttggcggatactggatcgaaggtactaaccacgaaatcacctccatccccgagactgagcccttgcagagtcctaccacaaaagtcaagcttgagtgtaatccgactgccagaatataccgcaagcacttcctcgggtag

SEQ ID NO: 27978 - DNA, 459 bp, synthetic construct
  source 1..459: mol_type = other DNA; note = Synthetic coding sequence
atggcgggactgccccgacggatcataaaggaaacgcagagactgcttgccgaacctgtcccaggtattaaagcagaacctgacgagtctaacgccagatacttccacgtggtgatagcaggcccacaggattctcccttcgagggaggcacttttaaactcgagctctttctcccagaggaatatcctatggctgcgcctaaagtccgcttcatgactaaaatttatcaccctaatgtggacaagctcgggcgaatttgtctggatattcttaaggacaagtggagccctgccctacagatccgcacagttctgctctctatccaagcattactgtctgcacctaatccagatgacccactggcgaatgacgtggcagaacaatggaaaactaacgaggcccaggccatagaaacagcccgagcctggacaaggttgtacgccatgaacaacatttag

SEQ ID NO: 27979 - DNA, 3354 bp, synthetic construct
  source 1..3354: mol_type = other DNA; note = Synthetic coding sequence
atgtatagaagctcagcacggagcagtgtcagttcgcatcgacccaaagacgacggaggcggaggacccagatcgggacgatcctcgggttcctcctcaggaccagccagacgcagtagcccgcctccccctcccagcgggtcctcctccaggactcccgcacgcagacccaggtcaccaagtggacatagaggacgacgcgcttctcccagccccccacgcggacgccgagtctccccttccccaccgagagccaggagagggtctccctcgcctcctcgtgggagaaggctcttcccccctgggcctgcaggtttccgagggagtagtagaggggaaagcagagccgattacgcccgagatggaagaggggaccatcccggagactccgggtcacgcaggcggagcccgggactgtgttctgatagcctggagaaatctctcaggataacagtgggtaatgatcacttttgcgtgagtactcctgagcggcgtcgactgtccgataggctgggaagtcctgtcgacaacttggaagatatggaccgtgacgacttaactgacgactccgtcttcacgcggtctagccagtgctccagggggctagaacggtacatttcacaggaagagggtccgctgtcgccgttcctgggccagcttgacgaggactaccgtaccaaagagacctttttgcatcgctccgattacagtccacatatctcatgccacgatgagttacttagaggcaccgagaggaacagagagaaactgaaaggatactctatcaggtccgaggagcggtcaagagaagcaaagcgcccaagatatgacgacaccgtcaaaattaattcaatggggggagatcaccctagttttactagtgggactagaaattaccgacagagacggagatctccttccccacgcttcctggacccggaatttagagagttggacttggctcgtaggaaacgagaggaggaggaagagcggtcacgctcattatcgcaggagctcgttggtgtagatggtgggggaacaggatgcagtattcctggtctatccggcgttctgactgcttcagaaccgggttattcgctacaccgccctgaggaagtttcagtgatgccaaagaagtcaatcctgaaaaagcggatcgaggttgacattatggagccatctatgcagctggaatccttttccagctccacaagttcctcacaagaccaccctctctatagcgggcacccatctctgccccttagcggggcaattgccgctttcgctagcgaaattgagaacaagggcaccatggttgaaaccgccttgaaggagcctcaggggaacctttaccagtggggacccttaccaggtattcccaaagataattccccactgagagagaagttcggctcatttctatgtcacaaggacaacctggacctaaaggcggaaggcccagaaaggcacacggactttctgcttccgcatgagagggcctcccaggacggctccggcttcagtagaattttaagcatgctcgcagactcaacctccactcaggaaaaacgtaggagatcctttcctgacattgaagatgaggaaaagtttctgtacggcgatgaggaagaggaccttaaagctgaaagcgtgccaaagcctctcggcagttccgagagcgaagtgatgaggcagaaagctagcagcctccccagctccgcccctgcggtcaagctagagtccctcgaggagacaaatcccgagtacgccaagatacatgacctactgaaaactattggtctggatatcggggtcgcagagatctctcaattagccgctaggactcaggaaagactgcatggtaaaaagccatcattacggagctctgcagacaggaggtccagtgttgatcgctatttctcagccgaccactgctcatcagtggaccacaggtttagcgctgataggtgctccagcgttgaccattgcttttcagccgacaggcggtcgtctgatccccaccgccttgaatctcgggaggcccaccatagtaatacacattcccctgaggtgtcacatcctcatccaccttctccggtcgatccttacctgttgaccaagaatagcccaccttttctgaagtcagatcacccagttggccatatttccgggccagaagtggttgggagcgggttccagtcatccgtcgccgtaaggtgcatgctgcctagtgccccaagtgctccgatacgactgcctcacaccgccgcactctcgcagttccatatgccacgtgcttctcagtttgccgctgctcgaatcccgccaaattaccaagggccagcgattccaccagccagtttcgacgcatataggcattacatggcatatgctgccagtcgctggcctatgtaccccacttcacagccaagcaatcacccggttcctgagccacatagaattatgcccatcacaaaacaggctactcgttcacgacctaacttgagagttatcccaacagttacccctgataagcctaagcagaaagaaagtcttcggggttccatccccgcagcccaggtgcccgtgcaggtgtctatcccatctctcatcagatacaacccagaaaaaatctctgacgagaagaaccgcgctagccagaaacagaaagtgatcgaggaaagagaaaaacttaagaacgaccgcgaagccaggcaaaaaaaaatgtactatctgcgaactgaactcgagcgcctgcacaagcagcaaggggaaatgctccggaaaaagcgcagggagaaggacggtcataaagacccacttttggttgaagtttcacgattgcaggacaacattatgaaggacatagccgaactgagacaggaagccgaagaggccgagaagaagcagtcagagctggataaagttgctcagattttgggcataaacatctttgacaagtctcagaaaagtttgtctgatagtcgcgaaccgacggagaaacctgggaaggcagagaaatctaaatcccccgaaaaagtaagctcattcagcaactcctccagcaataaggaatcaaaagtaaacaatgagaaattccggacaaaaagccctaagccagcagagtcaccacagagcgcaacaaagcagctcgatcagcctaccgccgcatatgagtactatgacgccggaaaccactggtgcaaggactgcaataccatctgcgggaccatgttcgacttcttcacgcacatgcacaataagaagcatacacagggccaattccagaaaagctccgacttccaaaaagagggcctccagcagacctttctcccgccagagcgacaggggtag

SEQ ID NO: 27980 - DNA, 576 bp, synthetic construct
  source 1..576: mol_type = other DNA; note = Synthetic coding sequence
atgtatgtttgtctctgtgtttcagttgccaaagtgacaatggccgaccgcgctgctgcagagagggcttgtaaggacccaaatccaattatcgatggaagaaaagctaacgttaatctggcatatcttggagcaaagccgagaattatgcagcctggcttcgccttcggagtccaacagctgcaccccgctttgatccaacgcccttttgggatacctgcacattacgtatacccccaggcctttgtgcagccaggcgtcgttattccccatgtgcaacctacagctgcagctgcttctaccacaccttacattgactacactggtgcagcctatgctcaatattcagccgcagccgcagccgcagccgcagccgcagcttatgaccagtatccatacgccgcatcgccggcagcggcaggctatgttaccgctgggggttatggctatgcagtccaacaacccatcacagcagcagcgccaggcacagccgctgctgctgctgccgcagccgcagcagcagcagccttcggccagtatcaaccgcagcaactgcagactgaccgtatgcaatag

SEQ ID NO: 27981 - DNA, 330 bp, synthetic construct
  source 1..330: mol_type = other DNA; note = Synthetic coding sequence
atggctggtgccccaaccgtttcactgccagagctgcgatccctattagcatcaggacgcgctaggcttttcgatgttagatctagggaggaggcggctgcagggacaattcccggtgctctgaatatacccgtctctgaactcgaaagcgctctccagatggaacccgctgcctttcaggctctctattctgccgaaaagcccaagctggaggacgaacacctggtgttcttttgccaaatggggaagaggggactccaagccacccagctggcccgtagcctcggatatactggatatggcgaggtgtggctgctcgcaggccgatag

SEQ ID NO: 27982 - DNA, 630 bp, synthetic construct
  source 1..630: mol_type = other DNA; note = Synthetic coding sequence
atggcccttctggcagagcacctcctcaaaccactgcccgcagacaaacaaattgagactggcccttttctggaggcagtctcacacctgcctccctttttcgattgtctcggcagccccgtgttcacgcccataaaggcagacatcagcgggaatattaccaaaattaaggccgtttacgacactaacccagctaaatttaggaccttgcaaaatatccttgaagtggaaaaggagatgtacggtgccgagtggccaaaggtgggcgctacccttgctctcatgtggctcaagaggggtctgagatttattcaggtgttcctgcagtccatctgcgatggtgagcgggatgaaaatcatccaaacctgattcgtgtgaacgccactaaggcctacgagatggctctgaagaaatatcatgggtggatagtccaaaaaatctttcaggctgccctttatgctgcgccttataaaagtgattttcttaaggccctgtctaagggtcagaacgtcacggaggaggagtgccttgagaagattcggctgtttctagtgaactatactgcaactatagacgtgatatacgaaatgtacactcagatgaatgctgagctcaattacaaggtttag

SEQ ID NO: 27983 - DNA, 474 bp, synthetic construct
  source 1..474: mol_type = other DNA; note = Synthetic coding sequence
atggaagaagctcaacggaagaggacccagctgcgcgaggcatttgagcagctgcaggctaagaagcagatggctatggagaagcggcgagccgtgcagaatcaatggcaactccagcaggagaagcaccttcagcatctggcagaagtgagtgcagaggtgcgggagcgaaagacaggcacccagcaagagctggaccgggtgttccagaagctgggcaatctcaagcagcaagccgagcaggaacgggacaagctccagcgctaccagacatttctgcaattactatacactttacagggtaaactgctgtttccagaggcagaggcagaagccgaaaacctgcctgacgacaaaccgcagcagccaacccgtccacaggagcagtctacaggcgatacgatgggcagagaccccggagttagcttcaaagccgtcggcctgcaaccggctggagacgtcaacttgccctag

SEQ ID NO: 27984 - DNA, 639 bp, synthetic construct
  source 1..639: mol_type = other DNA; note = Synthetic coding sequence
atggaggtgctccgacggtcctcggtattcgcggcagagattatggacgcatttgaccgaagtcccacagacaaggaactggtcgcccaggctaaagcgcttggacgcgaatatgtgcacgcgagattgttgagggccggtctgagttggagcgctccagagcgcgcagcacccgtgccaggtagattggcagaggtctgcgctgtactgctgaggttgggagacgagttggaaatgatccgaccatccgtctacagaaatgtggccagacaacttcatatttcacttcagagcgagcccgtggttacagatgctttccttgctgtcgcgggacatatcttcagcgccggaattacttgggggaaagtcgtgtccctttatgctgtggctgcagggttggccgtagactgcgtcagacaggctcaaccggctatggttcacgccctagtggactgcctcggggaattcgtccggaaaactctggccacttggcttcgcagaaggggtggatggactgatgtgctgaagtgcgtggtctctaccgatccgggtctgaggtcccactggttagtcgcggcactctgtagctttggcagattccttaaggcggctttcttcgtgctgctccccgagaggtag

SEQ ID NO: 27985 - DNA, 2148 bp, synthetic construct
  source 1..2148: mol_type = other DNA; note = Synthetic coding sequence
atgtcgcaaagcggcgctgttagctgttgtcccggagccactaacggctcactcggcaggagcgacggcgtcgcaaagatgtctcctaaagatctctttgagcaacgcaagaaatactctaattcaaacgttattatgcacgagactagccagtatcatgtgcagcatctggctacttttatcatggataagagtgaagccattacctctgttgacgacgccatccgaaagctggtgcagctatctagtaaagaaaaaatatggactcaagagatgctgcttcaggttaacgaccagagtctgagacttcttgatatcgaaagtcaggaagaactcgaagattttcctttgcctaccgtccagaggagccagaccgttcttaaccagctgcggtacccctcagtactactcctcgtgtgccaggacagcgaacagagtaagccggacgtgcattttttccactgtgatgaggtagaagccgagctggtgcacgaggatatcgagtcagcccttgccgattgtagattgggaaagaaaatgagaccgcagacgctcaagggtcatcaagagaagatcaggcaacgccagtctatcctccccccacctcagggccctgcccctattcccttccagcataggggcggagacagcccagaggctaaaaatcgggtggggcctcaggttcctctgtctgaaccgggatttagaaggagggagagccaggaagaacccagggctgtgcttgcccagaagatagagaaggagacccagatcctgaattgcgctctcgacgacatcgagtggttcgtggcgaggctgcagaaagctgcagaagccttcaaacagttgaaccagcgaaaaaagggcaagaaaaagggaaaaaaggctcccgctgagggagtccttacactccgggcacggccacccagtgagggtgagtttattgactgctttcagaaaatcaagctcgccataaatctgctggctaaacttcagaagcacattcagaaccccagcgccgcagagctggtgcatttcctttttgggcctctggaccttatcgtgaacacctgcagcgggccagatatagcaaggagcgtgtcatgccctctgctctctcgagatgcagtagatttcctccggggacacctcgttccgaaagagatgtcactctgggaaagtttgggggagagctggatgagaccacgctcagagtggccaagagaaccgcaggtgcctctctacgtgcccaaatttcacagtgggtgggagcctcccgtcgatgttctccaggaagccccatgggaggtagagggtctggcttccgctccaattgaggaagtatcccccgtgagccgtcaatccatcaggaattcccagaagcatagtccaacatcagaacccaccccgccaggcgacgccctgccacccgttagctccccacacacgcacaggggataccaacctacaccagctatggctaagtacgtgaagattctatatgatttcaccgccaggaatgcgaatgagctcagcgtcttaaaagacgaagtgctggaagtgcttgaagatgggaggcagtggtggaaactccgatccagatcgggacaggcaggttacgtaccttgcaatattctcggagaagcccgacctgaggacgccggagctccttttgagcaggctggacagaaatactgggggcctgcttctccgacacataaactgcccccatcgtttcctgggaataaggatgaattaatgcagcacatggatgaggtcaatgacgagcttatccgcaagatcagtaacataagagcccagcctcagcgacactttcgggtggagcggagccagccagtgtctcagccactgacgtacgaatcaggccctgatgaagttagagcttggctggaagccaaagcttttagcccaaggatcgtcgagaacctgggcattctcacaggaccgcagcttttctcccttaacaaagaagaactcaagaaggtctgcggtgaggagggagttcgggtatattctcaactaaccatgcagaaggccttcctggagaagcagcagtccggttcagaactggaagaactgatgaacaagtttcactctatgaaccagagacggggagaggattcctag

SEQ ID NO: 27986 - DNA, 600 bp, synthetic construct
  source 1..600: mol_type = other DNA; note = Synthetic coding sequence
atggcatggccatgcatctccaggctctgttgtcttgccaggcgctggaaccagctggatcgctccgacgtggcggtgccactgaccctgcacggttactctgacctcgactctgaagagcccggtaccggcggagccgcaagtaggaggggccagcccccagctggagctcgcgattcaggtcgggatgtaccactgacacagtaccagcgggactttggcttatggacaaccccagcagggcctaaggatccccctccagggcgaggaccgggagcaggcggacgccgaggcaagagtagcgcacagtcctccgcacccccagctccaggggcacggggagtgtatgtgctccccataggcgatgccgatgcggcagcagccgtgacaactagctacagacaggagttccaggcctggaccggcgttaagccatctaggtcaacaaaaactaaacctgccagagtgattaccactcacacaagtgggtgggactcttcgccaggagctggcttccaggtgccggaggtcaggaagaaatttacccctaatcctagcgcgattttccaggcgagtgctcccaggatattaaacgtctag

SEQ ID NO: 27987 - DNA, 5105 bp, synthetic construct
  source 1..5105: mol_type = other DNA; note = Synthetic coding sequence
atgggcaattctgatagccagtacactctccagggctcgaaaaaccactctaacacgatcactggcgctaaacagatcccctgtagcctgaagatccgtgggatccacgctaaagaagaaaagagcctacacggctggggccacggatccaatggggctggatataaatcaaggagcctggccagatcctgcctcagccacttcaagagtaaccagccttacgcgtctcgcctgggtgggcctacatgcaaggttagccgcggagtggcttactctacacatagaacgaacgcccctggcaaagacttccaaggcatctcagccgcatttagcacagagaacggattccactccgtgggacatgaattggccgacaatcacatcacctccagagactgcaacggccatttgctgaactgctatggtcgcaacgaatctatcgcctctacacctcccggagaagataggaaaagcccacgggtgctgattaagacgttaggcaaacttgatgggtgcctaagagtggaattccacaacgggggtaacccaagcaaggtgcccgcagaagactgctccgagcctgtgcagctccttaggtattcccctacactggcctctgaaacgtccccagttcccgaggcacggagagggagcagcgctgattctctaccttctcatagaccctcacctaccgactcccggctgcgatcaagtaaagggagctcactaagtagtgagagctcatggtacgactctccctggggtaatgccggagaactatccgaggctgagggatcttttcttgcacctggcatgcccgatcccagtttacacgcctcctttccaccaggggacgctaagaagcccttcaatcagtcttcgtccctctctagtctgagagagctctacaaagacgccaacctgggaagtctctcaccatcaggtattagactctccgatgagtatatgggaacccatgcgagcctctctaacagggtctcctttgcatccgatattgatgtgccctcacgggtggcccatggagatcctattcagtattcatcctttaccttgccctgcaggaagccaaaggcatttgtggaagatacagccaagaaagactctctgaaggcccgtatgagacggatcagtgattggacgggctctctgtcccgcaaaaagcggaaactccaggagccacgttctaaggagggcagcgattattttgattcacgctcggatggactgaacaccgacgtgcagggcagctcacaggcaagtgctttcctgtggagcggtggtagcacccagattctgtcccaacggtctgaatcaactcacgcgatcgggtccgatcccctgcggcagaacatctatgaaaactttatgagggagctggagatgagtaggactaataccgagaacatcgagactagcacagaaaccgccgagtcaagcagcgaaagcctttcaagtctcgagcagctagacctcctgttcgaaaaggagcagggcgtcgtccgaaaagccggttggctgttttttaaaccactcgttacagtacagaaggagcggaaactcgagctggtggccaggcggaaatggaagcagtattgggtaaccctgaaaggctgtacactgctcttttacgagacatatggcaagaatagtatggatcagagcagcgccccacgatgtgcgctgtttgctgaagatagtattgtgcagagtgtgcccgagcacccaaaaaaggaaaacgttttctgcttatcaaactcatttggcgatgtctacctgttccaggccacctcacaaacagatctggaaaactgggtcaccgcggtccactctgcttgcgccagcttgttcgccaaaaagcatggaaaggaggacactctgagattgctgaaaaaccaaaccaaaaatctgctccagaagattgacatggattctaagatgaagaagatggctgaactccagctgtccgttgtttctgaccctaaaaatcgtaaggcgattgagaaccagattcagcagtgggaacagaatctggaaaagtttcacatggatttgtttagaatgcggtgctacctcgcctccttacagggtggtgagctccccaatccgaagagcctcctcgcagccgcaagcaggccttcgaaattagctctgggcaggctagggatccttagtgtcagttcattccatgccttggtctgctcacgggacgattcggccctgcgcaagcgaaccctgagcctgactcagcgtggccgaaacaaaaagggcattttttcatcactcaagggcctcgatacgctggctagaaaaggaaaggagaagagaccttctattacccaagtggatgaactactgcacatctatggctccaccgttgacggggtcccgcgagacaacgcatgggagatccaaacgtacgtgcatttccaggataatcatggggtgacagttggtattaagccagagcatagggtagaggatatattaactttagcctgtaaaatgcgccaactggaacccagccactatgggctccagctcaggaaactcgtggacgacaatgtcgagtattgtatcccagccccttacgagtatatgcaacaacaggtttacgatgagattgaggtatttccactaaatgtgtacgacgtccagctcacgaagacaggatccgtctgtgactttggctttgcagtgacagcacaggtcgacgagagacagcatctctcacgaatttttattagtgacgtcctaccagatggactggcttatggtgaaggtctgcggaaaggcaatgagattatgacgttgaacggcgaggccgtttctgacctcgacctgaaacaaatggaggcccttttctccgagaaatccgtgggcctcacactgatcgctagaccacccgatactaaagccacactctgcacatcttggagcgactcagacctcttttcgagggatcaaaagtctctgctgccaccccctaatcaatcgcagttacttgaagaattcctggataattttaagaaaaacactgcaaatgatttttcaaacgttcccgacatcacaaccggtttgaagcgctcgcagaccgacggaacgctcgaccaggtttcgcatcgggagaaaatggagcagactttcagatctgctgagcagattactgctctgtgccgcagctttaacgattcccaggcaaatggcatggagggtcctcgcgagaaccaggatcctccaccaagaagcctggccaggcacctctctgacgctgaccgactgagaaaagtcatccaggaactggttgacacagagaaatcctacgttaaggacctttcttgcctttttgagctgtacctcgaaccattgcaaaacgaaacatttctaactcaggacgagatggaatcactgtttgggtctctgcccgaaatgcttgaatttcaaaaagtcttcttggagacactggaagatgggatctcagcgagctcggactttaacactctcgagacaccatcccagttccgcaagctcctgttttctctggggggatccttcctgtattacgcggatcatttcaagttatattctggattctgtgcgaaccacattaaagtgcagaaggtacttgaacgtgcaaaaacggacaaagcgttcaaggcattcttggacgccagaaatccaaccaagcaacacagcagcacacttgagtcgtatctgattaagcccgttcagcgggttttgaaataccctctgctgctgaaggaacttgtaagtcttacagatcaggagagtgaggagcactaccatctaactgaagcgctgaaggccatggagaaggtggccagccatattaatgagatgcagaagatctatgaggactacggcacagttttcgatcagctggtcgctgaacaatcgggcacagagaaggaagttactgagctgagtatgggggagttgctcatgcactctaccgtgagctggttaaacccattcttgtctctgggtaaggcgaggaaggatctcgaactcaccgtcttcgtgttcaagagagcagtaatactggtgtacaaagagaactgtaaactgaagaaaaagctgccaagcaacagccgaccggcacataatagcaccgatttggatcccttcaagttcagatggttgattcctattagcgctttgcaggtgcgcctgggaaaccccgcaggcactgagaacaactcaatctgggaactgatccacaccaaaagcgaaattgaggggaggcccgagacgatctttcagttgtgttgctctgacagtgagagtaaaacgaatatcgtgaaggttatccggagcattctgcgcgagaacttcaggcggcatattaaatgcgaactgcctcttgaaaaaacatgtaaagaccgactggtccctctgaagaatcgtgtgcccgtgagcgctaaactcgcatcaagcaggtccttaaaggttttgaagaattcatccagcaacgaatggacaggggaaacaggaaaggggaccctactggacagtgacgaagggagcctcagttctggaacccagtcttctggttgtccaaccgccgagggtcggcaggacagcaagtcaacatctcctggaaagtacccccaccccggacttgcagactttgccgataacctcattaaggagtctgacattctcagtgacgaggacgatgatcaccgtcagactgtaaagcaggggagccctaccaaggacatcgaaatccagttccaacggttgaggatttccgaagatcctgatgttcaccccgaggccgaacagcaacctggcccagagtcaggcgaaggacagaaaggaggcgagcagcccaagctggtccgaggccacttctgtccaatcaagcgaaaggctaatagtaccaagagggaccgaggaacactgctaaaggctcagatcagacatcagtctttggacagtcagtccgagaatgccacgatagatttgaatagcgtactcgaacgcgaattttccgtgcagagcctgacatctgtggttagcgaggagtgcttctacgaaactgagtcacacggcaagagcta

SEQ ID NO: 27988 - DNA, 3177 bp, synthetic construct
  source 1..3177: mol_type = other DNA; note = Synthetic coding sequence
atggacctgggaccactgaatatctgcgaggagatgaccatccttcacggagggtttctgctggccgagcagctgttccatcccaaggccctagccgaattgaccaagtcggattgggaacgggtgggacgacctatcgtggaagccctccgcgagatatctagtgctgccgctcactctcaaccatttgcctggaagaagaaggctctcatcatcatttgggccaaagtactccagccacacccagtcacccctagcgatacggaaacccgatggcaggaagatctgtttttttcagtgggcaacatgatccctaccatcaaccataccattctcttcgaactcctgaaatctcttgaggctagcgggctgtttattcagctgctgatggcgttaccgacaaccatctgtcacgccgaactggagcgcttcctcgaacacgtgacggtcgacaccagcgctgaggacgtggccttcttcttagacgtatggtgggaagtcatgaaacacaaaggtcatccacaggaccccctgctgtcccaattctctgcaatggctcataagtacctaccagcactcgacgaattccctcatcctcccaaaagattgcgatcagacccagacgcctgcccgactatgccactgctcgcaatgttgctgaggggactgacacaaatccaatcgagaatcttgggccctggcaggaaatgttgcgccctggctaatctcgccgacatgctgaccgtttttgctcttaccgaagacgaccctcaggaggttagcgctaccgtgtacctggataaactagctacagtgatcagcgtttggaactcagacacccagaatccgtaccaccaacaagctctggctgaaaaagtgaaagaggctgagcgcgacgtgtccctgactagtctagctaaactgcctagcgagacgattttcgttggctgcgaatttcttcaccacctcctccgcgagtggggggaggaacttcaggccgtgctgagatcatctcaagggaccagttacgattcttatcgactctgtgacagtctcacctctttctcccagaacgcaacactttacctaaatcgaacaagtcttagcaaggaggaccggcaagtcgtaagtgagcttgccgagtgcgttagagattttctccggaagacatcaaccgtgctgaaaaacagagcactcgaggacataactgcctcaatcgccatggcagtaattcagcagaaaatggatcgtcatatggaggtctgctacatattcgcaagcgaaaagaaatgggctttttctgacgagtgggtggcgtgtttgggttctaatcgtgcattatttcgtcagccagatctcgttcttagacttttggaaacagtgatcgatgttagcactgcagatcgcgcaattcccgagagtcagattcggcaagtcattcatctgatactggagtgctacgccgatctctcactcccagggaagaataaggtccttgcagggattctacggtcctgggggagaaaaggactttctgaaaaactgttggcctatgtggaaggattccaagaagatctgaatactaccttcaaccagctgactcagagcgcctcagaacagggacttgccaaggccgtggcttctgtcgctaggctggtgattgtacaccctgaagtgacggttaagaagatgtgttctcttgcagtagtcaaccttggaactcataaatttctcgcccagattctgacggcttttcccgctcttcggtttgtcgaagagcagggccctaatagcagcgccacattcatggtcagttgtcttaaagaaaccgtgtggatgaagtttagcacacccaaggaggagaaacagtttctcgaattgctgaactgcctgatgagtcctgttaagccgcaaggcatccctgtggcagccctactggaacccgatgaagtcctcaaggagttcgtcttgccatttctgcggctggatgtagaggaagttgatctgtcgcttaggattttcattcagaccctagaggccaacgcctgcagagaggagtattggctgcagacctgctcccccttccccctcctgtttagtttgtgtcagctgttagataggttctctaaatattggcaattaccaaaggagaagaggtgcctgagcctggaccgtaaggatctggcaatccatatccttgaactcctgtgcgagattgttagcgctaatgcagagacctttagccccgacgtatggataaagtcgctttcttggttacaccgtaagcttgagcagttggactggaccgtgggactaaggttgaaatccttcttcgagggccattttaagtgcgaggtgccagccaccctatttgagatatgtaaattaagtgaggacgaatggacctcacaagctcatcccggatacggtgcagggactggactcctcgcttggatggaatgttgctgcgtgagtagtggcattagtgaacggatgctgagtttacttgtggtggacgtgggaaatcccgaagaagtgcggctgttcagtaagggcttcctcgtggctctggtccaggtgatgccttggtgcagcccacaggagtggcaacgcctgcaccaactgacccgaaggctgttagagaagcagctgttgcacgtcccctacagcctggaatacatacagttcgtcccccttctaaatctcaagccatttgctcaggaattacagctgagtgttttattcctgcgtacattccagtttctatgctctcacagctgtagagactggctccccttggagggctggaatcatgtcgttaaactgctatgcggttctttaactcgactcctagattccgtgcgggcaatccaggcggctggtccatgggtgcagggacctgaacaggacttgacacaagaggccctgtttgtctacactcaggtgttctgtcacgctcttcacatcatggccatgctgcaccccgaggtgtgcgaacctctgtatgttttagctctggagacattgacttgttacgaaacactttctaaaaccaacccgtccgtgagctccctgctgcaacgtgcccatgaacagcgttttctgaaatccatagccgaaggtataggcccagaggaacgccgacagactctcctgcagaaaatgtcttccttctag

SEQ ID NO: 27989 - DNA, 267 bp, synthetic construct
  source 1..267: mol_type = other DNA; note = Synthetic coding sequence
atgtccggcctccgcgtctactccacgtctgtgaccggcagccgcgaaattaaaagccagcagtctgaggtaaccaggattcttgatgggaagcgcattcaataccaactcgtggatatctcacaggacaacgccctacgggatgaaatgcgggcactcgctggcaatccaaaagcgactcctcctcagatcgttaatggcgaccagtactgcggagtgtgggccggagggcgaggcggaggcggatccgttggtagaggcctgtag

SEQ ID NO: 27990 - DNA, 933 bp, synthetic construct
  source 1..933: mol_type = other DNA; note = Synthetic coding sequence
atggacgggagcttcgtgcagcattccgtacgcgttctccaggaactcaataagcaacgagaaaaaggccaatactgcgacgctaccctggatgtcggtggattggtgtttaaggcccattggagcgtgttggcgtgctgcagtcactttttccagagcctgtatggcgatgggtctgggggatctgtggtgcttccagccggatttgcagagatcttcggcctgctgctggattttttttacacgggtcacctcgccctgaccagcggcaaccgtgatcaggtgctcctggcagccagggagcttagagtccccgaagctgttgaattgtgtcaaagttttaaacccaagacatccgtgggacaggcggctggcggacagtctggccttggaccgccagcatctcaaaacgtcaattcccacgtcaaagagcccgcaggactggaagaagaggaagtatcgagaacactcggcctggtacctcgtgaccaggagcctagagggtcccacagtccacagcggcctcagcttcacagcccggcacagagcgagggtcctagtagtctgtgcggtaagctcaaacaggccctaaagccatgcccgcttgaggataagaagccggaggactgtaaagtgcccccacggcctctcgaggccgaaggagcccagttgcagggaggatctaatgaatgggaagtggtggttcaggttgaggacgatggagacggcgactacatgtctgaacctgaggccgtgctcactcgtagaaagtctaacgtcatccgtaagccctgtgccgcagaacccgctttgagcgccggatcacttgccgctgagcccgctgaaaatcggaaaggaaccgccgttcccgtggagtgcccaacttgtcataagaagtttctttccaaatattacctgaaagtccacaattag

SEQ ID NO: 27991 - DNA, 600 bp, synthetic construct
  source 1..600: mol_type = other DNA; note = Synthetic coding sequence
atgtctagtggaaatgcaaagattgggcatcccgcaccaaatttcaaggctaccgccgtaatgcctgacggtcagttcaaagacatctccctctctgactacaaaggcaaatacgtcgtgtttttcttctatcccttggatttcacttttgtctgccccacagaaatcatagccttttccgaccgcgcagaggagttcaaaaaactaaactgccaggtgatcggcgcatcagtggatagccacttttgccacctggcctgggtgaacacgcccaagaaacaagggggtctgggacccatgaatattcctttggtcagcgacccgaaacgcaccattgcccaggactacggagtcctgaaagctgatgaaggcatatcctttcgtggcctgtttatcatagacgataagggcatcctgaggcagatcacggtcaatgacctgccagtcggccgatccgtcgatgaaaccctccgccttgtgcaggcctttcagttcaccgacaaacatggcgaggtgtgtccggcagggtggaagcctggcagcgacacaatcaagccagacgttcagaaaagtaaggagtacttttctaaacagaaatag

SEQ ID NO: 27992 - DNA, 513 bp, synthetic construct
  source 1..513: mol_type = other DNA; note = Synthetic coding sequence
atgtccgtggccggtggggaaatacgcggagacacaggaggtgaagataccgccgctccaggcagattctcctttagccctgaacctacacttgaggacatacgcaggcttcacgcagagttcgccgcagagcgtgactgggaacaatttcaccaacctagaaatctgctcttggccctggtcggagaggtgggcgagctggcggagctttttcagtggaagacagatggcgagcctggaccacagggatggagtccacgggagcgcgcagccctccaggaagagctttccgacgtgctcatttatctggttgcgcttgctgcaaggtgtcgagtggatctgccgctggccgtgctgagcaaaatggatattaaccggaggcgataccctgctcatcttgcacgcagtagttctagaaagtacacagagcttccacacggagccattagcgaggatcaggccgtgggccctgcggatattccgtgcgacagcacggggcagactagtacctag

SEQ ID NO: 27993 - DNA, 702 bp, synthetic construct
  source 1..702: mol_type = other DNA; note = Synthetic coding sequence
atgtccgctaagcgagcagaattgaaaaagacccacctgtcaaaaaactacaaagctgtatgcctggaattgaagccagaacctactaaaacttttgattataaagccgtgaaacaggagggtagattcaccaaagccggagtgacacaggatctcaaaaatgagctgcgggaagttagagaggagcttaaagagaagatggaggaaatcaagcagatcaaggatcttatggataaagactttgacaagttacatgaattcgtggagatcatgaaagagatgcagaaggacatggatgagaaaatggatatcctgatcaacacacagaaaaactataagctccctctaaggcgggcacccaaggagcagcaggagctgcgtttgatgggcaaaacccatcgggagcctcaactcaggcctaagaaaatggatggtgcctctggggtgaatggcgcaccttgtgcgctgcacaaaaagaccatggcaccccagaagaccaagcagggcagcctggatcctttgcaccactgcgggacatgttgcgaaaaatgtcttttatgcgctctgaagaataattacaacaggggtaacattccaagcgaagcttctggcctctataaagggggtgaggaacctgttaccacccagccatcagtgggacatgcagtccccgcacccaaatcgcagacagaaggaagatag

SEQ ID NO: 27994 - DNA, 2196 bp, synthetic construct
  source 1..2196: mol_type = other DNA; note = Synthetic coding sequence
atgagcgtgacactgaccagcgtcaagagggtccagtcctctccgaatctcctcgccgcagggcgtgactcccagagccctgattccgcgtggcgctcatacaatgatggcaaccaggagacactgaacggagatgcaacctacagttcacttgctgccaaaggcttcagatcagtgcggccaaatctccaagacaaacgttcccccacgcagtcccaaatcaccgtgaatgggaacagcggaggtgctgtgtccccgatgagttactaccaacgcccttttagccctagcgcatatagtcttccggctagcctaaacagctcaattgttatgcagcacggaacttcactggactctacagacacgtacccacaacatgcacaatcccttgatggaactaccagcagcagcattccactctatcgatccagcgaagaagaaaaacgggtgaccgttatcaaggcccctcactatccaggtatcgggccagtggatgaatcaggcattccaacagccatccgtacaacagtagaccgcccaaaggattggtataaaaccatgttcaaacagattcacatggtccacaaacctgacgacgacactgatatgtacaataccccctatacctacaacgccggactctacaacccaccatatagcgcccagagccaccccgcagccaagacacagacataccgtccgctgtcaaagagccatagcgacaattctcctaatgcttttaaggatgcttcctcccccgtccctccccctcatgtcccacctcctgtccctcccctacggccacgggacaggtcatccacagagaaacacgattgggatccaccggacagaaaggtggacacacggaaatttcgctctgagccaagatccatatttgagtacgaaccgggaaaatcctcaatactccagcacgagcggccaccaccattgcccactaccccaactcccgtgccgcgagaacctggacgtaagcccctgtctagcagcaggctgggggaggttacaggtagcccatcgcctcctccgcgatccggagctcccacgccctctagccgggctccagcacttagcccaacacgaccccctaagaagcctctggattacgtacaggaccactcaagcggtgtgtttaatgaggccagtctgtatcaatcctccatcgaccgctccctggaaagacctatgagttctgcatctatggctagtgactttcggaaacgccgaaaatctgaaccggcagtcggccctcccagaggccttggcgaccagtccgcctcacggacgtcaccaggaagggtggaccttcctggatcatctacgaccctaaccaagagcttcacctccagtagcccatcttccccgagccgcgcaaaggacagagagtccccccgatcctactctagcacgctgactgacatgggacggagcgctccgcgagaacggcgaggaaccccggagaaggagaagctacccgctaaggcagtatatgatttcaaagcccaaacatctaaggagctttctttcaaaaagggtgataccgtatatatactccgcaagattgaccagaattggtacgaaggggagcaccatggcagagttggcattttccctatcagctacgtcgagaagctcactccaccagaaaaagcacagcctgccagacccccaccaccagcacagcctggtgagattggcgaggcaatcgccaaatataatttcaatgctgatactaatgtagagctgagcctcaggaagggagacagggtgatcctgctgaagagagtcgaccagaattggtatgaaggcaaaatcccaggcaccaaccgacagggtatctttccggtatcctatgttgaagtggttaagaaaaacaccaaaggagcggaggattatccagacccccctattccgcacagctactcttccgacagaatccacagtctctcctcaaacaaaccacagcgacctgtattcacccacgagaacatacaggggggaggggagccatttcaggccctttacaactacacacccaggaatgaggatgaacttgaattgcgggaatcagacgtgatcgacgttatggagaagtgcgatgacgggtggtttgttgggacttctcgtcgaaccaagttttttggaactttccctgggaattatgtcaagcggctgtag

SEQ ID NO: 27995 - DNA, 969 bp, synthetic construct
  source 1..969: mol_type = other DNA; note = Synthetic coding sequence
atgacgctggaggctatccggtatagccgtggaagtctccaaatcctagatcagctcctcctgcccaagcagagtagatatgaggcagtgggaagcgtgcatcaagcctgggaggccattcgggcaatgaaagtccgaggggctccagctatcgcactcgtgggctgcttatctctcgcagtcgagttacaggccggtgccggtggacccggtctagctgctctggtcgccttcgtgcgggacaaactgagcttcctcgtgaccgctcggccaacagcagtaaatatggcccgtgcagcgagagatctggcggacgtggccgctcgggaagcggagagggaaggggcaaccgaggaagcagttcgcgagcgtcgagagaccgaactatgcgaacattgggaggaacacaccaggcaaagggagctgcctcttcgcggacccctcggtggtactgttctcgaaacacggccatataaccagggagcacgactgaccgcattcgagctcgtctatgagcagattcccgctacccttataaccgattccatggtcgcagcggctatggcacaccggggagtgagcgctgtggtggtgggggctgatagggttgttgccaacggggacactgctaacaaggtgggaacgtatcagctggctattgtagccaagcaccacgggattccgttttacgtcgcagcacctagcagcagttgcgatctcagactagagaccggcaaggagattatcattgaagaaagaccaggccaggagctgaccgacgtgaacggcgtgcgaatcgcggctcccggaatcggcgtttggaatcctgccttcgatgtgacaccacatgatttgattacaggtggtattattactgaattgggagtgttcgctcctgaggaacttcggactgctctgaccactactatctcttccagagacggaaccctcgacggaccacagatgtag

SEQ ID NO: 27996 - DNA, 5168 bp, synthetic construct
  source 1..5168: mol_type = other DNA; note = Synthetic coding sequence
atgggcaaccaggatggcaagctgaaacgtagcgccggagacgcactccacgagggaggcggaggcgctgaagacgctctgggccctcgcgacgtggaagcaacaaagaagggcagtggcggaaaaaaagctctggggaagcacggaaaagggggtgggggaggagggggtggcggagagagtggaaaaaagaagtccaaaagtgactccagagcgagcgtattttccaatctgaggataagaaagaacctgtcaaagggaaaaggcgcaggagggagcagggaagacgtgctggattcacaggcacttcaaacaggggagttagatagtgctcacagcctgcttacaaagactcccgacctttctttgtcagcagatgaagccggactatccgataccgaatgcgctgacccctttgaagttactggtccgggaggacctggccctgccgaagccagagtgggtggcaggcccattgccgaggatgtggagacggcagccggtgcccaggatgggcagcgaacctcctccggtagtgacacggacatatactccttccactcggctaccgaacaggaggacctcctcagcgacatccagcaagccattagactccagcaacagcagcaacagcaattacaacttcagctgcagcagcagcagcaacagcagcaactacaaggcgctgaagaacctgctgcaccaccaacagccgtgagccctcagcctggagcatttttgggcttggaccgtttcctcctgggaccctctggcggagcaggagaggctcccggtagccccgataccgagcaggccctgtccgccctgtctgatctgccggagagcctagccgctgagccgcgagaaccgcaacagcccccatcccccggagggcttccagtctccgaagctccaagcctgccagctgcgcagcctgctgccaaggacagtccctccagcaccgctttcccctttcctgaggcaggcccaggagaggaggcagccggtgcacctgttcgtggagctggcgacacagatgaagagggcgaggaagatgcctttgaggatgctccacgaggaagtcctggcgaagagtgggcgcctgaagttggggaggacgcacctcagcgcctgggagaggaacctgaggaggaggcccaggggccagatgcaccagctgccgctagtctacctggctcccctgcccctagtcaacggtgttttaaaccgtatccactcataacaccatgctacattaaaaccaccaccagacaactctcttcacctaatcactcccctagccagtcccctaaccaaagtccaagaataaaaagacggccagagccaagcctgtcacgcggttcgaggaccgctctcgctagcgtagccgctccagctaagaaacacagggcagatggcggtctggcagcgggactgagccgctcagcagactggaccgaggaacttggagctaggacaccaagagtcggaggcagcgcccatctgctggaaagaggagtagcctcggattctggcggaggcgtgtcccccgcactggctgcaaaagcttctggcgctcctgctgcagctgatgggttccagaacgtattcaccggacgaacgctgctggagaagttattttctcaacaggagaacggacctccagaagaagccgagaagttttgttcaaggattatagcaatggggctgctgctacccttttccgactgtttcagagagccttgtaaccagaatgcgcaaaccaatgccgcatcttttgatcaggaccagctgtatacctgggcagcggtgtctcagccgacccacagtttagactattcagagggtcagttccccaggagagtgccaagcatgggacccccttccaaacctcctgatgaagaacaccgattggaggatgccgagaccgaatcgcaaagcgctgtgtctgagactccgcaaaagagaagcgatgcggtccagaaggaagttgtcgatatgaaaagcgagggccaagccaccgtgatccagcaacttgagcagaccatcgaagatcttcgcacaaaaatcgctgaactagagcgacagtaccctgcccttgacacagaggtggcctctggacaccagggtctagagaacggcgtcactgcgtcgggcgatgtgtgcctggaagcgttgcgcctcgaggagaaagaggtgcgccaccatcgaatactggaagccaagtcgatacaaacgtccccaactgaggaggggggagtgctcactctacccccagtcgatggactgcccggacgacccccatgcccccctggcgcagagagtggcccacagactaagttttgctccgaaataagtcttattgtgtctccacggagaatatctgtccagctagacagtcaccagccaacccagtctatctctcagccacctccccctcctagcttactgtggagcgccggtcaaggccagcctggcagtcagccaccccatagcatcagtaccgaattccagacttctcacgagcactcggtgtccagcgcgttcaaaaacagttgtaacattccaagtccacccccactgccatgtaccgagtctagctcatccatgccaggtctgggtatggtcccacctccacctcctcccttgcctggtatgaccgtgccaactctgccctccaccgctatccctcagccacctcctctgcaggggaccgaaatgcttcctcctcctccccctcctctgccgggtgccggaatccccccaccacctcccctgccgggtgctgggatcctcccgctgccccctctcccaggcgcaggaattcccccacccccaccgctgcccggagccgctattcccccaccccctccgctcccgggagccggtatccccctgcccccaccccttccaggcgcaggaataccaccccctccaccactcccaggagccggtatccccccacctcccccactccctggagcagggatccctcctcccccaccactgcctggcgcagggattcccccaccccctccactcccgggagccggaattcctcctcctccaccactacccggtgcaggcatacccccacctccaccccttccaggagccggtatacctccccctcctcctctgccaggagcgggaattccaccccctcccccactcccaggagcagggatcccccctccgcctccgttgccaggcgctggaatcccaccaccgcctccacttccgggagccggaattccacctcctccacctctgcctggagctggaatcccacccccacctccactaccaggggtggggatcccgcctcctcctccactacccggagccggaattcctccccctccaccactgcctggcgctggcatacctccccctccacctctacccggagcaggaataccacctccccctcctctccccagagtcgggatccctcccccaccccctttgcccggtgcgggaattcccccacccccacccttgccaggtgccggtatccccccaccacctccgctgcccggtgtgggaatccctccgccaccgcctttacccggagttggcatacctcctccgccacccctgcccggagcaggaataccccctccccctcccctccctggtatgggaattccccctgccccagccccacccctgcctcccccaggtactggcataccaccccctcccttgttgcctgtatctggcccacccctgctgccgcaggtgggaagttccactctccctactccacaggtctgtgggttcctaccccctcctctccctagtggtttattcggcctgggtatgaatcaggataagggatccaggaaacagcccattgaaccgtgcagacccatgaagccattatactggacccggatccagctacactccaaaagagacagctctacaagcttgatctgggagaagattgaagagccctccattgattgtcacgagttcgaggagctcttcagtaaaaccgccgttaaggaaagaaaaaagccaattagtgatacaatcagcaagaccaaagccaagcaggtggtgaaactgttgagcaacaaaaggtctcaggcggtgggtattctcatgtctagccttcacctggatatgaaagacatccagcacgcagttgtcaatctcgataatagtgtggtggacctggaaaccctgcaggccctctacgagaatagagcacaaagtgacgaactagagaagatcgagaagcacggacgcagctcgaaagataaagaaaatgcaaagagcctcgacaaacctgagcaattcctctatgagctgtcactcatccctaatttcagtgaacgagtgttctgcattttgtttcaatcgaccttttctgaatccatctgtagcatacgcaggaagttagagctgttgcaaaagttatgcgagactctcaagaatggcccaggcgttatgcaggtgcttggtcttgttctggccttcggtaattatatgaacggtggaaataagacccggggacaagcagatggattcggcctggacattctacctaagctcaaagatgttaagtcttccgacaactccaggtccctgttgagttacattgttagctattacctgagaaattttgatgaagacgcaggaaaagagcagtgcctgtttcccctgcctgagccgcaggacctctttcaggctagccaaatgaagtttgaggatttccagaaggacctgcggaaactgaagaaggaccttaaagcgtgcgaagttgaagccggtaaagtctaccaggtttcaagcaaggagcatatgcagccctttaaggagaacatggaacagttcatcatccaggccaaaattgaccaggaggctgaggaaaactctctgactgagacacacaagtgctttctggagactacagcctacttttttatgaaaccaaagctgggcgagaaggaggtgtccccaaacgccttttttagcatttggcatgaattctcgtctgattttaaggatttttggaagaaagagaataaattgcttcttcaagagagggttaaagaggcggaagaagtctgccgacagaagaaaggaaagagtctgtacaagataaaaccacggcacgatagtgggatcaaagccaagatttcaatgaagactta

SEQ ID NO: 27997 - DNA, 3048 bp, synthetic construct
  source 1..3048: mol_type = other DNA; note = Synthetic coding sequence
atgaccgtcagccagaaaggcggtccccagcctaccccttctccggcaggccctggtacacaactcggtcctatcaccggagaaatggacgaggccgacagcgcctttctgaaattcaaacaaaccgctgatgatagcctgagcctcaccagtcccaacactgaatcgatcttcgtggaggacccatatactgcgtccctgagatcagaaattgagtccgatggccatgagtttgaggccgaatcttggtcgctggcagtggacgcggcatacgcaaagaagcaaaaaagagaggttgttaaaaggcaggacgtcctgtatgaactgatgcagaccgaggtacatcacgttcggaccctcaagatcatgttaaaggtatatagcagggctctgcaggaggagctgcagttttcctcaaaagccatcggccgactcttcccctgtgctgatgacctgctggaaacccactcccattttctggccagattgaaggagcgcaggcaagagtcactagaggagggcagcgacagaaattatgtgatccaaaaaatcggagacctcctggtccagcaattctccggtgagaatggtgagaggatgaaggagaaatatggcgtgttttgttcagggcataatgaggcagtcagccactacaagttactacttcaacagaataagaagttccagaacctcattaaaaaaataggtaatttctccatagtcagaagattaggcgtgcaggagtgtatcctgcttgttactcaacggatcactaaatatcctgtgctggtggaaaggataatacaaaacacagaggccggaactgaggactatgaggatctgacccaggccttgaacctcattaaagacatcatctcacaggtcgacgcgaaggtgagcgaatgtgagaaagggcagagattgcgggaaatcgctgggaaaatggatctgaaatcctcatctaagctcaagaatggcctgactttcaggaaggaagacatgctgcagcgccagctgcacctcgagggtatgctttgttggaagactacctccggtaggctaaaggacatcttagctatactgctaaccgatgtgctgctgctactacaagagaaggaccagaagtacgtgtttgccagcgtggactccaaacctccagtgatctctctgcagaaactcatcgttcgggaagtggccaatgaagagaaggcaatgtttttgatttctgccagtttacagggcccagagatgtacgagatctatacttcaagcaaagaggatcgtaatgcatggatggcccatattcaacgcgcagtggaaagctgcccagatgaggaagagggtcccttcagtctgcccgaagaagaaagaaaagtggtggaagccagagccactagactccgagacttccaggaacggctgtccatgaaggaccagcttatagcccagtcactgctggaaaagcagcaaatttacctagaaatggccgagatggggggactggaagacctgcctcagcccaggggcctgttccggggtggagatccaagcgagaccctccaaggagaattgatcctgaaaagcgctatgagcgaaatcgagggtatacagtctctgatctgccggcagcttggctcagctaatgggcaggcggaagacggcggtagcagtactggccctcccaggagggctgaaactttcgccggttacgactgtaccaacagtccaactaaaaatggatctttcaaaaaaaaagtgtcttcaactgatcccaggccccgagattggcggggaccaccgaactcacccgatttaaagttgagcgattctgacattcctggcagctcggaggaatcaccacaagtggttgaagctccaggaaccgaatcggaccccagattgccaactgtgctcgaatcagagcttgtgcaaaggatccagactctgtcacaactgctactgaacttacaggcagtgatcgcacaccaagacagctacgtcgagacgcaacgtgctgcaatacaagagcgggagaaacagtttcgcctgcagagcaccagaggtaatcttcttttggagcaagagcgtcagcgaaactttgagaagcaaagggaggagcgggcagcactggaaaagctgcagagtcagctgaggcatgaacagcaaaggtgggagcgcgagcggcagtggcaacaccaggagctggagagggccggagctagacttcaggagcgcgagggagaggctagacaattgagagagaggttggagcaggaaagagctgaactggaacgccagagacaggcataccagcacgacctggagcgcctgcgagaggcccagagagcagtcgagagagaaagggagcgcctcgaactgttacgacgccttaagaagcagaatacagccccaggagctctaccacctgatacccttgctgaggctcagcccccatcgcaccccccttcctttaatggcgaaggcctggagggccctcgcgtttctatgttaccctctggcgtgggcccagagtacgcggaaaggcctgaagtggcccgtcgtgactcagcacctaccgaaaacagactggctaaatctgacgttccgatccaactcctgtctgctaccaaccaatttcagagacaggctgctgtgcagcaacagatcccaacaaaattggccgcatcaacaaagggaggaaaagacaaggggggaaagtctcgcggttcccagcggtgggaatccagcgcctcctttgatctcaaacagcaactgctcctaaataaactcatgggcaaggacgagagcactagccgcaaccgtcggtctctttcacccatccttcccggtagacattctccagctccgcctcccgaccccggtttccccgcaccttccccccctccagcggattcaccctccgaaggattttctctgaaggcaggtggcaccgccctgttaccaggtcccccagctccttcacccctgcctgccacgcctctcagcgccaaagaggatgctagcaaagaagacgtgatatttttctag

SEQ ID NO: 27998 - DNA, 2544 bp, synthetic construct
  source 1..2544: mol_type = other DNA; note = Synthetic coding sequence
atggaagctctgggaccaggaggagacagggccagccccgcaagctcaacttcatctcttgacctttggcacctttcaatgcgcgcagattcagcctactcatccttcagcgccgcttctggtggcccagaacccagaactcagtcgcccggaaccgatctcctaccttacctggactgggattacgtgcgagttgtttgggggggacctggcccagccccaccagatgccgcactgtgtacttccccgagaccacgccctgcggtggctgcccgttcgggcccacagcctaccgaggttccaggtactcctggccctctgaacaggcaggctacaccacttctctacgctttggccgctgaagcagaggctgccgctcaggcagctgagccaccatcacctccggcaagccgggctgcttatagacagaggcttcagggcgctcagcgccgagtactacgtgaaacatcttttcaaagaaaagaactgagaatgagcctgcctgccaggctgaggcctactgttcccgctagacctccggcaactcaccctcgttcagccagcctgtcccatccagggggtgagggagagcccgctaggtcaagggcccctgcaccgggaacggcgggacgtggcccacttgccaaccaacagcggaagtggtgcttctccgagcccggtaagctggatcgagttggcagagggggtggcccagctcgcgagtgcctgggtgaggcatgctcatcgagcggactacccggtcctgagccattggaattccagcaccctgcattggccaagtttgaagatcatgaggtggggtggttacccgagacacagccccaggggtctatgaacctggattctggctctctaaagctcggcgatgcttttcggcctgcgtctaggtcccgcagcgcttccggagaagtactgggctcatggggcggatcaggaggcacaatcccaattgtgcaagcagtgccccagggcgcagagacaccacgaccgctgttccagacgaaacttagcagatttttgccccagaaggaagccgcagtaatgtatcccgcagagctccctcaaagcagccctgccgattctgagcagcgggtttctgaaacctgtatcgttccagcatggctgccatcactgccggacgaggtgtttctagaggaagctcctttggtgaggatgcgctcacctcctgacccacatgcatcccagggccctcccgcaagcgtgcacgcaagcgaccagccatacgggaccggcttgggtcagaggacaggccaggtcacagtgcccactgaataccccctgcacgaatgccctgggacggctggagctgacgactgctggcagggggtgaacggctcagtaggtatctcccgcccaaccagtcatacacctactggcaccgccaatgataacatccctaccatagatccaaccgggcttaccaccaaccctcccaccgctgcagaatccgatctgctaaaaccagtgccggcagacgccctgggcctctcgggcaatgatacccccggaccaagccataatactgccctggcacgtggaactggccagccaggcagcaggccaacatggccctcccagtgcctggaagaattggttcaggaattggctagattggaccctagtctttgtgacccactagccagtcagccttctcctgagcctcccctgggactgttggatgggctcatcccccttgcagaagtgagagctgccatgagaccagcctgcggcgaagccggagaagaagctgcaagtaccttcgagcccggaagttatcaattttcatttacccagttactcccagctccccgagaggaaacacggctggagaatccggcaacgcatcccgtactggatcaaccctgcggacaaggcctccccgctcctaataactccattcaggggaaaaaggttgaactcgcagcaagattacaaaaaatgctccaggacttacacacagagcaggagcgtctgcagggtgaagcccaggcctgggcaagacgccaagctgcattggaagccgctgtgcgtcaagcttgcgcaccacaggagctggaacgctttagtcggttcatggccgacctggaaagagtcttgggtctgttactgcttttggggagtagactggcaagagtgaggcgcgctctcgccagggctgcttcagacagcgatcctgacgagcagaggctccggttgctacaaaggcaggaggaagatgccaaggaattaaaagaacacgtcgcccgtcgagagagggcagtgcgcgaggttctcgttcgggctctccccgtagaggagttgcgggtgtactgtgcgcttttggcgggtaaggctgctgtgctcgcccagcagcgtaacctggatgagcgtattagactgttgcaggaccagttggacgcgatacgggatgatttgggacatcacgcccctagtccgagccccgcaagaccaccagggacatgccccccagtacaacctccttttccactcctacttacctag

SEQ ID NO: 27999 - DNA, 2502 bp, synthetic construct
  source 1..2502: mol_type = other DNA; note = Synthetic coding sequence
atgaaatttacaaatactaaggttcagatgatgcagaacgtgcacctcgcgcctgagacggacgaggacgacttgtactccggatataacgattataatccaatatatgacatcgaagagctggagaatgacgccgcttttcagcaagcagttaggacctcccatggtcggaggcctccaatcacagcaaaaattagttcaaccgccgtcactcggcctatcgccactggctacggatccaaaaccagcctggcatcaagtatagggagaccgatgaccggcgctatccaggatggtgttacccgtcctatgactgcagtgcgcgctgcagggttcactaaagccgcactgagaggaagcgctttcgatccactctcccagtccaggggccctgcgtcaccattggaagccaaaaaaaaggacagccccgaggaaaaaatcaagcaactggagaaagaggtgaatgagctcgtcgaagagtcttgtatcgccaattcctgcggagatctgaagctggcactggaaaaagctaaagacgctggcagaaaggaaagagttttggtccggcaacgagagcaagttaccactccagagaacatcaacctcgacctcacatattctgttctgtttaatctggcttcacagtactccgtcaacgagatgtatgccgaagctctcaacacctatcaggttatcgttaagaataagatgttttctaacgctggtatcctgaagatgaacatggggaacatctacctcaagcagaggaactattctaaagctatcaaattctaccgcatggccttggaccaggtgccaagcgtgaataagcagatgcgcattaagattatgcaaaatattggtgtgacgtttatccaagcagggcaatactccgacgccataaactcctatgagcacattatgtccatggcacctaatcttaaagccggatataacctgacaatctgttattttgccatcggggaccgggaaaagatgaaaaaggcgttccagaaactcattacagtcccgctggaaatagatgaagacaagtacatttccccctccgacgaccctcacaccaacctcgtcactgaggcaattaaaaacgatcacttgcgccagatggaaagggagagaaaggcaatggcagaaaaatatattatgacgagcgctaagcttattgccccagtaattgagacaagttttgctgctggctacgactggtgcgttgaggttgtgaaagcctctcagtacgtggagcttgccaacgacttggaaatcaacaaagccgtgacttacctccgccaaaaagactacaatcaggctgtggagatcctgaaagtgctggaaaagaaagatagtagagtaaaaagtgcagccgctacaaatttgtccgctctttactacatggggaaagatttcgctcaggcaagctcgtatgccgatatcgccgtcaattccgacaggtacaatccagcggctttaacaaataaaggaaacacagtgtttgcaaacggggattacgagaaggcggcagagttctataaggaggccttgcggaatgattcctcctgcactgaggccctgtacaacatagggctcacctacgagaaattaaaccgtctggatgaggccctggactgcttcctcaagctccacgctattctgcgtaacagcgccgaagtgctgtaccagatcgcaaacatatatgagctgatggaaaaccctagtcaggccatcgagtggctgatgcaggtggtgtcagtgatcccgaccgatccccaggttctgtccaaattaggggaattatatgaccgggagggggataagtcacaggcttttcagtactattatgagtcttacagatacttcccctgcaacatagaagtcatcgaatggctgggggcttactacattgacactcagttctgggagaaagcaattcagtattttgagcgggcatcacttattcagcccacccaggtgaaatggcagctgatggtcgcctcctgttttcgaagaagcggcaactaccaaaaagccttagacacttacaaagacacacatcggaagtttccagaaaatgttgagtgcctccgtttcctggtcagactctgcaccgatctggggttgaaggatgctcaggaatacgctcgtaagctcaagaggttagagaagatgaaggagatacgcgagcagcgcatcaagtctgggagggacgggtccggtgggtctcgtggcaagcgcgaaggaagcgcctcaggcgactcaggccagaattactcagcatctagcaaaggagagcgtttatcagccaggctaagagcactcccgggtactaacgagccgtatgaatcttcaagcaacaaagagattgatgcaagctacgtagatcccctgggtccccagattgagaggcccaagacggcggctaaaaaacgaattgacgaggacgacttcgcagacgaagagctgggggatgatttattgccagagtag

SEQ ID NO: 28000 - DNA, 918 bp, synthetic construct
  source 1..918: mol_type = other DNA; note = Synthetic coding sequence
atggacttgtccggggttaagaaaaaaagtctcctcggagttaaggaaaataacaagaaaagctcaaccagagctccttcaccaaccaaacggaaagacaggtcggacgagaagagcaaagacagaagtaaagacaagggggcaaccaaagagagctccgaaaaagatagaggtagagacaagacaaggaagcggagatcagcttcaagcgggtcgtcctctacgaggagccgatcttccagcacctcaagcagcggatccagcaccagcacaggttcatccagtggaagctcatccagttccgcatcatcccgctctgggtcatcaagcaccagccgaagctcaagttcttcctcctcctcaggtagtccctctccatcaagacggaggcatgataaccgacgacgatctcggagtaaatccaagccccctaaaagagatgagaaagaacggaaacgcaggagcccatctcctaaacccacgaaagtgcatatcgggagactgaccagaaacgtcactaaagaccatataatggagatctttagcacttacgggaagatcaaaatgattgacatgcctgtggagaggatgcaccctcatttgtccaagggatatgcctatgtggagtttgagaacccagacgaagctgagaaagccctgaaacatatggacggcggtcagatcgacggccaagaaattacagctactgcggtgctcgcaccttggcctcgaccccctccgagacgcttcagcccccctcgacgaatgttgcctcctccacctatgtggcgccgaagtcctcctcgaatgcgcagaagatctcgttcgcctcggaggcgatccccagtccgccgaaggtcaagaagcccaggaaggcgaaggcaccgcagtagatcctcttcaaactcctccaggtag

SEQ ID NO: 28001 - DNA, 1119 bp, synthetic construct
  source 1..1119: mol_type = other DNA; note = Synthetic coding sequence
atggacgtcctgtcccccctcagctttatcaaggtgtcacacgtgcgaatgcagggcatactgcttctggtgttcgccaaataccagcacctaccctacatacagatactgagcactaaatctacccctaccgggctgtttggttattggggtaacaaaggaggggtcaacatctgtctaaaactgtacggatattatgtgtcaatcattaactgccacttgccccctcacatatcaaacaattatcagaggctggaacacttcgatcgaatccttgaaatgcagaactgcgaaggccgagacattcctaacattctggaccatgacctgattatatggttcggggatatgaactttcggattgaggattttgggttacacttcgtgagagagagtattaagaatcgatgctacgggggtctctgggaaaaggaccagttgagcatagcaaaaaaacatgatcccctgctgcgcgagttccaagagggaaggctcctatttcctcccacgtacaaattcgataggaattccaatgattacgacacatcagagaaaaagagaaagccagcttggaccgaccgcatcctgtggcgcctcaaacgacagccttgcgccggacctgacaccccgatcccgcctgcatcccattttagcctctcattgaggggctacagctctcacatgacctacgggatcagcgaccataaacctgtatccggaacattcgacctggaactgaagcccctggtgtctgctcccctgattgttctaatgccagaggacctgtggacagtagagaacgacatgatggtatcttactcaagtacgtccgactttccaagttcaccatgggattggataggcctgtacaaggttggactccgcgacgtgaacgattacgtgagttatgcatgggtgggggatagcaaagtctcatgtagcgacaacttgaatcaggtgtacattgacatctctaacatacccaccaccgaagacgaattcctgctgtgctattattcaaatagcctccggagcgttgtgggtatcagccgcccttttcagatcccccctggctcactcagggaggatcctctgggggaagcgcagccgcagatttag

SEQ ID NO: 28002 - DNA, 1692 bp, synthetic construct
  source 1..1692: mol_type = other DNA; note = Synthetic coding sequence
atgaggctggaccttgcttcgcttatgagcgctccaaagagtctgggttccgcttttaaatcctggcgactggacaaggcccctagtccgcagcacacattcccctccacaagcattcctggcatggcttttgcgctcctagctagtgtgccgcctgttttcggactgtacacgagtttctttcccgtcctcatttattctctcctgggcacaggcaggcacctctcgacaggcaccttcgccatattgtccctgatgacagggagtgccgtagaacgcttggtccccgaacccctagtgggcaacttgtcaggaattgagaaggagcagctggatgctcaaagagtaggcgtggcagctgcagtggctttcggtagcggagccctgatgttaggaatgtttgtgttacagttaggagtactaagcacgttcttgtcagagcctgtcgtgaaagcactgacatcaggcgctgcacttcatgtcctcctgagtcaactgccaagcctccttggacttagcctccccagacagatcggctgtttcagtctgttcaaaacactagcttccttgctgactgctctcccccgttcgagcccagcagaactgaccataagcgctttgtctctggccttattagtccccgtaaaggaactgaacgtcaggtttcgtgatcgcctgccgacacccatccccggagaagtagtgctggtcctgctcgcgagcgtgctatgttttacaagctctgtggacacacgctaccaagtccaaatcgtaggactgttgcctggtggcttcccccaacctttattgcctaacttggccgaactcccgcgaattctggctgacagtttgccaattgcactggtgtcgtttgccgtctctgcatcacttgcctctatacatgctgacaagtactcctacaccatcgattctaaccaggaatttctcgcccacggcgcatccaatctgatctcctctctgttcagctgttttccaaattcagcaaccttagcaacgacgaacctactggttgatgccggaggcaaaacccagctggcgggtttattcagctgcacggtcgtgctaagtgtgctgctttggttggggcctttcttctattatctgccaaaggcagtgctggcttgcatcaacatttcaagtatgaggcaggttttttgccagatgcaggaattacctcagctatggcatatatccagggtggattttcttcttcaggtaccgggactctgcatcttatcctatccaacacccctttacttcggtacccgtgggcagtttcggtgtaatctcgagtggcatctgggccttggcgagggggagaaggagacaagcaaacccgatggtcccatggtagcagtggccgagccagtgcgagtggtcgtgttggattttagtggcgtgacatttgcggatgcagctggggcacgcgaggtagtgcaagtgagagaaagattggcttcaaggtgccgggacgcgaggatcagacttttgctggctcagtgtaacgcacttgtccagggcacacttacaagagttggtctgctggaccgagttacccccgatcagctgttcgtgagcgtccaggatgccgcagcctacgccctaggctcgctgctccgaggctcatctactcggtcgggcagtcaagaggccctcgggtgcggaaaatag

SEQ ID NO: 28003 - DNA, 2892 bp, synthetic construct
  source 1..2892: mol_type = other DNA; note = Synthetic coding sequence
atggccgagcgtggcggagccggagggggtccaggaggcgcaggaggcggatcagggcagaggggcagcggagtagcacagagccctcaacagccgccaccacagcaacaacagcagcaaccccctcaacaaccaacgcctcctaaattggctcaggctacttctagttcttccagcacttcggccgcagctgctagctcatcctcctcctctacatccacaagtatggcggtcgcggtggcaagtggctcagctcccccagggggtcccggtcctggtcgcacaccagcacctgtgcaaatgaacctttacgcaacttgggaggtggataggtccagttctagctgcgtgcctaggttattttccctgaccctgaagaagctggtgatgctgaaggagatggataaagacttgaacagcgtggtcattgcggtgaaactgcaaggatctaagcggatccttagaagcaacgaaatcgtactccccgctagcggcctcgtggaaaccgagctacagcttactttctccttgcagtatcctcacttcttgaagcgcgatgctaacaagctgcaaattatgctgcagagaagaaaacgctataagaatcggaccattctcggatataagaccttagcagtgggtctgattaacatggctgaggtaatgcaacaccctaatgagggggctctcgttctggggttacacagtaatgtaaaagacgtttccgtgcctgtggctgagatcaagatttattccctcagttctcagcccatagatcatgagggcataaagagcaaactctcggaccgatctccagacattgacaactatagcgaggaggaagaggagtcattcagctccgaacaggaggggtcagatgatccactccatgggcaggatctcttttatgaggacgaagatctaagaaaggtgaagaaaactagacgtaagttaacctctacttccgctatcacgcggcagcccaatatcaaacagaaattcgtggccctgctcaaacgctttaaggtgagcgacgaagtcggattcggcctggaacatgtgtccagggagcaaattcgtgaggtggaagaggaccttgatgaactctatgatagtcttgagatgtacaacccatccgacagcggaccagagatggaagagacagaatccatcctgtccacccctaagcctaaattaaagccattcttcgaggggatgtctcagtcctccagccagactgaaatcggctcgctcaacagtaagggttccctggggaaagacaccacttccccaatggagttggcagctctcgaaaaaataaagagcacatggatcaagaaccaggacgactcactgacggaaacggacacacttgaaatcacagatcaggatatgtttggcgacgcctctacatcgctggttgtgcccgagaaagtaaaaactccaatgaaaagtagcaagacagatctgcaggggtctgccagcccgtccaaggtggagggcgtgcacaccccaagacagaaacgtagcacccccttaaaagagcgccagctgtcaaaacccctgtccgagcgcaccaactctagcgattctgagcgtagccccgatctaggacacagcactcagattccgagaaaagtagtctatgaccagctgaaccaaattcttgtcagcgacgccgcattaccggaaaatgtgatcctggtgaacaccactgattggcaggggcagtacgtcgcagagttattgcaggatcagcgaaagccagtggtgtgtacttgttcgacggtggaggtgcaggcggtcctgagcgccctccttacaaggatacagcgatattgcaactgcaactcaagtatgccaagacccgttaaggttgcagcagtcggcggacaatcatatttgagttccattttaaggttctttgtcaagtcacttgctaacaagacctccgactggctcggttacatgcggtttttaatcatacctctggggtcccacccagttgccaagtatctcgggagtgtagactctaagtacagttcttcctttctcgacagtggctggagggacttgttctccaggagcgaacctcctgtctccgagcagttagatgtcgcaggccgagttatgcaatacgtcaatggtgctgccacgacacaccagctgccggtcgcagaagcaatgctaacctgtcgacacaaatttcctgatgaagacagctatcagaagtttatcccttttattggggtggtcaaggtgggcctcgtcgaggactctccaagcaccgcaggtgatggcgacgattcccccgttgtgagcctgaccgtcccaagtactagcccaccatcgagctcagggcttagccgcgacgccacagccacacccccatcaagcccttccatgtcctctgccctagccatcgtggggtctcctaatagcccctacggagatgtgatcgggctgcaggtggactattggttgggccaccccggtgaaagacggcgagagggcgataaaagagatgcctcttcgaaaaacacactcaagagcgtgttcaggagtgtacaggtgagccgacttccacatagtggggaagcccagctctctgggacaatggctatgaccgttgtcaccaaagagaaaaataagaaagtccctacaatttttctgtctaagaagccccgtgagaaagaagtcgattcgaagtctcaggtgatcgaagggatctcgaggctgatttgcagcgctaagcaacaacagacaatgttaagggtgagcatcgacggggtggagtggagtgatatcaaattttttcagctagcggcacagtggcctactcacgtcaaacattttccagtgggcctattctcaggatctaaagccacctag

SEQ ID NO: 28004 - DNA, 546 bp, synthetic construct
  source 1..546: mol_type = other DNA; note = Synthetic coding sequence
atggaggaaattccagcgcaggaagcagcgggaagtccaagagtgcaattccagagcctggagacgcagagcgagtgcctgagtcccgagccacagtttgtgcaagacacagacatggagcagggcttaaccggcgctcccccagtgccacaggtgcctgccttgcccagagaaggctctcctggcgaccaggctgctgctctgctgacagccaggtaccaggaattcgttaccttcgaagatgtggccgttcaccttacccgggaggagtggggatacttggatccagtgcagagggacctgtatagggaagtgatgctggagaattatgggaacgtggtgtctctgggtattctcctgcgattacctacaactagaattcacagcgtgaactcttgcccagctctgagccacacacaggcgagtgcatttagtggggagaccctagccgtattaacagccggtatttccaaacggtggccaaaataccggttacccatcgacattgcccgaccatgcagcgaaaccccatttcctagactttag

SEQ ID NO: 28005 - DNA, 1410 bp, synthetic construct
  source 1..1410: mol_type = other DNA; note = Synthetic coding sequence
atggtgctcgagggtaaccccgaagtgggctcaccacgtaccagtgaccttcaacaccggggtaacaagggcagctgcgttttatcctcgcccggagaagacgcacagccaggcgaagaacccatcaagtacggagagctaatcgttctgggctgctgcgaggaaggcggagaagagaccgaggcccagcggggagaggtcacaggacccagggctcactcctgttataatggctgcctagcatccggggataagggcaggaggaggtctcgtttagctctgagcaggcggagccacgctaacggcgtgaagcccgatgtgatgcaccatatctccacgcctttagtcagcaaagcactctcaaataggggacaacacagtatcagctacacgctttcccggtcccattctgtgatcgtggagtatacacacgatagcgacacggatatgtttcagatcggcagatccacagagaatatgattgacttcgtagtcacagacaccagccccggaggaggcgcagctgaaggtccttctgcacaaagcaccatctctcggtatgcctgcaggatactctgtgatcggcgaccaccttacactgcgagaatatacgccgctggattcgatgcctcatctaacattttcctgggggaaagggcggctaagtggcgcacaccagacggtctgatggacggcctcacaacaaacggtgtcttggttatgcaccccgcagggggtttctcagaagattccgcacccggtgtgtggagggagatcagcgtgtgtggcaacgtatataccctgagggatagtaggtctgctcaacaaaggggaaaactggtggaaaacgaaagcaatgttcttcaggacggcagtttaatcgatctttgtggcgcaactctgctgtggagaactccagccggattattgagggcacccaccctcaagcagcttgaggcccagagacaagaagcaaatgccgcacgtccgcagtgtcccgtgggcctgagcacgctagctttcccttcaccagctcggggtaggactgcccctgacaaacagcaaccctgggtttatgtgcggtgtggtcacgtacatggctaccacggatgggggtgcaggcgcgagaggggcccacaggaaagggagtgtcctttgtgcaggcttgtggggccttacgtgcccttgtggcttggccaggaagcaggcctgtgtctagacccagggcctccctcacatgcctttgccccttgtggacatgtgtgctccgaaaaaacagcccgatactgggctcagacacctctcccccacggaacacatgcattccacgccgcttgtcccttctgcggtgcatggctcaccggagagcacgggtgtgtacggctcatctttcagggtcccctggactag

SEQ ID NO: 28006 - DNA, 3312 bp, synthetic construct
  source 1..3312: mol_type = other DNA; note = Synthetic coding sequence
atggccggagcctctgtgaaagtggcagtgcgcgttagacctttcaatgcaagagagacgtcgcaggatgctaagtgtgtcgtcagcatgcaaggcaatactacatctataataaatcccaaacagtcaaaggatgcgccaaaaagttttacctttgattacagctattggtctcatacctcaacagaggacccgcagttcgcctcccagcagcaggtgtatagggacatcggagaggagatgttgttgcacgcctttgaaggatataatgtctgcatctttgcttatggacaaaccggtgctggcaagagctacacgatgatgggacgacaggagccaggacagcaaggcatcgtgcctcagctctgcgaagacctgttctcccgggtgagcgaaaaccagtccgcacaactctcttatagcgtggaggtaagctacatggaaatttactgcgagagagtccgtgacctgcttaacccaaaatcccggggtagcctgcgcgtccgggagcatccgattcttggcccttacgtccaggacctctctaagttggccgttacatcctatgccgacatagccgatttgatggattgcgggaataaggcacggactgtggccgcaacgaacatgaacgagacatcttctcggtcccacgccgtgttcacaattgttttcacgcagcgttgccacgatcagctgaccggcctggacagcgaaaaggtgagtaagatatcgctcgtggacctcgcaggatctgaacgggctgatagctctggtgcacgcggaatgcggttgaaagagggtgctaacatcaataagagcttgacaaccctcggcaaagtcattagcgcactcgcggacatgcagtctaaaaaacgcaagtcagacttcatcccttacagagacagtgttctgacctggttgctgaaggagaacctgggaggcaacagcagaactgccatgatcgctgcattaagtcccgctgatattaattatgaagagactttgtccacactaaggtacgccgatcggacgaaacagatacgctgcaatgccatcatcaatgaagacccgaacgcacgattaatcagggagctccaggaagaggtagcgagactgcgggagctgctgatggcccaaggtcttagtgcctcggcattagagggcttgaaaactgaagaaggaagtgtcagaggcgctctccccgctgtgagctctcccccagccccagtgagcccatcttcaccaaccacccataatggcgaactggaaccctctttcagccccaatactgagagtcagatcgggcctgaagaggccatggaacggctacaggagaccgaaaagataattgctgaactgaatgaaacttgggaggaaaagctccgtaagaccgaagcactcaggatggagagggaagctttactggcagagatgggggttgccgttcgtgaagacggcggaacggtgggtgtgttttctcctaaaaaaacaccacacctggttaacttgaacgaagaccccctgatgtctgaatgcttactttatcacatcaaggacggcgtgacgagagtcggacaggttgacatggacatcaaactgaccggccaattcatacgggagcagcactgcttattcagatcgatccctcagccggatggcgaggtcgtggtaactctggagccgtgtgaaggagccgaaacatacgttaatggaaagctggttacggagcctctggtattgaaaagtggtaataggatcgtcatggggaaaaatcacgtattccggtttaatcatccagaacaggcaaggctggagcgggagagaggtgtgccgccaccaccgggacccccttccgagccggtggattggaacttcgcacagaaggaactgttagaacagcagggcatcgacatcaaactggagatggaaaaacggcttcaggacttggagaaccaatatagaaaagagaaagaagaagccgatctgctccttgagcagcaacgcctctatgcagattccgacagtggagacgactccgataagcgctcatgcgaggagagctggcggctcatttctagcctgcgcgaacagctgcctcctacaacggtacagacgatcgtcaaacgctgcggcctgcctagctcaggcaagcgcagagcgcctagacgggtgtatcagattccgcagagacggcgactacagggcaaggaccctaggtgggctacgatggctgacctgaaaatgcaagcggtgaaggaaatttgttatgaggtggccctggccgactttaggcacggtagagccgagattgaggccctggccgcacttaaaatgcgagaactgtgcagaacctatgggaagcctgacggaccaggagatgcctggcgggctgtcgcaagagatgtatgggatacggtgggcgaagaggaaggcggaggcgcaggatccggaggtggtagtgaggagggcgctcggggagctgaggttgaagacttacgggcacacatcgacaaattaaccggtatcctccaagaggtcaaacttcagaacagttctaaagaccgcgaattgcaggccttgagagaccggatgctgagaatggaacgtgtgatcccactcgcccaggatcacgaggatgaaaacgaggagggcggagaagtgccctgggctcctcctgagggcagcgaggcagccgaagaggctgctccttccgatcgtatgcccagcgctcgccctccctctccccctctttcttcctgggagcgggtctccagactgatggaggaggatcctgcctttaggcgcggtcggctgcggtggttaaaacaggaacagctgcgtcttcagggcctgcagggcagtggcggacgaggcggaggccttagaaggcccccagcccgttttgtccctccacatgactgcaagctgcgtttcccattcaagagcaacccccagcaccgtgagtcatggcctgggatgggtagtggggaggcccctactccattgcaaccccctgaagaagttactcctcacccggctacacccgctaggagaccgccaagtccccgacggtcccaccacccacgtaggaattctcttgatggtggcggaagatcccgcggagccggatccgcccagcctgaacctcagcattttcagcccaagaagcataactcatatcctcagcctcctcaaccctacccggctcagagaccacctgggccaaggtaccccccatataccactccacccaggatgcgcagacaacgaagcgcacccgacctgaaagaatcaggcgcagccgtgtag

SEQ ID NO: 28007 - DNA, 1260 bp, synthetic construct
  source 1..1260: mol_type = other DNA; note = Synthetic coding sequence
atggccgaacctgttggtaagcgcggacggtggagcggcggttcaggcgcaggacgaggcggacggggagggtggggtggcaggggaaggaggcccagagcccaacgctctccaagccggggaaccctcgatgtcgtttctgtggaccttgtgactgactctgatgaagaaatactggaggtcgcgacagctcgaggagcagctgatgaggtggaggttgagccaccagaacctccaggcccagtggccagccgtgacaactctaatagcgacagcgagggcgaagaccgtaggccggctggaccgcctcgggagcctgtcagacgtcgacgccgactggtgctggatccaggcgaagctcccctcgtccctgtttactcaggcaaggtaaagtcttccctgaggttgattcctgacgatctgtcgttgcttaagctctacccacccggagatgaagaagaagctgaattagccgacagtagcggcctctaccatgagggctccccatctccagggtctccatggaagaccaagctgcgcaccaaagacaaggaagagaagaaaaaaaccgaatttctggacttggacaactcaccactcagcccaccttcccccagaactaaatcccggacgcacacgagggcgcttaaaaagctgtccgaggtcaacaagcgtttgcaggacctccgcagctgtcttagtcccaagcctccacaaggccaggagcagcaaggtcaagaggatgaggtagtgctcgtagaaggccctaccctaccagagacaccaagactattccccttgaagattcgttgcagggccgatctggtaagattacctttgcggatgtcagaacccctgcaaagtgtcgtggaccatatggccacccatttgggcgtgagcccttctcggatcctcctactcttcggcgagaccgaactgagccctacagctaccccgagaaccttaaagctgggcgttgctgacattatcgactgtgtagtactgacatcatcacccgaagcaactgagaccagtcagcaattgcagctgagggtgcagggaaaggagaaacatcaaaccctcgaggtgtctctgagtcgtgattcaccattgaagacgttgatgagccattacgaggaagccatgggtctgtccgggaggaagctttccttttttttcgacggcacaaaactcagtgggagggagctccccgcagacctgggtatggaatccggggacctgattgaagtctggggttag

SEQ ID NO: 28008 - DNA, 384 bp, synthetic construct
  source 1..384: mol_type = other DNA; note = Synthetic coding sequence
atgcggccactcgatatagtggagcttgctgagccagaggaagtagaggtgttagaaccggaggaggacttcgagcagttcctcctgccagtcatcaacgagatgcgggaagacatcgcctcacttactagagaacacgggagagcatacctcaggaacagaagtaagttatgggaaatggacaacatgttgatccaaattaaaacccaggtggaagccagtgaggaaagcgctctgaatcatctgcagaaccccggagatgcagcagaaggacgggcagctaagagatgtgaaaaggcagaagaaaaagccaaggagatcgcaaaaatggcagagatgctggtggagctggtgcgtagaatcgagaagtctgaaagctcctag

SEQ ID NO: 28009 - DNA, 1263 bp, synthetic construct
  source 1..1263: mol_type = other DNA; note = Synthetic coding sequence
atgcccctgcaagtttctgattactcttggcagcaaaccaagacggctgtttttctctctttaccactcaagggcgtgtgcgttcgagatactgatgtattctgtactgaaaactacctcaaggtgaactttcccccattcctgttcgaagcctttctttacgctcctatagatgacgagtcttctaaagctaaaatcggcaatgatacaatcgtcttcactctgtataagaaagaggctgccatgtgggaaacgctgtcagttaccggtgtagataaggaaatgatgcaaaggattagggagaaaagcatcttgcaggcacaggagagagctaaggaggctacggaggccaaagccgctgccaagcgggaggatcagaaatacgctctttccgttatgatgaagatcgaggaggaagagcgtaagaaaattgaagacatgaaagagaacgagaggatcaaggcaaccaaggctcttgaagcctggaaagaatatcagagaaaggccgaggagcagaagaagattcagcgggaggaaaagctgtgtcagaaggaaaagcaaatcaaggaggagaggaagaagattaagtataagagtctcactcgaaatctggcctctaggaacttagcccctaagggcagaaattccgaaaatatattcacagaaaaactgaaagaggactccatcccagcccctcgctccgtgggatcaattaagatcaattttaccccacgagtgttcccaaccgcattacgtgaaagccaagtggccgaggaagaagagtggctgcacaaacaggcagaggctaggcgagccatgaataccgacattgctgagctgtgtgacctcaaagaggaggaaaaaaatcccgagtggctgaaagacaagggaaacaagctgttcgcgaccgaaaattacctggcagctatcaatgcctataacctcgcgattaggctgaataacaaaatgccactgctctaccttaacagggccgcatgccatctaaagcttaagaacttacacaaagccatagaggacagcagtaaggccctcgaattgctgatgcccccagtaactgataacgccaacgctcggatgaaggcacatgtgcgaaggggcacggccttctgccagttggagctctatgtcgaaggattacaggattacgaagccgcactgaagattgatccatcaaataagattgttcagattgatgctgagaaaatccgtaacgtgatccaggggacggaactgaagagttag

SEQ ID NO: 28010 - DNA, 348 bp, synthetic construct
  source 1..348: mol_type = other DNA; note = Synthetic coding sequence
atgagatacgttgccagctatctcctggctgcgctgggtggaaatagctcaccgtctgcaaaggacatcaagaaaatcctggacagcgttgggatcgaagccgatgatgataggctgaataaagttataagcgaactgaatggaaagaatatcgaggatgtaatcgcacaggggattgggaagttagccagcgtcccagctgggggagccgtggctgtgtctgctgcccctggctccgcagcacctgccgcaggctctgccccagccgctgcagaggagaagaaagacgagaaaaaagaggagtctgaagaaagcgatgacgatatgggattcggccttttcgactag

SEQ ID NO: 28011 - DNA, 1233 bp, synthetic construct
  source 1..1233: mol_type = other DNA; note = Synthetic coding sequence
ctcaacagggcctgcttctgtgtgacaggggtccccgaactcgaggtgatttgtgggcttcagcaggcagagtggcctcgcctcggccttagtcacctgggtgcagtcggcggaggatggggcggacttcccacgagtacatgggtgtctctacacacacaagaggtcgacctagcctcagaggtggcattagaagtagtgcggacagcggagcctggcgtgtggttggaggcacaggcacccgtcgccctggtagcccaaccagaaccactgcccgctaccgctggagtcaaacgcgagtctgtgggaatggaggtggccgtacttaccgacgatccactccctgtcgtcgaccaacagcaagtgctagcacggctgcaactgttagagcagcaagtagtgggaggagagcaggcaaagaataaagatttgaaggagaaacacaagcggcgtaagaggtacgccgacgaaagaagaaaacagctcgtagctgccctccagaactctgacgaggactccggagactgggtcttgctcaacgtctacgattccatccaggaggaggtcagagcgaagagtaaattactagagaagatgcagagaaagctgcgtgcagctgaggtggagataaaagatctccagtccgaattccagttggagaagatcgattacttagcaacgattcgcagacaagaaagggattctatgctcttacaacagctgctggaacaagtccagcctctaatcaggagggactgtaattactcaaatcttgaaaaaatcctgcgcgagagttgttgggatgaagataatggcttttggaaaattccccatcctgtcatcaccaaaacatccctgccagttgcggtaagcaccgggcctcagaataagccagcgagaaaaacttccgcggcagacaacggggagcccaatatggaagatgaccgataccgtctgatgctgtctaggtctaatagcgagaacatcgcaagcaactatttccgcagtaagcgggcaagtcaaatactttctacagacgcgcgaaagagcctaacacaccataacagcccacccggactctcttgtcccctgagcaataacagtgctatcccaccaacccaggcccctgaaatgccgcaacctcggccatttagattggaatccctcgacatacccttcacgaaagccaaaaggaaaaaaagcaagagcaatttcggatcagagccgctctag

SEQ ID NO: 28012 - DNA, 1353 bp, synthetic construct
  source 1..1353: mol_type = other DNA; note = Synthetic coding sequence
atgcgggagtgcatcagtattcacgtcggacaggcgggtgtgcagatcggaaacgcttgttgggagttgtactgtctggagcacgggatacaaccggatgggcaaatgccctccgataagacaatcggcggaggcgatgactcatttaatacctttttttcagagaccggagcaggcaagcacgttccacgagccgtgtttgtggacctggagcctacagtcgtcgatgaagtgcgcaccggcacctaccgccagctttttcaccccgagcagctgataaccggaaaggaagatgcagccaacaattatgcacggggacattataccatcggaaaggaaattgtcgatctggttttggataggatcagaaagcttgccgacctctgcacaggtctccaggggtttttgatcttccacagcttcggcggaggcacaggaagcggatttgcttcactgctgatggaacgtctgagcgttgactacggtaaaaagagcaaactagaattcgctatttaccctgccccacaggtctctacggccgtagtggagccatacaattccattttgactacccatacaacactggaacactctgactgtgcctttatggtagacaatgaagccatttacgatatttgccgaagaaacctggatatcgaaaggccaacctacaccaacctgaaccgccttatcggtcagattgtctcctccattactgcgtccttgcgcttcgacggtgctctgaacgtagatctgacggagtttcagaccaatctcgtgccatatcctaggattcacttcccactggccacgtacgcaccggtgatatctgcggaaaaggcctaccacgaacagctgagcgtcgccgagattaccaacgcttgtttcgagccggcaaatcagatggtgaagtgcgacccccgacacggcaagtatatggcgtgttgtatgctgtatcggggtgatgtcgtgcccaaagatgtgaatgccgcaatcgccacaattaagaccaagagaactatccaattcgtggactggtgtcctactggctttaaagtgggcatcaactaccaacccccaaccgtggtgcctggcggtgacctggctaaagtgcaaagagccgtctgcatgctgagcaatacaaccgccatcgccgaagcttgggcgagactggatcacaaatttgatctgatgtacgcaaagagggcctttgtccactggtacgtaggcgagggaatggaggagggcgagttctcagaagcacgtgaggatttagctgctcttgagaaagattatgaggaagttggcgtggacagtgttgaagccgaggcagaggagggcgaagagtactag

SEQ ID NO: 28013 - DNA, 471 bp, synthetic construct
  source 1..471: mol_type = other DNA; note = Synthetic coding sequence
atgtccggaggactgcttaaagccctgagatcagactcctacgtggagctgtctcaatatcgcgaccagcatttcaggggcgataatgaggagcaggagaagctcttaaagaagagttgtacactctacgtggggaatctgtccttctacacaacagaggaacagatttacgaactatttagcaaatccggtgacatcaagaagatcattatgggcctggacaagatgaaaaagaccgcctgcggcttttgttttgttgagtactactcacgcgcagatgccgagaatgccatgagatatatcaacggcacgagactggatgataggattatacgcacggactgggacgccggatttaaagagggaagacaatacggcagaggacgctcaggaggccaggttagggacgaatatcggcaggattatgatgcgggaagagggggttatgggaaactcgctcagaatcagtag

SEQ ID NO: 28014 - DNA, 996 bp, synthetic construct
  source 1..996: mol_type = other DNA; note = Synthetic coding sequence
atgggaggagaacaggaggaggaacgctttgacggaatgctgttagcaatggcacagcagcatgaaggcggagtgcaagagcttgtgaatacgtttttttcatttctgcgaaggaaaacagacttcttcataggaggcgaggaaggaatggccgaaaagctcatcacgcagacctttagccatcacaatcaactggcccagaagactcgacgcgaaaagcgggcaagacaggaggccgagcggagagagaaagccgagcgtgccgctcggctcgctaaagaggccaagtccgagacttccggcccacagatcaaggaactgacagatgaggaggcagagcgactgcagctggagatagatcagaaaaaggacgccgagaaccacgaggcccaactgaagaatggctcccttgactccccagggaaacaggataccgaggaagacgaggaagaagatgaaaaggataagggtaaactcaagcccaatcttggtaacggcgctgacctaccaaactacaggtggacacaaacacttagcgagcttgatcttgccgtccctttttgcgtgaactttaggctgaaaggaaaagacatggtggtggatatccagcgacgtcacttgcgtgtgggcctaaagggccagccagccattattgacggcgaactgtataacgaggtgaaggttgaggagtcgtcctggctaatcgaggatggcaaagtcgtgacagttcacctggagaaaataaataagatggagtggtggtcaagactcgtctcaagcgatcccgagattaacaccaagaaaattaacccggagaactccaaactgtccgatctggacagcgaaacccgctctatggtcgagaagatgatgtacgatcagcgacaaaaatccatgggacttcctacctctgacgaacagaaaaaacaggaaatccttaagaagtttatggatcagcaccctgaaatggacttctcaaaggctaagtttaactag

SEQ ID NO: 28015 - DNA, 1860 bp, synthetic construct
  source 1..1860: mol_type = other DNA; note = Synthetic coding sequence
atggccggaccaggggtgcccggtgccccagccgcaaggtggaagcgacacatcgtaagacagctgaggctgagggacaggacccagaaggccctattcctcgagctcgtcccggcttataatcatctcttagaaaaggctgaactgttggacaaattcagtaagaagctgcagcctgaaccaaatagcgtcaccccaacaactcaccaaggtccctgggaggaaagcgagttggacagcgatcaggtccccagcctcgttgctctgagggtgaagtggcaggaggaggaagaaggcttacgtttggtgtgcggtgagatggcctaccaggtggtagagaagggtgcagctcttggaactcttgagtcagaattgcagcaaaggcaaagccgcctggccgcactagaggcaagagtagcacagctccgggaagctcgcgcacagcaggcccagcaagtcgaggagtggcgcgctcagaatgccgtccagagagctgcctacgaggcccttagggctcatgtgggtttaagggaggccgcactgcgcaggctccaggaggaggcaagagacttgctggagaggcttgtgcagcgcaaagctcgcgcagccgctgagaggaacttgcgcaacgagcggagagaaagagctaagcaagcccgtgtatctcaggagctgaaaaaagctgctaagcgtactgtgagcatctcagagggtcccgatactctcggagacggcatgagggagagaagagagactttggcacttgccccagaacccgagccattagagaaggaggcatgtgaaaagtggaagcgacctttccgctccgctagcgccacatctctgacactgagtcactgcgttgacgtcgtgaaaggccttcttgattttaagaagaggcggggacactcaattggcggtgctccggaacagcggtaccaaattatacccgtgtgtgtggcagccagattgcctacaagggctcaagatgtcctcgacgcacacctctcagaagtcaatgctgtcagatttggcccaaactcgtctctgctggcaaccgggggtgccgacagactgattcatctctggaacgtagtggggtccaggctggaggctaaccagacacttgaaggcgcaggaggatccattacatctgtcgatttcgatccgagtggataccaagtgctcgccgcaacttataaccaggccgctcaactatggaaggtaggtgaggcccaatctaaggaaaccctgtcgggtcacaaagacaaggtgaccgccgcaaaatttaagttgacacggcatcaggcggtcaccgggagccgggatcgcacagtgaaggaatgggacctcggcagagcctactgcagcagaacaatcaatgtcctgtcctactgcaatgacgtcgtgtgcggtgaccacatcattatatctggccacaacgaccagaagatccggttttgggacagcagagggccacattgcacccaggtgatccctgtgcaaggaagagtcacttctctttctctgtcacacgaccaactgcacctactgagctgttctcgtgacaatacactgaaagtcattgatctgagagtaagcaacatcaggcaggtgttcagagccgacggattcaaatgtgggagcgactggaccaaagccgtgtttagtccagataggtcctacgccctggccggaagctgtgatggagctctgtatatttgggatgtggacactggcaaacttgagagccgcttgcagggacctcactgcgcggctgtcaatgctgttgcatggtgctatagtggttcccatatggtgtcagtggatcaagggagaaaggtcgtcctatggcagtag

SEQ ID NO: 28016 - DNA, 5048 bp, synthetic construct
  source 1..5048: mol_type = other DNA; note = Synthetic coding sequence
atggaaggcaatggtaccgaaaattcctgtagccgtactcgcggatggttgcagcaggacaacgacgcaaaaccctggctctggaagtttagcaactgtttcagcaggcccgagcagacactgcctcactccccacagaccaaagaatacatggaaaataagaaagtggccgtggagcttaaggatgtgccatctccactgcatgcgggttccaaactctttccagccgtgccactaccggatattcggtcactgcagcagcccaagattcaactgtcctctgtgcctaaggtgagttgctgtgcacactgccccaacgagccctctacctcacctatgcggttcggaggcggaggcggtggttcagggggtacaagttctctgattcatccaggggcactccttgactctcaaagtacaaggaccatcacgtgccaggtgggcagcggttttgcattccagtccgcatctagcctccaaaatgccagtgcgagaaataacttagctggaattgcttcagacttccccagtatgtgcctcgaatccaatctgagttcgtgcaaacatctcccttgctgcgggaagcttcacttccagagctgtcacggtaatgtgcataaattgcatcagttcccatctttgcaaggctgcacctccgccggttacttcccttgttcagatttcacatcaggagcccctggccatctcgaagagcacatcagtcagtctgagctgacaccccatctttgtacgaatagcttacacctgaatgtggtaccccctgtgtgtctgaagggtagcttgtactgtgaggactgtctgaataagcccgctcgtaacagcatcatcgatgcagcaaaagtgtggcctaatattcctccgccaaatacacagcctgccccattggcagtgccactttgtaatggttgcggcaccaaggggacgggcaaggaaacaaccctgctgttggccacatccctcggtaaagcagcaagcaagttcggctcacctgaggtagctgtagcgggacaggtgttggagaatcttcccccaataggtgtgttctgggacattgagaattgcagcgtcccaagcggtcgctccgccactgccgtggtgcaaaggatccgggagaaattcttcaaagggcatagggaagcagagtttatctgcgtgtgtgacatttccaaagagaataaagaggtcattcaggagttgaacaactgccaggtgacggtggcacacattaatgccacagcaaagaatgctgcagatgataaactacgccagtcactgaggcggtttgcaaatactcatacggcgcctgctaccgtggtgttggtctcaacggatgtcaacttcgccctggaactctccgacctgcggcacaggcatgggtttcacatcattctggtgcataaaaaccaagcctctgaagcgctgcttcatcatgcaaacgagttaattaggtttgaggaattcatctccgatctgccacccagactaccgctaaagatgccacaatgtcatactttgttgtacgtctataaccttccagcaaataaagatggaaagtcagtgagcaatcgattaagaagactgtctgacaattgcggcggtaaagtcctcagtattaccggctgctccgcgatcctccggtttatcaaccaggattccgcagagagagcccaaaagcgcatggagaatgaagacgtctttggcaacagaatcatcgtgtcattcacacccaagaatcgggagctgtgcgaaaccaagagctctaatgccatcgcggacaaggtaaagtcacccaaaaagttgaaaaatcctaaactttgcctgataaaagatgcgagcgagcagagctctagcgccaaggctacaccagggaaggggtcgcaggctaatagcgggtccgccacaaagaatactaatgttaagtctctccaggaactgtgtcggatggagagcaaaacaggacatcggaacagcgagcatcagcagggtcatttgaggctcgtcgtcccaacacacgggaattccagcgcagccgtgtccaccccaaaaaacagcggagtggccgagccagtttataaaacatcacagaaaaaagaaaatctgtccgccaggtcagtaacttccagcccggttgagaagaaggacaaggaagagacggtgttccaggtctcgtaccccagcgcattcagcaagctggttgcatcgaggcaagtgtccccattgctcgcatcacagagttggagttcacgttccatgtcccctaaccttttaaatcgcgcatccccattggccttcaacatcgctaatagctcctcggaggcagactgtcccgacccattcgccaacggcgcagatgtccaagtctcaaatatagattatcggctcagtagaaaggaactgcagcagctgcttcaagaggcattcgctcgccatggcaaggtgaagagcgtggagttgagccctcacaccgactaccagctcaaggccgtggtgcagatggagaatctccaggatgccatcggtgctgtgaactccctgcatcggtataaaataggctctaaaaaaatcctggtgtcattggcaaccggagctgcgtccaagtcattgtctctgctgtcagctgaaaccatgtcagttttacaagatgcaccggcatgctgtctaccactcttcaaatttactgacatctatgagaagaaatttggacataagctgaatgtgtccgatctgtacaagcttactgacacagtggcgatccgagaacaggggaacgggagactcgtatgtctgctgccgagcagccaggctagacagtcaccactcgggagctcgcagtcccacgatggaagttccaccaactgttcccctattatttttgaagaattggagtaccatgaacctgtgtgtagacagcattgtagcaacaaggacttctctgagcacgagttcgatcccgattcttacaagatccccttcgtgatcctgtctctaaaaacttttgctcctcaggtgcacagcctcctgcaaacacatgagggcaccgtgcctctgttagacccttggctgctgagatctaagtctcccgtcggaaacccccagctgattcagttttctagagaagtgattgatcttctaaagtcacagccatcctgcgttatcccgatctcccactttattcctagctatcaccaccactttgcgaaacaatgtcgtgttagcgactatgggtacagtaaactgattgaactcttggaggcggtgcctcacgttttacagattctgggtatgggtagtaaacgcttactgaccctgacccaccgcgctcaagtgaagcgctttacacaggaccttctgaagttgcttaagtctcaggcaagtaagcaggttattgtgagagaattctcccaggcataccactggtgcttcagcaaggactgggatgttactgagtatggtgtgtgcgaactcattgatatcgtgtccgaaatcccggacactaccatttgcctaagccagcaggataatgaaatggtgatttgcataccgaagcgggaacgcacacaggacgagatagaacggaccaagcagttttctaaggatgtggtggacctgctgcgtcaccagccccacttccggatgccctttaacaagttcatcccttcttatcatcaccactttgggcgacagtgcaagcttgcttactacggctttaccaagctgcttgagttgtttgaggctattccagatacattacaagtgttggaatgcggcgaagaaaagatcctaacccttacagaagtagagcggttcaaggcgctggcagcgcagtttgtgaagttgctacgctcccaaaaggacaactgcctgatgatgacggatctgctcaccgaatacgcaaagacattcgggtacactttccgacttcaggactacgacgtgagctcaatctcagcactgacccagaagctgtgtcatgttgtgaaagtagctgacatcgaatcaggcaggcagatccagctgatcaatagaaaatctctccgcagcctgactgcacagctgctggttctcctgatgagctgggaggggactacccatttaagcgtagaagaactgaaaaggcactacgaatctacccataataccccccttaacccttgcgaatacggatttatgaccctcactgaacttctgaagtccctcccttatctagtcgaggtgttcaccaacgacaagatggaggaatgtgtgaaattaacttccctgtacctttttgcaaagaacgttaggtccctgctgcatacctatcactatcagcagatttttttacacgagttctccatggcctacaccaagtatgtgggcgagacgctccagccgaaaacttacgggcacagctctgttgaagagctgctgggggctattcctcaggtggtgtggataaaggggcatgggcacaagcgaattgtggtgctgaaaaatgacatgaagtcccgcctctcgtccttaagcctgagccctgcaaatcacgaaaaccagccttccgagggcgaacggatcctggaggtgcccgagtcacacaccgcttccgaacttaagctgggtgcagacggctcagggccttcccacactgagcaggagctcctgcgcctcacggacgatagcccggtcgatctactgtgtgctcctgtgccttcctgcctgccttcaccgcaactcagacccgatcctgtcatcctgcagtccgccgacctgattcagttcgaagagcggccacaggagccatccgaaatcatgatcctgaaccaagaagagaagatggaaatccctatacccggaaagagcaagacactcacctccgactctagtagtagctgtatctccgccgctgtgcccgtacctccatgcccaagctcagaaacttcagaatctctattatccaaagaccccgtggagtcgcctgccaaaaaacagccgaaaaatagagtcaagctggctgccaatttctctctcgccccaataactaagctgta

SEQ ID NO: 28017 - DNA, 735 bp, synthetic construct
  source 1..735: mol_type = other DNA; note = Synthetic coding sequence
ggtggtggatatgacctcaatctgtttgcgtcgcccccagacagtaacttcgtgtgtagcgtgtgccacggtgtgcttaagcggcctgccaggctgccctgctctcacatcttttgtaagaagtgtattcttcggtggctcgctcgtcagaaaacctgtccctgttgcagaaaggaagtgaagcgcaaaaaggttgtgcatatgaataaactgaggaagacaatcggacggttggaggtcaagtgcaagaacgcagacgccggttgtattgttacctgtccattggcccaccggaaggggcaccaagactcatgcccattcgagctgactgcttgccccaacgaaggctgcacatctcaggtacctaggggaactttagccgagcaccgccaacactgccagcaaggttcccaacagcggtgcccactcggatgcggcgctaccttagatcctgcggaaagagctcgccacaactgttatagggaactacataatgcgtggtctgtccgtcaagaacgcagacgaccactgttgctgtcactgttgagaagggtacggtggctcgaccaggccacctcagtagtgaggagagaactagctgagctgtccaactttcttgaagaggacacagctctcctggagggagcgccacaagaagaagctgaggcggctcctgaagggaacgtgggtgctgaggtagtcggagagccacgggcaaatattccctgcaaatag

SEQ ID NO: 28018 - DNA, 705 bp, synthetic construct
  source 1..705: mol_type = other DNA; note = Synthetic coding sequence
ttgccttgcaagcgctgtagaccttccgtgtacagtctgtcatacatcaaacgaggtaagacaaggaactacttgtaccctatatggtccccgtacgcatattacttgtactgctacaaatataggattacactgagagagaagatgcttccccgttgttataagtctattacctacaaagaggaagaggatctgaccttgcagccacggtcttgcctccaatgcgagtccttggtcggcctgcaggagggcaaaagtaccgaacaggggaaccacgatcagcttaaggaactatacagcgcgggtaacttgaccgtcctagcaactgacccacttctgcaccaagatcctgttcagctggatttccactttcggctgacttcccagacgtctgcacattggcacggcctcctgtgtgatcgaagactgtttcttgatataccataccaagctttggatcaggggaatcgcgagtctcttacagccacgctggagtacgtcgaggagaagacaaatgtagattcggtctttgttaattttcagaatgatagaaatgacagaggggcactcctcagggctttttcctatatgggatttgaagtggtccggccagaccacccagctctccccccacttgataacgtgattttcatggtgtaccctctggagcgggacgttggacatctgccttcggaaccgccttag

SEQ ID NO: 28019 - DNA, 2403 bp, synthetic construct
  source 1..2403: mol_type = other DNA; note = Synthetic coding sequence
atggctgccgcagcgagcgttacaggaagggttacctgggccgcatcccctatgcgctcactcggcttgggacggaggctctccctgcccggacctcgcctcgatgctgtgacagccgctgtgaatcctagcctgtctgaccatgggaacggtctgggaaggggtacccggggatccgggtgttctggcggaagtctggtggctgattggggaggaggcgctgcagccgctgccgctgtggctctggctttggccccagctctgagtacgatgcgcaggggtagctctgagagcgaattggccgcacgctgggaggccgaggccgtcgcagcagctaaggccgctgcaaaagcagaagcagaagccacagccgaaaccgtggccgagcaggtacgggtggacgcaggcgctgcaggagagcccgaatgcaaggccggagaagagcagccaaaggttctggctccggctcccgcacagccgtcagcagctgaagaaggcaatactcaggtgttgcagcggcctccacctactctgcctccttctaagccaaagccagttcagggtttatgcccgcacgggaagccacgggacaagggaaggtcctgcaaacgttcaagtggacacgggtccggtgagaatggatcacagaggcccgtgactgtcgattcgagtaaagccagaacatcgcttgatgccctgaagatttcaattagacagctaaagtggaaagagttccccttcggacggcgactgccttgtgatatctactggcacggcgtctcttttcatgacaatgacatcttctccgggcaggtcaataaatttcctgggatgaccgaaatggtgagaaagattaccctctcgcgggcagtgagaaccatgcagaatctcttccctgaggagtacaatttctatccccgtagctggatcctgccggacgaattccagctgtttgtggcgcaggtacaaatggtcaaggacgacgaccctagctggaagcctaccttcatcgtcaaaccagatgggggatgtcagggtgacggcatttatcttattaaagatccaagcgacattagactggcgggaacactacagtcaagacccgctgtagttcaggaatatatatgcaaaccccttcttatagacaagctgaaatttgatattagattgtacgtgctgcttaagtcattggaccctctggagatttacatcgccaaagacgggttatcacgattttgcaccgagccctaccaggagccgacaccgaaaaaccttcaccgcatctttatgcacctgacgaattattcactgaacatccacagcgggaatttcatccattctgattcggcctctacgggatccaaacgaaccttcagctcaatactatgccgcctgtcttcaaagggcgtggacattaaaaaggtctggtccgacataattagtgttgtcattaaaaccgtgattgcattaacaccagaacttaaagtcttttatcaatccgacatccctactggcagaccaggacccacgtgtttccagatccttggcttcgatattttgctgatgaaaaacttgaaaccaattttactagaagttaatgccaaccccagcatgcgaatcgagcacgagcatgagttatcccccggtgtgttcgagaacgtaccttctctggtggatgaagaggtaaaggtggcagtcatcagagacacactgcgcctgatggacccactaaagaaaaagcgggagaatcagagccaacaactcgagaaacccttcgccggaaaagaagatgcactggatggggagctgacttccgcaccagattgcaacgccaatccagaggcccacttgccctctatctgtctaaaacaggtgttccctaagtacgcaaagcagtttaactacttgcggctcgtggaccgtatggcgaacctttttattcgatttctgggcatcaagggcaccatgaaactggggcctactgggtttcgcacctttatccgtagctgtaagctgtcatctagcagcctgagcatggccgctgtcgatatcctgtacattgacatcacacggagatggaactctatgactctggaccagcgagactccgggatgtgtctgcaggctttcgtggaggcgttcttcttcctcgcccaaaggaaattcaaaatgctgcccctgcacgagcaggtagcttctctgatcgacctgtgcgagtatcacctgtccctgttggatgaaaagagactcgtttgcggcaggggcgtccccagtggagggcgaccccctcaccgcggtcctccgcaggagccaagtccttccgcccaacccgctggcgacaacccccctcccagaacgtcttgtgctaacaaactgtcccacccaaggcacactctgagctag

SEQ ID NO: 28020 - DNA, 981 bp, synthetic construct
  source 1..981: mol_type = other DNA; note = Synthetic coding sequence
atgcgagaatgcatcagtattcacgtgggacaggctggagtgcagattggaaatgcttgttgggaactatattgtctggaacatggcatccagccggatggccaaatgccaagcgacaagactataggcggaggcgacgatagttttaacacattcttcagtgagactggagccggtaagcatgtaccgagagctgtcttcgtggacctggagcctaccgtgatcgatgaagtgaggacaggcacctacagacagctgttccaccctgagcagttgatcacgggaaaagaggatgccgctaataattacgccaggggccattacaccatagggaaagagataatcgatcttgttctggatagaatccgcaaactgaagagctttttcgcaacaaaaccacgcattcacttccccctggctacatatgccccagtgatcagcgctgagaaggcctatcatgagcagctcactgtcgctgagattactaatgcctgctttgagccggctaaccagatggttaaatgcgacccccgacacggcaaatacatggcatgctgcctgctatacaggggtgacgtggtgcctaaggacgtgaacgcggctatcgcgacaattaagaccaaaagaaccatacagtttgtcgactggtgtccaacaggcttcaaagtaggtattaactatcagccccctaccgtggtccccggaggtgatctggccaaggtccagcgggcagtgtgtatgctgagtaacaccactgcagtggctgaagcttgggctcgactagaccacaagttcgatctcatgcctctgagacgcattatgcgaagactcgagcagatcgtgctaacagaacggatgagagtgaaatctatcaatctttgtgcagtgctgttacattcctttgtgctcgagctttcctatttctgttccgtaaacgtttattgtcgcaaactgttaattaaattaaaattccccttttag

SEQ ID NO: 28021 - DNA, 1005 bp, synthetic construct
  source 1..1005: mol_type = other DNA; note = Synthetic coding sequence
atggtcggcagagaaaaagagctctcaattcactttgtcccgggtagttgtagacttgtagaggaagaagtgaatattccgaatcgcagagtactggtgaccggcgcaaccggactcttggggagggccgttcacaaggagttccaacagaataactggcacgctgtggggtgtggctttagaagagccaggcccaaattcgagcaagtaaaccttttggactcgaatgccgtccatcacataatccacgatttccagccccatgtgatagtccattgcgccgcagagaggcgccctgatgtcgttgaaaatcagcctgatgccgcatcccagcttaatgtcgacgcatccgggaacctggccaaggaggctgcggctgtgggcgcatttctgatttacatctctagcgattacgtcttcgacgggaccaaccccccataccgtgaggaggacatcccagcacctttaaacctgtacggcaagaccaagctagacggtgaaaaggctgttctggagaacaacctaggcgcagctgttctgcgcattcccatcttgtacggcgaggttgagaagctcgaggaaagcgctgtaactgtgatgttcgacaaagtgcaattttctaacaagagcgcaaatatggatcactggcagcagagattcccaacacacgtgaaagatgttgcaacagtgtgccgccagctagcggagaagaggatgctggatcctagtatcaaggggacattccattggtcagggaacgaacagatgacaaaatacgagatggcttgtgctatcgccgatgcatttaatttgcccagtagccatctccgtcctatcacagatagtcccgtcctcggggctcaacgaccgagaaacgctcaactggattgttccaagctcgagaccctcgggattggccagagaactccttttaggatcgggataaaggaaagcttgtggccgttcctgattgacaaaaggtggcgtcagacagtgtttcactag

SEQ ID NO: 28022 - DNA, 513 bp, synthetic construct
  source 1..513: mol_type = other DNA; note = Synthetic coding sequence
atggcaagtgaagcagaaaagactttccacagatttgcggctttcggagaaagctcctcatccggcacagaaatgaataacaaaaattttagtaagctgtgcaaagactgcggaataatggacgggaaaaccgtgacctcgaccgacgtggacatagtattttccaaggttaaggccaaaaatgctcggaccattacctttcagcagtttaaagaagccgtgaaagaactgggccagaagagattcaagggtaagtctcccgatgaagtccttgaaaacatctacggcctaatggaggggaaggatccagccactacaggagctacgaaagcaaccactgtcggcgcagtcgataggctgaccgataccagcaagtacacaggcacacacaaggagcgcttcgacgagagtgggaaaggaaaagggatagctggcagggaagaaatgaccgataataccggctatgtctcaggatacaagggatccggaacttatgataagaaaaccaagtag

SEQ ID NO: 28023 - DNA, 3582 bp, synthetic construct
  source 1..3582: mol_type = other DNA; note = Synthetic coding sequence
atgtggagagtgaaaaagctctccctgtcactctcgccgtcgcctcagacaggcaagccgtccatgaggacccccctgcgcgaactgaccttacaaccaggtgcactcactaatagcggaaaacgctctcctgcctgtagctcactgacacctagtctgtgcaaactcggccttcaggaaggctcaaacaactcaagccctgtggactttgtcaacaataaacggaccgaccttagctcagagcacttctcccactctagcaaatggctggaaacctgtcagcacgagtcagacgagcaacctcttgacccaattcctcagatctcaagcacacccaagacttccgaagaagctgtggatccactgggaaactatatggtgaagactattgtgctggtgcctagcccccttgggcaacagcaggacatgatcttcgaggccaggctggatactatggctgaaactaacagtatatcactgaacggtccactcaggacagatgatctcgtacgggaggaggtcgcaccatgtatgggagacagattttctgaggtcgctgccgtatcagaaaagcccattttccaggagtctccatctcacctcctcgaggaatcgccacccaatccatgttcagagcagttacactgctccaaggagtctttaagttcacgaactgaagccgtgcgcgaggacctagtgccctccgagagtaatgcattcctgccatcatccgtcttgtggcttagtccgagcaccgccctggctgccgattttagggtgaatcatgtcgatcccgaagaagagatcgtcgaacacggcgctatggaagaacgcgaaatgcgctttcccacgcacccaaaggaaagtgagaccgaagatcaggcactggtaagctctgtggaagatattctgtctacatgcctgacaccaaacttggtagagatggagtctcaagaagctcctgggcctgccgttgaggatgtcggcagaattctaggttcagacaccgagagctggatgagcccccttgcctggctggagaaaggagtgaacacctcagtgatgctggagaatctgagacagagcttgagcttgccgagtatgctaagagacgcagctattggcactaccccgttcagcacttgcagcgttggaacctggtttacgcctagcgcgcctcaggagaagtccactaatacctcccagaccgggttggtgggaactaagcactcaacttctgagaccgagcagctgctgtgcggcaggcctcccgatctcacagcgttgagccgtcatgatctagaagacaatctcttgtcttccctggttatcctcgaagtactgtcccgccagcttagagattggaaatcccagctggccgtaccccatccggaaacccaggactctagcacacagacggacaccagccacagtggcatcaccaataaattacagcacttaaaagagagccacgaaatgggccaggcgcttcagcaggcacgcaacgtgatgcagagctgggtcttaatcagcaaagagctcatttccttgctgcacctgagtctgctgcacctcgaggaggataagaccaccgtgtctcaggagtcacgtcgcgcagagactctggtttgttgttgctttgatctcctaaagaaactgagagccaagctccagagtttgaaagctgaacgggaagaagccagacaccgcgaagaaatggctctgcgcggaaaggacgcagccgaaattgtcctggaggctttctgtgctcatgcctcccagcggatctctcagttggagcaggacttagcatcaatgcgggagttcaggggccttctcaaggacgcacagacccagttggtgggtctgcatgccaaacaggaggagctggtccagcaaaccgtatccttgaccagtactttacagcaggactggagatctatgcagttagattatactacgtggactgctctcttgtcccgctctcggcagctaacggagaagttgacagtaaagtctcagcaggcactccaggaacgagacgtggcgattgaagagaagcaagaggtgtcacgggtgcttgaacaggtgagcgcacagttagaggaatgcaaaggccaaacagaacaattagaacttgagaacagtcgcctggcaaccgatttgcgcgctcagctgcagatcctcgcgaatatggactctcaactcaaagagttgcaatctcagcacactcactgtgcacaggatcttgccatgaaggatgaactattgtgtcagctgacccagtcaaacgaggagcaagctgcccagtggcagaaggaagaaatggcactcaagcatatgcaggccgaactccaacagcagcaggccgttctcgccaaggaagtgagagatctcaaggagaccctcgaattcgctgaccaggagaaccaggtggcacacctcgagctcgggcaggtggaatgccagctgaagaccactctggaggtgctgagagaaaggagcctgcagtgcgaaaacctcaaggacactgtagaaaacttgaccgccaaactagcctccacaatcgcagacaaccaggagcaggatctggagaagacccgacagtactcccagaaactgggcctgctaaccgagcagttgcagtccctcaccctttttctgcaaaccaaactcaaggagaaaaccgaacaagaaacactcctcttgagcacggcctgtcctccaactcaggaacatccactccctaatgataggaccttcctcggttcaatccttacagctgtggccgacgaagaaccagagtctacccctgtgccacttttgggcagcgacaaaagtgctttcactcgcgtcgcctccatggtgagcttacaaccggctgaaacacccggaatggaggagtcactggccgagatgtcaatcatgaccactgaactgcaatcactttgttcgctactgcaggaatccaaggaggaggcaatccgaacactgcagcggaagatctgtgaactccaggcgcgactgcaagctcaagaagagcagcaccaagaggttcaaaaggctaaagaagctgacattgagaagctcaaccaggccttgtgtcttcggtataaaaatgagaaagagttgcaagaggtgatccagcaacagaacgaaaaaattctagaacagattgataagtccggcgagttaatcagcctaagagaagaggtgacccacttgacccgcagcctccgccgagccgaaacagagactaaagtgttgcaggaggcgttggctggccagctagactcaaactgccagcccatggcaaccaattggatccaggagaaggtgtggttaagccaggaggtggacaagctgcgcgtaatgtttcttgaaatgaaaaacgaaaaagaaaagcttatgataaaattccagagccaccgaaatattctcgaggagaacctacggcgtagcgacaaggaactggagaaactggacgatatcgtgcagcacatctataagactctgctttccattcccgaggtggtgcgcggatgtaaagaattgcagggtttgctagagttcctctcctag

SEQ ID NO: 28024 - DNA, 9140 bp, synthetic construct
  source 1..9140: mol_type = other DNA; note = Synthetic coding sequence
atgcgcggacggcgaggcaggcctccaaaacaacctgcagcgcctgccgcagagagatgtgccccagctcctccaccccctcctcccccaccgaccagcggtcccattgggggactgcgctctcgacacagaggatcctccagagggagatgggcggctgcgcaagccgaggtggccccaaaaacccgcttatcttctccacgcggtggcagctcttccagacgtaagcctccccctccaccacctgctcccccttctaccagcgctccaggaagaggcggaagaggagggggaggcggtcgcaccgggggtggcggtgggggaggtcacctcgctaggaccacagccgctaggcgcgctgtcaacaaggtagtctacgatgaccacgagtctgaggaagaagaggaggaagaagatatggtctccgaggaagaagaagaggaggatggcgacgcagaggagacacaggatagcgaggacgatgaggaggatgagatggaggaggatgacgatgatagcgactatccggaagagatggaggatgacgatgacgatgcatcatattgcaccgagtctagctttaggagtcacagcacctattcctcaacacctggtaggcggaagccgcgagtgcaccgacccagatcacccatactagaagaaaaagacattcctccactcgagttcccgaagtcctccgaggacctgatggtgcccaacgaacacattatgaatgtgattgctatctacgaggtacttcgaaacttcggtacggtgctcaggctgtccccgttcagatttgaggacttttgtgcggcattagtgagccaagagcaatgtactttgatggcagagatgcacgtagtgctgttgaaggccgttctgagagaggaggatacaagcaataccacattcggcccagctgaccttaaagatagcgtaaacagtacattgtacttcatcgacggaatgacctggcctgaagtgctccgtgtatactgtgaatctgacaaggagtaccaccatgtgctgccatatcaggaggccgaggactatccctatggacccgtggaaaataaaattaaggttcttcagtttctggtcgaccagtttctgactaccaatatagcccgtgaggaactgatgagtgaaggggtgatccagtatgatgaccactgcagagtatgccacaaattgggggacttactatgctgtgaaacctgcagcgcagtctaccacctggagtgtgttaaaccgcctctcgaggaggtgcccgaggatgagtggcagtgtgaggtgtgcgtggcacataaagtgcccggagtaacagactgtgtcgctgaaattcagaagaacaagccatatattagacatgaacctattggctatgaccgttccaggcgcaagtactggttcctgaacagaaggttgattattgaggaggatacagagaatgagaatgagaaaaagatctggtattacagtactaaagtgcagctcgcagaactcattgactgcctggacaaagactactgggaagccgaactgtgcaagattcttgaagaaatgcgagaggaaattcaccgacacatggacatcaccgaggatttaacaaacaaagcaagggggtctaataaatcctttctggccgctgctaatgaggagatcctggagtctatcagggccaaaaagggagacattgataacgtgaaaagcccggaagagactgagaaagataagaatgagaccgagaatgatagcaaggatgctgaaaagaaccgggaagagtttgaagaccagtcccttgagaaggattccgatgataaaaccccagacgacgatcctgaacaggggaagtccgaggaacctacagaggtcggcgataaagggaacagtgtttccgcaaaccttggggacaatacaacaaatgctaccagcgaagagactagtccttccgaagggagatctccagtgggctgcctgagcgaaaccccagactcgagtaatatggcagagaagaaggttgcgtctgagctccctcaggatgtccccgaagaacccaataagacgtgcgagtcctcaaacacatcagctactacgacttcaattcaacccaatctggaaaattcaaactcttctagtgagttgaattccagtcagtcagagtcggctaaggcggcagacgaccctgagaacggagagcgggagagccatactccagtgtccattcaggaggagattgtcggcgattttaagagcgagaaatccaacggcgagctgagcgagagtcctggcgctggaaaaggcgcaagtggctccaccaggattatcactcgcctgcgaaacccggattcaaagctgtctcagctcaagtctcagcaggttgccgcagcagcccacgaagctaataaactgttcaaggaaggaaaggaagttttagtagtcaattcacagggagagataagcagattgagcaccaaaaaggaggttataatgaagggaaatattaataattattttaagcttggccaggaggggaagtaccgggtgtaccacaaccaatactccaccaattcattcgccctcaacaagcatcagcacagggaagaccacgataaacggagacatcttgctcataagttctgtctgacccccgctggggagttcaagtggaatggctctgtccacggtagtaaagtgctgacaatatctacattgagacttaccatcacacagttagagaacaacattccctcaagcttccttcatcctaactgggcaagccaccgggctaactggattaaggcagtgcagatgtgctctaagccacgcgaattcgccttggccctggctattttagagtgcgccgtcaaaccggtggtgatgctgccaatatggcgggagagccttgggcatacccgcctgcatagaatgaccagcatcgagagggaagagaaggaaaaggtgaagaagaaggagaagaaacaggaggaggaagagaccatgcagcaagccacttgggtgaaatataccttcccggtcaaacatcaggtgtggaagcagaaaggggaggagtatcgcgttaccggctacggcggatggtcttggatatctaaaacccacgtctatcgattcgtgccaaagcttcctggtaacactaatgtaaactatagaaaatctctggagggaaccaagaataacatggacgagaatatggacgaatccgacaagagaaagtgcagtcggtcccccaagaaaattaagatagaaccagactctgagaaggacgaagttaagggaagcgatgccgctaagggcgcagatcagaatgaaatggacatctcaaagataaccgaaaaaaaggatcaagatgtcaaagagctactggacagtgactccgacaaaccttgtaaggaggagcctatggaggtggacgatgatatgaaaactgaatcacatgtgaactgtcaggaatccagccaggtggacgtagttaatgtatctgagggcttccatctcagaactagctataagaaaaaaaccaagtccagtaagcttgacgggctgctggagagacgcatcaagcagttcacactcgaggagaagcagcggctcgaaaagatcaagttggagggcggaattaagggaatcggaaagaccagtacaaactcctcgaagaatttgagcgagtctcccgtgattaccaaggccaaggagggatgtcagtctgacagcatgaggcaggagcagtcacctaatgctaacaacgatcagcccgaggatctgattcaggggtgttccgaaagcgatagcagcgtcctccgaatgtcagatccctcccacaccacaaataagttgtaccccaaagaccgagtgcttgacgatgtgagcattaggagccctgaaaccaaatgtccaaaacagaattccatcgaaaatgatatcgaggaaaaagtgagcgacctggcctcccggggtcaagagcccagcaaaagcaaaactaaagggaatgatttctttatcgatgactccaaacttgcttctgcggacgacattggcaccctgatctgcaaaaacaagaaaccgctaatacaggaggaaagcgatacgatcgtgtcgtcttctaaatccgccctgcactcctcagtgcctaaatccacaaacgacagagatgcaacacccttgagtcgggcaatggactttgagggcaagcttgggtgtgattcagagtccaatagtactctcgaaaacagtagcgatacagtgagcattcaggactcatctgaggaggatatgatagttcaaaactctaatgaaagcatttctgagcagtttagaacacgggagcaggatgtcgaagtgttggaacctctaaagtgtgaattggtgtccggcgaatcaaccggaaactgtgaggaccggctgccggtgaagggaactgaggcaaacgggaagaagccttcccagcagaagaaacttgaggaacggcctgtgaacaaatgtagcgaccagatcaaattgaagaataccaccgacaagaagaacaacgaaaacagagaatccgaaaagaaaggccagcgcacatctacatttcagatcaacggcaaagataacaagccaaagatttatcttaagggagaatgcctgaaggagatatccgagtcgagagtcgtctccggtaatgttgaaccgaaggttaacaacatcaacaaaattattcctgaaaatgatattaagtctctcaccgtaaaagagagcgctatccggccattcatcaatggtgatgtcataatggaagattttaatgagcggaactcatccgagaccaagtcccatctgcttagttcctcggatgccgagggaaactaccgagattctctggaaaccctacccagtacgaaagagtctgattcaacccagacgaccactccatctgccagttgcccagagtccaatagtgtcaaccaagtggaagacatggaaatcgagacaagtgaggtgaagaaggttacctcctcccccatcacctccgaggaggagagtaacctttcaaacgactttatagatgaaaacgggttgccgatcaataaaaacgagaatgtgaatggcgaatccaaacggaaaactgtgattaccgaagtgacaactatgacatccaccgttgccacggagtcaaagacagtaattaaggtcgagaagggcgataaacagaccgtggtttcaagtaccgaaaactgcgccaagtcaactgttaccacaaccaccaccacagtgacaaagttgtctacacctagtactggagggtccgtcgatattatctcagtcaaggaacaatctaagaccgttgttactaccaccgtgactgatagcctgaccactactgggggtacccttgttacctcaatgaccgtgagtaaagagtattcaacccgcgataaagtcaaattgatgaagtttagtaggccaaaaaaaacacgatctggcactgcactgccaagttatcgcaagttcgtgactaagtccagtaaaaagtctatattcgtcctgccaaatgatgacctcaagaaattagctaggaaaggtggcatacgtgaagtcccttattttaattataacgcaaaacccgcactggacatttggccttatccctcccctaggcctacttttggcataacatggaggtaccgactccagactgtcaagagcctcgccggagtcagtttaatgctgagacttctttgggcatcccttcggtgggacgatatggccgctaaagctccgccaggcggaggtacaacccggaccgagactagtgagacggagatcaccactacagagattatcaaaagacgcgatgttggaccatacggcataaggtctgaatattgcataagaaagattatatgcccgatcggcgtccccgagacccccaaggagactcccaccccccagcgaaaaggcctgcgctcttcagctttgcggcctaagcggcctgagacccccaagcagacaggacccgtgattatcgagacctgggtggccgaagaggagttggagttgtgggagattcgagctttcgcagaaagagtagaaaaagaaaaggcgcaagcagtggagcagcaggccaagaagcggctcgagcagcaaaagcctaccgtcatcgctacttcgactactagccccaccagttctactacctctacgatctcccctgctcagaaggtcatggtggcacctattagcgggtccgtgacaacaggaaccaaaatggttctcactactaaagtggggtcaccagccacggttacctttcagcagaacaagaatttccaccagactttcgccacgtgggtcaagcagggacaatcgaattcaggtgtggtgcaagtgcagcagaaggtgctaggcatcatcccctccagcaccgggacctcacaacagactttcacctccttccagccacgaacagccacagtaaccatacgtccaaacacatcagggtcagggggaactacttctaattcacaagtgatcacagggccacagatcaggcctggtatgaccgtgattcggacaccactgcagcagtctacgctgggcaaagcaatcattagaaccccagtgatggtccaacccggagccccacaacaggtgatgacccaaatcatacgaggccagccagttagcacggccgtgtcggcccctaacacggtctcctctacacccggacagaagagcctcacctcggctactagtaccagcaacattcagtcctccgccagccagccccctaggccacaacagggccaggtcaagctcaccatggcacagctgacccaactcacccaaggacatgggggtaatcaggggctcactgtggttattcagggccagggtcagactacaggacaactgcagttgatcccccagggagtaacagtactccctggaccgggacagcagctgatgcaggctgctatgcccaacggtacggttcagaggtttctgtttacgcccctggccactaccgcgaccaccgcctcgaccacaacaacgacagtaagtacgactgcagccggtacaggcgaacaacggcagtcaaagctgagcccgcagatgcaagtacaccaagataaaacactaccacctgcgcaatccagtagcgtcggtccagcggaagctcaaccccagactgcacaacctagtgcacagccgcagccccagacacagcctcagtcgcccgctcaaccagaagtgcagacccaaccagaagtgcagactcagactaccgtgtcatcacatgtgccctcagaagcccagcctacccatgctcaaagcagcaagccccaagtggcagcccagtctcaaccccaatccaatgtgcaaggacagagtcccgtacgcgtgcagtctccctcacaaactcgaatcagacccagcacccccagccagctatctcctggacagcaaagccaagtgcaaacaacaactagccagcccattcctatccagccccacacgtcactgcagattccatcacaagggcagcctcagtctcagccccaggtacagtcctccacacaaaccttgtcaagcggtcagacccttaaccaggtcacagtctcttctccctcacgaccgcagcttcagattcaacagccccaacctcaggttattgccgtaccacagctccagcaacaagtccaggtgctcagtcagatacaatctcaagtggtggcccaaatacaggcccaacagtccggcgtaccacaacagatcaaactgcagctccctatccagatacagcagagttcggctgtgcagacgcaccagattcagaacgtcgtcaccgtacaggccgcatctgtgcaggagcagctgcagagagtacagcagttaagagatcaacagcagaagaagaagcagcaacagatcgagatcaagagagaacatacactgcaggcttccaatcaatctgagattatccagaagcaggttgtgatgaagcacaacgctgtcatagagcacttgaagcagaagaagagcatgacacccgctgaacgggaggagaaccagcgcatgattgtatgcaaccaggttatgaaatatattctggacaaaatcgacaaggaggagaaacaggccgcaaaaaagcggaagcgggaagagtccgttgagcagaagcgcagtaagcaaaacgcaacaaagctgtctgccctgttgttcaagcataaggagcagctgcgcgcagagatattgaaaaaacgggcattgctcgataaggaccttcagatcgaggtgcaggaagagttgaagagagatctcaaaataaagaaggaaaaagacctaatgcagctggcccaagctaccgccgtggcagccccatgccctcctgtgacaccggcacctccagctccgccagcccctcctccaagccccccaccgcctcccgcagtgcagcacaccggcctgttaagcaccccgacactcccggctgcaagccagaagcggaaaagagaagaagagaaggactcctcaagcaaaagtaaaaaaaaaaagatgatatctaccacatcaaaggaaaccaaaaaggatactaagttgtactgtatatgtaaaacaccttacgacgagagcaagttttatatcggttgcgatcgctgccagaattggtatcatggacggtgtgtcgggatcctgcagagcgaagcagagctaatagacgaatacgtttgtccgcaatgccagtcaactgaggacgccatgactgtgctgactccacttactgagaaggactatgaggggctgaagcgggtcctgcggtcactacaggcgcacaagatggcttggccgttcttagaaccagtggatccaaacgatgctcccgattattacggagtgatcaaagaacctatggatctcgctacaatggaggaaagggtgcaaaggaggtactacgaaaagctgactgaatttgtagcagacatgacaaagatctttgataattgtcggtactacaacccttctgactcccccttctatcaatgcgcagaggtcttggaaagctttttcgtccagaagttaaaagggtttaaagcttccagaagtcataacaataaactccagagcaccgcgtctta

SEQ ID NO: 28025 - DNA, 927 bp, synthetic construct
  source 1..927: mol_type = other DNA; note = Synthetic coding sequence
atggccagctctaatacagttctcatgagattagtggcttcagcctactccattgcccagaaggcaggcatgattgtgcgacgagtgatcgcggagggcgatctagggatcgtggaaaagacttgtgctacagacctccagactaaggctgaccgtctagctcagatgagcatttgctcgtccttggctcgtaagtttccaaagctgacaatcataggcgaggaggatttgccatcagaagaagtggaccaggaactgattgaggattcacagtgggaagaaatattgaagcagccgtgtccctcgcaatacagtgcaataaaagaggaagatctcgtggtttgggtggatccactcgacggcacaaaggaatacaccgaaggtcttttggacaatgtcactgtgttgatcggaatagcttacgaaggaaaagccatagccggtgtgatcaaccagccctattacaactacgaggcagggcctgacgctgttctcgggaggactatctggggggtgcttggattaggggcttttggatttcagttgaaagaggtgccagcaggaaagcatataattacgaccaccagaagtcatagcaataagctcgtgacagattgtgttgccgcaatgaaccctgacgctgttcttcgagtaggtggggcaggcaataaaattattcagctcatcgaaggcaaagcctctgcttacgtgttcgctagccctggctgtaaaaagtgggacacctgtgcccctgaggtgattctgcatgcggtcgggggaaagctgaccgacatccatgggaatgtccttcagtaccacaaagacgtcaagcacatgaacagtgcgggtgttctggcaaccttaagaaactatgactactatgcgtctcgggtccctgaatccataaagaatgccctggtgccatag

SEQ ID NO: 28026 - DNA, 1212 bp, synthetic construct
  source 1..1212: mol_type = other DNA; note = Synthetic coding sequence
atgtcaggttccgatggaggcctggaggaggagcctgagctttccatcacactgactctcagaatgcttatgcacggcaaagaagtgggttctattatcggcaagaaaggcgagaccgtcaagcgtatccgcgagcagagtagtgcgcgaatcactatttccgagggctcttgccctgagcggattactacaatcacgggcagtaccgctgcagtgttccatgctgtttcaatgatcgctttcaaactggacgaagatctctgcgccgctccagcaaacggaggcaatgtctctcgcccacctgtgacactgaggctggtgattcccgctagtcaatgtgggtctctcattggaaaagccggaaccaagatcaaggagattagagaaacaactggcgctcaagtgcaggtcgccggagaccttcttcccaactctactgagcgagccgtgactgtttcaggagtacccgacgctatcatcctctgcgtgagacagatctgcgccgtgattcttgaaagccccccaaagggcgctacaatcccctaccacccttctctgagccttgggactgtccttctgtcagccaatcagggattttctgtgcagggtcagtacggtgccgttaccccagcggaagtcaccaagctgcagcagctgtcatcacacgctgtccctttcgctacgccgagcgttgtgccgggactggatcctggaacgcagacgagctctcaggaattcctcgtccccaacgacctgatcggctgtgtaatcggtcgccagggctcaaaaatatctgagatcagacagatgagtggcgcacacataaagataggaaatcaggcagagggagcaggagagcgccatgtgaccattacagggtcccctgtcagcatcgccctggcccaatatctgattaccgcgtgcctggaaactgctaaatctacctcaggtggtacccccagctctgctcccgctgatctgcccgctcctttttcacctcctctgacagcactcccaactgcccctcccggattactgggcactccgtatgccatcagtctgtccaacttcattggactaaagcccatgccctttttagcacttccacccgcttcccccggacccccaccgggactcgccgcttatactgctaaaatggctgccgctaatggcagcaaaaaggctgaacgacagaagttctcaccttactag

SEQ ID NO: 28027 - DNA, 654 bp, synthetic construct
  source 1..654: mol_type = other DNA; note = Synthetic coding sequence
atgtcttcaaaggtaagccgagacacactttacgaggcagttcgcgaagtgctgcacggaaatcagcgcaagcggcgtaaattcctggagaccgtggagctgcaaatctctctgaagaactacgatccccaaaaagataaacggttctcaggaaccgtgaggttgaaatccacccccaggcctaagttttcggtctgtgtcttgggagaccagcagcactgcgacgaagctaaagcggtcgatattccccacatggatattgaggcgctgaaaaaactcaataagaacaagaaacttgttaagaaactagccaaaaaatacgacgcctttctcgcctcagagtccctgattaagcagattcccagaatacttgggccaggccttaataaggcaggaaagtttcctagccttctcactcataacgaaaatatggtggcaaaagtggacgaggtgaagagtactatcaagttccagatgaagaaggtactctgtctggctgtcgccgtggggcacgtgaaaatgacagacgatgagcttgtgtataacatccatctcgccgtcaacttcctcgtcagtctgctcaagaagaattggcagaacgtgcgtgctctatatattaaaagcactatgggtaagccacagcgcctttattag

SEQ ID NO: 28028 - DNA, 3159 bp, synthetic construct
  source 1..3159: mol_type = other DNA; note = Synthetic coding sequence
atggagggaagcgaaccggtggccgcacaccagggtgaagaggctagctgttcaagctggggcaccggcagcaccaataaaaaccttcctataatgagtacagcctcggttgagattgatgacgccttgtatagtcggcagagatacgtgctcggtgatacagcaatgcagaagatggccaaatctcatgtttttctgtctggcatggggggactcggcctggagattgccaagaatctagtgctcgctggaatcaaggcggtgacaattcacgatactgagaagtgccaagcttgggacctgggtaccaatttttttctcagtgaagacgatgtggtgaacaagaggaatcgggcagaggcggttctgaagcacattgctgaacttaatccgtatgttcacgtcacatcttccagcgttccctttaatgagaccacggacctgagctttctagataagtaccagtgtgtcgtcctgactgaaatgaaattacctttgcagaagaagatcaacgacttctgccggtcgcaatgtccccctatcaaattcatcagcgctgacgttcacggaatttggtctcgcctcttttgcgactttggagatgaattcgaggttctggacactaccggcgaggagcctaaagagatctttatttccaatattacccaggccaaccctggtatcgtgacctgtctggaaaatcaccctcataagttggaaacagggcagtttttgacttttcgagaaatcaacggaatgacaggcctgaatggctcaattcagcagatcaccgtgattagccccttcagcttctcgattggggacactactgaactcgagccctacctgcacgggggtattgccgtccaggttaagacaccaaaaaccgtgtttttcgagtcactcgaaaggcaactgaagcacccaaagtgccttattgtcgacttcagtaatccagaggccccattagagatacacacagcaatgttggcgcttgatcagttccaggagaagtatagtagaaagccaaacgttggttgtcagcaggactcagaagagctcctgaagttggccacaagcatttctgaaaccctagaggagaaacccgacgttaacgcggatatagtccactggctcagctggacagcccaggggtttctcagccctctcgccgctgctgtggggggtgtggcctcccaggaagtgctgaaagccgttacagggaagttttctcctctgtgccagtggctgtacctcgaagccgcagacatcgtcgagagcctagggaagccggagtgtgaagagtttttgcccagaggggaccgttacgacgctttgcgagcctgcatcggtgacaccctttgccagaaactgcagaatctgaatatatttctcgtgggctgcggcgctattggttgcgaaatgctcaaaaactttgcactcctgggcgttgggacatccaaagaaaaggggatgataaccgtcactgatcctgatcttattgaaaagtcaaacctcaatcgacagtttttgtttaggccacatcatatccagaaacctaagtcctatactgctgcggatgctaccctgaaaataaatagtcagataaaaatcgacgctcatttaaacaaggtctgccccactacagagacaatatataacgacgagttttacacgaagcaggacgtgatcattacggcgttggataacgtagaggccagaagatatgtcgatagcaggtgtttagcaaacctgcgccctctgcttgactctggcacgatgggcaccaagggccatacggaggtaattgtgccccacctcaccgaatcgtacaacagccatagggatcccccagaggaggaaatacctttctgtaccctgaaatcctttcctgctgcgattgagcatactatccagtgggcacgtgacaagtttgaaagctcattctcacacaaaccctctctattcaacaagttttggcagacttactctagcgccgaggaagttcttcagaagattcagtctggacatagtcttgagggctgttttcaggttatcaagctcctgtcccgcagacctagaaactggtcgcagtgcgtggaattggccaggctgaagttcgaaaaatacttcaatcacaaagccctgcagctgctacactgttttccgctcgatatcaggctcaaggacggttctctgttctggcagtcaccaaaaagaccaccctctcctattaagttcgacttgaacgagccgttgcacttgagctttctccagaacgcagcgaagttatatgccacagtttattgcattccttttgcagaagaggacttgagcgcggacgcattactaaacattcttagtgaagtgaaaatccaggagttcaagcctagcaacaaagtagtgcagaccgacgaaacagctagaaagccggatcatgtcccaatctcctctgaagacgagcggaacgccatttttcagttagaaaaagcaatcctgagcaacgaagccaccaagtccgatctgcaaatggccgtactgtcattcgaaaaggacgacgatcacaatggacacattgatttcataacagctgcatctaacctgcgcgcaaagatgtacagcattgagcctgccgaccgatttaagactaagagaatcgcaggcaagatcatccccgctatcgccaccactactgctaccgtatctggattggtcgcactcgaaatgattaaggtgactggcggatacccatttgaagcttacaagaattgctttctgaacctcgccattcccatagtggtttttacagaaaccaccgaggtgcgcaaaacaaaaattcgcaatgggatttcatttaccatctgggaccggtggaccgtgcatggcaaagaagattttacactgttggacttcattaatgccgtgaaggagaaatatgggatcgaaccaacaatggtagtgcaaggcgtgaaaatgctttacgtacccgtaatgccaggccatgccaaaagattgaagctcactatgcacaagttagtgaagcccacgaccgagaagaagtacgttgacctcacagtctctttcgctccagacattgacggtgatgaagatttgcccggaccaccggtccggtattacttttctcatgataccgactag

SEQ ID NO: 28029 - DNA, 1134 bp, synthetic construct
  source 1..1134: mol_type = other DNA; note = Synthetic coding sequence
atgttaagactagtgcccaccggagcacgcgctattgttgacatgagctacgccagacattttcttgatttccagggctcagcgatccctcaggcaatgcaaaagttggttgtcacacgactgtctccgaattttagggaggcagtgaccctgtcacgagattgtccagtccctttacctggtgatggagacctgcttgtgcggaatcggtttgtgggcgtgaatgccagcgatattaattactcagccggaaggtacgacccgtcagtgaaaccgccattcgatattggatttgagggtattggtgaggttgttgccctggggctgtcagcatctgcacgctacacagtggggcaggctgtcgcatacatggcacccggtagctttgctgaatataccgtggttcctgccagcatagccacaccggtcccctccgtgaaaccagaatacctgacacttctcgtgagtggaacaactgcttacatatccttgaaggaactgggcggactgtccgagggcaagaaggtgctggtgacagccgcagccggtggtactggccagtttgcgatgcaactgtccaagaaggctaagtgccacgtgattggtacctgctcatctgatgagaaatcggccttcctcaaatccctcggatgcgatcgccctatcaattacaagactgagccagtgggaacggtcttgaagcaggaatacccagaaggcgtagacgtggtctacgagagtgtcggcggtgcgatgtttgatctcgctgttgacgctctggcaacgaagggacggcttatagttatcggattcataagcgggtaccagactccaacagggttaagccccgtgaaagctggaactctgcccgcaaagctgctgaaaaaaagtgcttcggtgcagggtttttttctgaatcattatctgagcaagtaccaggcggcaatgagtcacctgctggagatgtgcgtgtccggagatctcgtgtgcgaagtcgatttaggcgatcttagtcccgaagggagatttacagggctggaaagtatctttagagctgtgaattacatgtacatgggaaaaaataccgggaagattgttgtcgagctgccacatagcgtaaattcaaaactatag

SEQ ID NO: 28030 - DNA, 2538 bp, synthetic construct
  source 1..2538: mol_type = other DNA; note = Synthetic coding sequence
atgtccaattctcggccacgctctcgccgtgacgctgggggaggagctggagcggctgggagagatgagctggtgtctaggagtctgcagtctgccgagcattgtcttggagtgcaggattttggcactgcctacgctcactacctgctggtgctatctctcgctccagaattgaaacatgacgtgaaggaaacgtttcagtacactctgtttcgctgggcagaggaactggatgcattaagcaggatccaagatctgctcgggtgctatgaacaggccttggagctgtttcctgacgacgaggtgatctgtaacagtatgggagaacacctgttccgtatggggttccgagatgaagcggctggatattttcacaaagccgtaaaacttaatcctgacttttccgacgccaaagaaaacttctacagagtggctaactggttagtggagagatggcacttcatcatgttaaacgacaccaaacgcaacacaatctacaatgccgcaatccagaaggcagtgtgtttaggatctaaaagtgtcctggacattggagccggtacaggaattttgagtatgttcgcaaagaaggctggcgcacactctgtgtacgcctgtgagctgagtaaaaccatgtatgagctcgcctgcgatgtggtggcagcgaataagatggaggcaggaatcaaactcctgcatacaaaaagcctggacatcgaaattcccaagcacataccagagcgagtatcccttgtcgttaccgaaacagtggacgccggactgtttggggaaggcattgtggagtctctcatccacgcctgggaacacttgttgctacagccaaagactaagggggaatcggcaaactgtgaaaagtacggtaaggtgataccagcatctgccgtgattttcggaatggcggtcgagtgcgccgagattcggcgtcaccatagggtgggcattaaagatatagcgggtatacatctgcccactaacgtgaaattccagtcccctgcttatagcagcgtggatacagaagagactatcgaaccctatacaaccgagaaaatgagcagggtcccaggcggatatctggcattaaccgagtgcttcgaaatcatgactgtggattttaataacctgcaagagctgaaaagcctcgcaaccaaaaagccggataaaatcggaatccctgtaattaaggagggcatactggatgctataatggtctggttcgtgcttcaattggacgatgagcacagtctttctactagtccttcagaggagacatgttgggaacaggccgtgtatcccgtgcaggacctggcggactactggataaagcccggagaccacgttatgatggaggtttcctgccaggattgctatctacgtattcagtctatcagcgtgttaggtctggaatgtgagatggacgtggccaaaagctttacccagaacaaagacctgttgagtttaggtaatgaggcggagctctgcagcgccctggctaatctacagacttctaaacctgatgcggtggaacagacttgcattctcgaatctacagagattgcactactcaataatatcccctaccacgaagggttcaagatggcgatgtctaaagttttgtcaagtctgacaccagagaaactgtatcaaaccatggatacacactgtcaaaacgaaatgtccagcggtaccgggcagtctaacacagttcagaacattctggagcctttctacgtcctggatgtttcagagggtttttcagtccttccagtgattgccggaacactgggacaggttaaaccgtacagctcagtggagaaggatcaacatagaattgccctagacctgatttctgaggccaaccacttccctaaagagaccctggagttttggctccggcacgtggaagacgagagcgctatgctccagcgacccaagtccgacaagctttggtccatcatcatcctcgatgtgatagagccctcaggcctgattcagcaggaaatcatggagaaagccgcaatttctcgatgtctactccagagtggagggaagattttcccacaatatgtcctaatgttcgggctgctcgtggaatcccagaccttgctggaagagaacgcagttcaaggaacagagcgcacccttggcctgaacatcgccccttttattaaccagttccaagtcccaattagggtgtttctggatctctctagcctgccttgtattccccttagcaaacccgtggaactgttgagattggatctcatgacgccatacctaaacacgagtaatcgagaggttaaagtgtacgtctgtaagtcaggccgtctaaccgcaatacccttctggtaccacatgtacctagacgaagagattcggctggatacatcgtcagaggcttcccactggaaacaggctgcagttgtgctcgacaatcctatccaggtggaaatgggcgaggaattagttctgtccattcagcatcataaaagcaacgtgtctatcactgttaaacagtag

SEQ ID NO: 28031 - DNA, 756 bp, synthetic construct
  source 1..756: mol_type = other DNA; note = Synthetic coding sequence
atggctgacctaacatctgtgttgacatctgtgatgttctctcctagctcaaaaatgttcattggtggtctttcctggcagacatcccccgactctcttagggattatttttctaaattcggggagatccgcgagtgcatggtgatgcgggacccaacaactaaaaggagtcggggtttcggattcgtcactttcgcagatccagcctccgtcgataaagtccttggtcagcctcatcacgaactggattctaaaaccattgaccccaaggtggcattccctcggagagcgcagccaaagatggttaccagaacaaagaagatatttgtgggcggactgagtgccaatactgtggtggaggatgtaaagcagtatttcgaacagttcggcaaggtcgaggacgctatgctgatgttcgacaagaccaccaatagacaccgaggctttggatttgtcacattcgagaatgaagatgtggtagaaaaggtatgcgagatccactttcatgagataaataacaaaatggttgaatgtaaaaaggcacaacccaaggaagtgatgtttcctcctgggacaagaggaagggccagaggcctcccttatactatggacgccttcatgttgggaatgggcatgctcggatatccgaattttgtggccacttatggcagggggtaccccggattcgctccgagctatggctaccaattcccagattatctgccagtgagccaggacattatttttataaactag

SEQ ID NO: 28032 - DNA, 510 bp, synthetic construct
  source 1..510: mol_type = other DNA; note = Synthetic coding sequence
atggctccgaagcgggcaaaaaggaggaccgtggagggtggttctagcagcgtattctccatgtttgaccagactcagatccaggagtttaaagaggccttcaccgtcatcgaccagaacagggacgggatcatcgataaagaggacctgagggatacgtttgccgctatgggtagacttaatgtgaaaaacgaggagttggacgcgatgatgaaagaggccagtggacctataaactttaccgtctttctgaccatgtttggagagaagcttaagggagccgatccagaagatgttataactggagcctttaaggtcctggaccctgaagggaaaggcacgataaagaagaaatttctggaggagctgctcacaacccagtgtgatcgtttttcccaagaggagattaagaacatgtgggccgcttttccaccggatgtaggaggcaatgttgactacaagaatatctgttatgtaattacacatggagatgccaaagatcaagaatag

SEQ ID NO: 28033 - DNA, 546 bp, synthetic construct
  source 1..546: mol_type = other DNA; note = Synthetic coding sequence
atggcaacagaacccgaagctgccgagccagtggttcccagcttagtggaccggtactttaccaggtggtacaagccagacgttaaagggaagttttgcgaggaccattgcattctgcagcactccaaccgcatatgtgttatcacattggcggaatcacatcccgttctgcagtctggaaaaaccattaagtccataagctaccagatttcgactaattgctcacgtcttcagaataaagtttcaggcaagtttaaaaggggcgctcagttcttgacagagctcgcacccttgtgtaagatttattgctcggacggcgaggaatacacagtgtcctcctgtgtgagggggagacttatggaagttaatgaaaatattcttcacaaaccttctattctccaggagaaaccgagtactgaaggctacatagctgtcgtcctccctaagttcgaggagagcaagtcaatcaccgaagggttgcttactcagaagcagtacgaggaagtgatggtcaagagaataaacgctacaactgccaccagctag

SEQ ID NO: 28034 - DNA, 2154 bp, synthetic construct
  source 1..2154: mol_type = other DNA; note = Synthetic coding sequence
atggagctcagatgcgggggattactgttctcctccaggtttgattccggcaacctggcacacgtggagaaagttgagtcccttagctcagatggggaaggggtaggtggcggtgcaagtgctctgacttcagggatcgcatctagccctgactacgagtttaatgtctggacacgaccagattgtgcggagactgagttcgaaaacggaaacaggtcctggttctatttttccgtcaggggcggaatgcccggtaagttaattaaaatcaatattatgaacatgaataagcagtcaaagctgtactcccagggcatggcgcctttcgtgcgcactcttcccacaaggccaagatgggaaaggattcgagatcgtccaacctttgagatgaccgagacccagttcgtgctgtcattcgtacaccggtttgtggaaggacgcggagctaccacattttttgccttttgctaccccttctcttatagtgactgccaggaattgctgaatcagctagaccagcggttcccagaaaatcatcccactcatagttctcctcttgatactatttactaccatagggagctgttgtgctatagcctcgatggtctccgcgtggacttgttgactataacgagctgtcacggcctacgtgaagatagggaacccaggctggagcagctatttccagatacctcaacacctcggccttttagatttgccggaaagagaatctttttcctgagttcacgagtccatccaggggagaccccctcttccttcgttttcaatggctttcttgatttcatacttaggcctgatgacccacgagctcagacattaaggcgacttttcgtcttcaaacttattcccatgctgaatccagatggtgtggtcaggggccactaccgcacagacagtagaggagtaaatctgaaccgccagtatctgaagccagacgccgtgctgcaccccgcaatatatggggcaaaggccgtgcttctttatcaccacgtccattcccggttaaactctcagtcttcgtcagaacaccagccttccagctgcttgccgcctgacgctcccgtgtcagatctggagaaggctaataatctgcagaatgaagcacagtgtgggcatagcgctgacaggcataatgccgaagcctggaagcaaactgagccagctgagcaaaaacttaactccgtgtggattatgccccagcagtctgccggattggaggagtccgctccggacaccattccacccaaggagagcggggtcgcgtattatgtagacttgcacggtcacgcgagcaagcgaggatgctttatgtacggcaactcgttctccgatgaatcaactcaggtagagaatatgctctatccaaagctgatcagccttaattccgcgcatttcgacttccaaggctgtaatttctcagaaaagaatatgtatgccagagacaggcgagatggccaaagcaaggagggttccggaagggtagcaatatataaagcaagcggaatcattcactcctacaccctcgaatgcaattataacacaggaagatccgtcaacagtatcccagccgcttgtcacgataacggccgtgcctccccccctcccccacctgcctttccaagccgatacacagtggagctgttcgaacaggtgggcagagctatggcgattgcagcactggatatggccgagtgtaacccttggccccgaatcgtgctcagcgaacacagcagcctgacaaatcttcgtgcctggatgctgaaacatgtgagaaattctagaggcctgagttccactctgaacgttggagtgaacaagaagcgcggattgagaacaccgccaaagtcacataacggtttaccagtgagctgttccgagaacacgctgagcagagcccgaagcttttcaacaggcacctccgctggtggttcttcttctagtcagcagaattctccccaaatgaaaaatagtccaagcttcccttttcacgggtcccggcctgcagggctgccaggtctgggtagttcaacacagaaagtgacacacagagtgctagggcctgtacggggaaaaccagtgtgggaacccctgcagcacgtttttggttgtttgggccactgttggggaaaatag

SEQ ID NO: 28035 - DNA, 678 bp, synthetic construct
  source 1..678: mol_type = other DNA; note = Synthetic coding sequence
atggttatggccgaggggacagccgtgttgcgtcggaatcggcctgggaccaaggcacaagacttctataattggccggatgaatcatttgacgagatggacagtactctagctgttcagcagtatattcagcagaatatccgggcagattgctctaatattgacaagatcttagagcccccagagggacaggacgagggcgtctggaaatacgaacacctccggcagttctgcctcgaactaaacggacttgcagttaagctgcagagcgagtgtcaccccgatacttgcactcagatgactgcaactgagcagtggatcttcctgtgtgcagcacacaaaacacctaaagaatgccccgcaatagattacaccagacataccttggacggcgcagcttgtctgttaaactctaacaagtattttccgtccagggtgtcgataaaggagagctccgtagccaaactcggctccgtttgtcggagaatataccgaattttttcacacgcatacttccatcaccgccaaattttcgacgagtatgagaacgaaaccttcctctgccacaggttcaccaagtttgtgatgaagtataatctaatgagcaaagacaatctgattgttcctattttagaggaggaggttcagaacagtgtctctggggaatccgaggcttag

SEQ ID NO: 28036 - DNA, 1173 bp, synthetic construct
  source 1..1173: mol_type = other DNA; note = Synthetic coding sequence
atggccgcacagaaggacctttgggacgccatcgtcattggagctggtattcagggctgcttcacagcttatcacctggctaaacataggaaacgtatcctcctcttggaacagtttttccttccccatagtagaggcagcagtcacggacagagccggatcatccggaaagcgtacctggaagacttttatacaaggatgatgcacgagtgttatcagatttgggcccagttggaacatgaagcaggtacccagctgcatagacagaccgggctcctccttctgggcatgaaagagaatcaagagctgaagacaatccaggccaatctttcccgccagagagttgagcaccagtgtctgtcatcagaggaactgaagcagagattcccaaacatcagactgccacgaggagaggtgggactgctagacaacagcgggggtgtgatctatgcttacaaagcattacgtgccctccaagatgccatccgccagctgggtggcattgttagagacggtgaaaaagtcgtagaaattaaccccggactactcgtcacagtgaagacaacgagcaggtcctaccaggccaaatctctcgtgatcaccgccggtccatggactaaccagctattgcgaccgctggggatagaaatgccactccagacacttcgcatcaatgtgtgctactggcgggagatggtcccgggaagttacggggtgagccaggcttttccctgcttcctgtggcttggcctgtgcccgcaccacatctacggcctgcctaccggcgaataccctggtctgatgaaggtgtcctaccatcatggcaaccatgctgatcccgaagagcgggattgccctacagcacggactgacattggagacgttcagatcctgagctccttcgtgagagaccacctccctgatctgaaaccagaacctgccgtaatcgagtcatgcatgtatacgaatacgcccgatgagcaattcatactcgaccgccatcctaaatacgataacatagtcatcggagccggatttagtggtcatggcttcaagttagcaccagtggttgggaaaatcctttatgagctgagcatgaaactgacgccatcttacgacctcgctcccttccggataagtagattcccgtcactcgggaaggctcacctgtag

SEQ ID NO: 28037 - DNA, 135 bp, synthetic construct
  source 1..135: mol_type = other DNA; note = Synthetic coding sequence
atgtccgacaaaccggatatggcggaaatcgagaaatttgacaaatccaagcttaaaaagaccgagatgcaagagaaaaatcctctcccctctaaagaaactatcgagcaagaaaagcaggccagcgaatcttag

SEQ ID NO: 28038 - DNA, 1323 bp, synthetic construct
  source 1..1323: mol_type = other DNA; note = Synthetic coding sequence
atgcctatcccgcctcctccgcctcccccaccaggccctccacctccgccaactttccatcaggctaacactgagcaacctaagttgagtagagatgagcagagaggcaggggggcattgctgcaggacatttgtaaagggacaaaactgaagaaagtgaccaacatcaacgataggtccgctccaattctggagaaaccgaagggatcgtctggcggatacggatccgggggtgcggctctgcagcccaagggcggtctgttccagggcggagtgctgaagctcaggcccgtgggcgctaaagatggtagtgagaatctcgccggaaagcctgcattacagataccctcatcccgggcagccgctcctcgcccaccagttagtgctgccagcgggaggccacaggatgatacagactcttcccgcgctagtctgcccgagttaccccgaatgcagagaccgtccctccccgatctgtctcggcctaataccaccagtagtaccggcatgaaacattcttcaagtgcccctccaccccctccacctggacggagagccaatgctccacccactcctttgccaatgcatagtagtaaggccccagcttataatcgtgaaaagccgttgcctcccacgcccggacagagacttcatccagggagggagggacctccagcccctcctcctgtaaaaccacctcccagccccgtcaacattcgtactggaccttcagggcagtcactcgccccacctcctccgccttaccgccagccacccggagtgcctaatggaccatcctctccaaccaatgagtccgccccagagttaccacagcgtcacaactccttacaccgaaagaccccgggtcctgtgcgcggtctggctccgccacccccaacctccgcctctccatctctattgagcaataggccccctccacctgccagagatccaccatctagaggtgctgccccacctccgccacctcccgtcattcggaatggcgctcgagacgcgccacctccccctcccccttatagaatgcacgggagtgagccgccatcccgagggaagccacctccacccccatccagaacgccagccggacctcctccgccaccccctcctccacttagaaatgggcaccgcgactcaattactaccgtccgatcttttctcgacgacttcgagtctaaatactcgtttcatccagtggaggattttccagcccctgaggaatacaaacatttccagcgcatatacccgtcaaagacaaatagagcggctaggggcgcaccccctttgcctcctatactccgatag

SEQ ID NO: 28039 - DNA, 2703 bp, synthetic construct
  source 1..2703: mol_type = other DNA; note = Synthetic coding sequence
atgaactatccgggtcggggtagccctcgctccccagagcacaatggtagggggggaggcggtggagcctgggagctcggcagcgacgcgcgtcccgcatttggaggaggcgtatgctgctttgagcacttacccggtggcgatccagacgatggtgacgtgcctctggcactcctgcggggagagcccggactccatctcgcaccgggaaccgatgaccacaaccaccatcttgctctggacccatgtctgtccgacgagaattacgatttttctagtgccgaaagcggctcatccctgaggtattactctgagggtgagtcagggggaggaggcagcagtttgtccctccatcccccacaacagcctccactggtgcctactaattcaggtggagggggagctacaggtgggagtcccggagagaggaagcgcacccgattgggtggtcccgctgcgaggcacaggtacgaagttgttaccgagctcggccctgaggaggtgcggtggttttacaaggaggataaaaagacctggaagccttttattggctacgattctctccggatagaattggcgtttaggacacttctgcagacaaccggtgctagaccccagggaggagatagagatggcgaccatgtttgctcacctacaggtccagcatcctcaagcggggaagacgacgacgaagatagagcatgtggattctgtcagagtactacaggtcacgaacctgaaatggtcgagttggtgaacattgaaccagtctgtgtcaggggtgggctgtatgaagttgatgttactcagggcgaatgctatccagtttattggaatcaggctgacaaaatccccgtcatgagagggcagtggtttatcgatggaacttggcaaccactggaagaggaagagtctaatttgattgagcaagagcacctcaattgctttagagggcagcagatgcaggaaaattttgacatagaggttagtaagagtatcgacggcaaagatgccgtgcactcattcaagttatcacggaatcatgtggactggcattccgtcgacgaggtttacctttattcagatgcaacgaccagcaagatcgcgcgtactgtcacacagaagctcggattttctaaagcatctagctccggaacgaggctgcaccgtggatatgtggaagaagcgacactggaggacaaaccaagtcaaaccactcatattgtattcgtggtacacggtattgggcagaaaatggaccagggtaggatcattaagaatacagcaatgatgcgtgaagccgctcgaaagattgaggaacgtcacttttcaaaccacgccacgcacgtagagttcctacccgttgaatggcgaagcaaactgactctggacggggacacagttgactcaattacccccgataaagttcgcggtctgagggacatgttgaactccagtgccatggatataatgtattacacatccccgttgtatagagatgaactggtcaaggggttgcagcaggaactaaatcgcctgtacagccttttctgttctcggaacccagacttcgaagagaaaggaggcaaggtatctattgtctctcacagcctgggatgtgtgatcacttatgacataatgaccgggtggaacccagtgcgcctgtacgaacaactcctgcaaaaagaggaagagctgccagatgaacggtggatgagctacgaggagcgacacctcctcgacgaactgtacataacaaagaggagactaaaggaaatcgaggaacgtttgcacggtctgaaggcgtcaagtatgacccagacacccgcactgaagttcaaagtcgagaatttcttttgtatggggtctcctttagccgtgttccttgctctgcgaggcatacgaccaggaaacaccggctcccaggaccatattctgcccagagaaatatgtaaccgcctgcttaacatatttcatcccacggatccagttgcatacaggctggaaccactgatactcaagcattatagcaacatctcacccgtacaaattcactggtataatacctctaatccacttccgtatgagcacatgaaaccatcttttctgaatccagccaaagagcccacgtctgtgagcgagaatgagggcatcagcacgatcccatcgcccgtaacctccccagtcttatccagacggcattacggcgaatctatcaccaacataggaaaggcgtctatcctgggagcagcctccattgggaaaggcctagggggtatgctcttttccaggtttggaagaagctcaactacccagagctctgagacctcgaaagattctatggaagacgagaagaagccagttgcatccccttctgccacaactgtgggcacacaaacgctgccccactcctcttctggtttcttagacagtgcatattttagactccaggagtccttcttcaatctgccgcagctgctctttcccgaaaacgtgatgcagaacaaagacaacgctctggttgagctggaccataggatagatttcgaattaagggagggactcgtcgagagtcgctactggtccgcagtaacctcccatacagcatattggtcttccctcgatgtcgccttattcttgttaaccttcatgtataagcacgagcatgatgacgacgctaaacctaacctggatccgatttag

SEQ ID NO: 28040 - DNA, 1278 bp, synthetic construct
  source 1..1278: mol_type = other DNA; note = Synthetic coding sequence
atgaataagatgccagccggagaacaggagtgcgaatataacaaggagggcaaatattacagcaaaggtgttaaactagtccgaaaaaagaagaaaatacctgggtacaggtggggggacatcaagattaacatcatcggtgagaaggatgaccttcccatccatttctgtgataaatgcgaccttcccattaagatatatggcaggataattccatgcaagcatgctttctgctaccattgcgctaatctgtacgacaaggtaggctacaaggtatgtcctagatgtcgctatcctgttttgcgcatcgaggctcacaagagagggtccgtgttcatgtgtagtatcgtccagcagtgtaagcggacttatcttagtcagaaatccctgcaggctcatattaagagaaggcataagcgagcaagaaagcaggtgactagtgccagtctggagaaagtacgtccacacatcgccccaccacagacagaaatatcagacatcccaaaacgactccaggatcgcgaccatctatcatatatccccccagagcaacacaccatggtcagccttccttctgtccagcacatgctgcaagaacaacataatcagccccataaagatattcaggccccaccccctgaactgtctctgagtcttcctttcccaatacagtgggaaactgtgtcgatcttcacacgcaagcatggcaacctgacggttgatcacatccagaacaatagtgattccggggctaaaaaacctaccccacccgattattacccagagtgccagtctcaacctgccgttagcagcccccaccacataattccccagaagcagcattacgcccctcctccgtccccatcaagccctgttaaccaccagatgccatacccaccccaagacgtcgtgacaccgaactcagtgcgctcacaggtgcccgcacttaccaccacttacgacccctcctccggttacattatcgtcaaagtgccacccgacatgaattcgcctcctttacgggcaccgcaatctcagaatggcaaccccagtgcatccgagttcgcttctcaccactataacctcaacattcttccacagtttacagaaaatcaggaaactttaagtcctcaattcacgcagaccgacgcaatggatcaccggagatggcccgcttggaaaaggctgtcaccatgcccacccacaagatcacccccaccttccaccctccatggcaggtctcaccattcccatcagcggagacatagacggtactag

SEQ ID NO: 28041 - DNA, 1926 bp, synthetic construct
  source 1..1926: mol_type = other DNA; note = Synthetic coding sequence
atgggtccgcctttaaagttgtttaaaaaccaaaagtatcaggaacttaaacaagagtgcatcaaggacagtagacttttttgtgaccccacttttttgcctgagaatgatagtctattttacaataggcttttgccagggaaggtggtatggaagagaccccaagacatctgcgatgatcctcaccttatcgtcgggaatatctccaatcatcagcttactcaggggaggctcggccataaaccaatggtgtccgccttctcctgtctcgcagtccaggagagtcattggactaaaactataccaaatcataaggagcaggagtgggaccctcagaaaaccgagaaatacgctggcatctttcactttcgattctggcactttggggaatggaccgaagtcgtgatagatgatctgttaccaactattaatggtgatcttgtgtttagtttttcgacaagcatgaatgagttttggaatgcgttgctcgaaaaagcatacgccaagctgctgggatgttacgaggcactcgatggactaacgatcactgatatcatcgtcgattttacagggactctcgctgaaaccgtggatatgcagaaggggagatatactgaacttgtcgaggagaagtacaaactcttcggggagttgtataagacgttcacgaaggggggtctcatatgctgctcaatcgaatccccgaatcaggaagaacaggaggtggaaacagactgggggctattaaagggccacacatataccatgacagatatccgcaaaatcaggctgggcgaacggctcgtggaggtattctccgcagaaaaggtttacatggtgcggttacgcaaccccctgggcagacaggagtggtccgggccttggtccgagattagtgaagaatggcagcagctgacagcatccgatcggaaaaatctgggcttggtgatgagtgacgatggagaattttggatgtccttagaggacttctgcaggaattttcacaaattgaacgtctgccgtaatgtcaacaatcctatctttgggaggaaggagcttgaatctgtgttaggctgctggacagttgacgatgatcctttgatgaatcggtctgggggttgctataataatagggacaccttcctccaaaatccccaatacatcttcactgtccccgaagatggccacaaagttatcatgtccctccagcagaaagatctgagaacctaccggagaatgggcagacccgataattacattatcggatttgagctttttaaggtcgagatgaatagaaagttccgcctacaccacctgtatattcaagagcgggctgggacgtccacctatattgacactcgaaccgtctttctaagcaagtatctgaaaaaggggaactacgtgctagtgccaacaatgtttcaacacgggcgtacctccgagttcctgctccggatcttctccgaggtccctgtgcaacttagagagctgacactggacatgccaaagatgtcatgctggaatctcgccagaggatatcccaaagttgttacccagatcaccgtccacagcgctgaggatttggagaaaaaatacgctaatgagactgtgaacccatacctggtaattaagtgtgggaaggaggaggtcaggtcacctgtgcagaagaatacggtacatgctatctttgacactcaggccattttttaccgtaggactacggacattccaattattgtccaggtgtggaatagccggaagttctgcgatcagttcctggggcaagttactctcgatgccgatccttccgactgtagggacctgaaaagcctttatttaaggaagaaaggtggcccaactgccaaggtaaagcagggccacatttcgttcaaagtgatttctagtgacgacctgacagaactgtag

SEQ ID NO: 28042 - DNA, 3180 bp, synthetic construct
  source 1..3180: mol_type = other DNA; note = Synthetic coding sequence
atggctgcagtggctgggtctggcgcagccgctgccccttcatcattgttgctagttgtcgggtccgaattcggctccccaggcttactcacttacgtcctcgaggagctcgagaggggaatcaggagttgggacgtggatcctggggtgtgtaacttagacgagcagcttaaggtcttcgtgtcacgacacagcgcaaccttctcatcaattgtgaaagggcagaggagcctacaccatcgcggagataacttagagacattggttttgttaaaccctagtgataagtccctgtacgatgagctccgcaatctgctcctggacccagcttcccacaagcttctggtgctggccggaccctgcttggaggaaacgggagagctgctgctgcagacagggggattctcgcctcatcacttcctgcaggtgctcaaagatagggagatccgcgacatcctggctacaactccccctcctgtacagccaccgatcctcacgataacctgtccaacattcggcgattgggctcagctggcgcctgcagtgccaggattgcagggtgctcttcgactgcagctccggctcaaccctcctgctcagctaccaaatagtgaaggcttgtgtgagttcctggagtacgtggcagagtctctggagcccccttctccctttgagctgctcgagccccctacctctggtggcttcctcaggttaggtcgaccttgctgctacatcttcccagggggattgggagatgctgccttcttcgctgttaatgggttcactgtgctggtaaacgggggaagcaacccaaaaagtagcttctggaaattagtcagacaccttgatcgggtcgatgccgtgcttgtcacacatccaggagctgattctttgcccggtctaaattccctgctgagacgcaaactggctgaaagatctgaggtagcagctgggggtgggtcttgggacgaccgattgcgacgattgattagccccaatctgggcgtcgtgtttttcaacgcctgcgaagctgcgtctaggttggctcggggagaagacgaggccgagttggcactcagcctgttagcacagctgggcattactccactccccctgtcgagaggtccagtaccagcaaagcctactgttctatttgaaaaaatgggcgtgggcagactggatatgtacgtgctgcaccccccatccgctggggctgagagaacactagcctccgtatgcgcgctactggtgtggcaccctgcaggacctggagaaaaagtggtgagagtcctgtttcccggatgcactccccctgcctgcctgttggacggactcgtcaggctccaacaccttagatttctgagagaacctgtggtgacgcctcaggatctggaaggcccaggccgagcggagtcaaaggagagcgtcggtagccgcgactcctctaaacgcgaggggcttctggccacacaccccagaccgggtcaagaacgccctggcgtggcgagaaaagagcctgcacgcgctgaggctccccgtaagacagagaaggaagcaaaaacaccccgtgagctcaaaaaagaccccaaacccagcgtaagtaggacacagccacgagaggttaggcgggctgcctccagcgttccaaacctaaagaaaaccaatgcgcaggctgcccctaaacccaggaaggccccatctaccagccattccggatttccacccgtggccaatgggccaaggagccctccctcactgcgatgcggcgaagcgtcaccaccgagcgcggcatgtggctctccagcttcccagctggtcgccaccccttcgttggaattaggtcccattcctgctggcgaggagaaagctctggagctcccactcgccgcttcctcaatccccaggccccgaaccccctcaccagaaagccacaggtcgcccgctgaaggcagtgaaaggcttagtctgtccccattacggggtggcgaagctgggccagacgcaagccccacggtgaccacacctaccgtgaccacaccatcactgcccgctgaggtcggttctccccattctactgaggtcgatgagagcttatctgtatctttcgagcaggtgctaccaccatctgcgcctacctcagaggcagggctctccctgccattgcgaggacctcgtgcacggaggagcgcctctcctcatgacgtcgacctgtgtcttgttagtccgtgtgagtttgaacaccggaaagcagtgcctatggcccctgcgcctgccagccccggtagctcaaatgactctagcgcgagatctcaagaaagggcgggtggactgggagcagaagagacaccacctacgtccgtgtccgaaagtttgccaaccctgtctgatagtgatcctgtgcccctggccccaggcgcagcagatagcgatgaggatactgaaggctttggtgtcccccgacacgatccgctgccagatccgctgaaagtccccccaccccttcctgacccgagctctatatgtatggtggacccagaaatgcttccgcctaaaacagccagacaaaccgaaaacgtgagtagaactaggaaacccctggctcggccaaattcgagggccgctgcgcctaaagccactccggtcgctgcagctaaaactaaaggcttagcgggtggggaccgagctagccgtcccctatccgcacggtccgaacctagtgaaaagggcggtagagctccactgagtcgtaaaagtagcactcccaaaacagccaccaggggcccatctggatccgcctcttcacggcctggggtttctgctacgcccccaaagagccctgtttacctggacctggcatatctcccaagtggctcctctgcgcatctcgtggacgaagaatttttccagcgcgttagggccctgtgctacgtcatctcgggccaggaccaacgcaaagaggaaggcatgcgcgcagtcctggatgcgctgttagcgtctaagcaacactgggaccgcgacctgcaagtgacactgatacccacgtttgacagcgtggccatgcacacctggtatgctgaaacacatgccaggcatcaggccctcggcataactgttctgggatctaattccatggtgtccatgcaggacgatgcttttcctgcttgcaaagttgagttctag

SEQ ID NO: 28043 - DNA, 4734 bp, synthetic construct
  source 1..4734: mol_type = other DNA; note = Synthetic coding sequence
atggaggctggaagtgttgttcgagctatcttcgatttttgtccgtccgtgagcgaggagctcccactctttgtgggtgacattattgaggtgctcgctgtggtggacgaattttggttgctggggaaaaaagaggacgtgacaggtcagtttccatcatcattcgtggaaattgtcactatcccaagtcttaaagagggcgagcgcctgtttgtgtgcatctgtgaatttacaagccaggagttggacaatttgccactgcatcggggtgacctggtgatcttggatggaatcccaaccgctggctggttgcaggggcgatcctgttggggagccagggggttctttccaagtagttgcgtccgtgaactatgtctttcctcccagagcaggcaatggcattcacagagtgcacttttccaaattcctgagtactctatgggccaggctagagctttgatgggcctgagtgcccagctcgacgaggaactggacttccgagagggcgacgttatcactattataggcgtgcctgagccaggatggttcgagggcgagctggagggtcgcagaggcattttcccagagggctttgtcgaattgttgggcccacttcgaaccgtggacgagtctgtctcttccggcaaccaggacgactgcattgtcaatggggaggtcgataccccagttggggaagaggagattggcccagacgaggacgaggaagaaccaggaacctacggcgtggcgctgtacagattccaagccctggaacccaatgagctcgactttgaggtgggcgataaaattcgcattctggctactctagaggatggctggctagagggctccctgaaggggcgaacaggtatcttcccctacaggttcgtgaagctttgcccggacacacgagtggaagagactatggcactgccacaagagggaagccttgctcggatccccgagaccagcttagattgtttagaaaacactctgggagtggaagagcagcgacatgagaccagcgaccatgaagccgaagagcccgattgtatcattagcgaggcacccacatctccccttggtcacctgacaagtgaatacgatacagaccgcaactcttaccaagacgaggataccgcagggggacccccacggtcacctggcgtggaatgggaaatgcccctggctaccgacagcccaacgagcgacccaactgaggtcgttaacggtatcagcagccagccacaggtgcctttccacccgaacttgcaaaagagccaatattacagtacagtcggaggctcgcatcctcatagtgaacaatatcccgatcttctacccttggaagcacggactcgggattatgcctccctgccaccaaagagaatgtatagtcagctaaagaccctccagaagccagttctcccactgtacagaggatcttccgtcagtgcaagtcgagtcgtgaagcccagacagtcttccccacaactccacaacctggccagttacacgaaaaagcaccacaccagttccgtatactccatttcagaacggctcgagatgaagcccggaccgcaagcacagggccttgtgatggaggctgccactcacagccagggtgacggctctaccgatttggattccaagttaacacaacagctgattgagttcgagaagtcactggccggtcctggtaccgagccagataaaatcctcaggcacttctcgataatggactttaacagcgaaaaggatattgtgagggggtcctctaaactgattacggaacaggaactacccgaacgcagaaaggccctgcgtcccccaccgccacgcccttgtacgccagtttccacttctccacatttactagttgaccagaatctgaaacctgccccaccactggtagtgaggcccagtcgcccagctccgttgcctccgtctgctcagcagcgtaccaatgccgtttcaccaaagttgctgtctagacacaggccaacatgcgaaacgcttgagaaggaggggcctggtcacatgggccgatccctagaccaaaccagcccatgccctctggtgctggtgcgaattgaagaaatggagcgcgaccttgacatgtacagccgagcgcaagaggagctcaatctgatgttggaggaaaaacaagacgagtctagccgagccgagaccttagaagacctgaaattttgtgaaagcaatatcgaatccctcaacatggaacttcagcagctgagagaaatgaccctcctctcttctcagtcaagtagcctcgtggccccttccggtagcgtgtccgcagagaatccggaacagcgcatgcttgagaagcgtgctaaagttattgaagaattactacagactgaaagggattacattcgggatctggaaatgtgcattgagagaatcatggtgcctatgcagcaggcccaggtccctaatatcgacttcgagggcctgttcggcaatatgcagatggtgatcaaagtttccaagcagctgctggcggctcttgaaatttcagatgcggtcggcccagtttttctcggccaccgggacgaactggagggcacatacaagatttattgtcagaaccacgacgaggcaatcgccctgttagaaatctacgagaaagatgagaaaattcagaagcatctgcaggatagcctcgccgatctaaaatcgctgtataatgagtggggttgtacgaattatattaatctgggaagcttcctcatcaaacccgttcaaagagtaatgcgctatcctcttctgttgatggaactgctgaattccacccccgaatctcatcctgataaggtaccgctcaccaacgccgtgcttgctgtgaaggaaatcaatgttaacattaatgagtacaagcgcaggaaagacctggtacttaagtatcggaagggcgacgaggattccctcatggagaagatttccaagctcaatatccacagtatcattaagaagtctaacagagttagctcacacctgaaacaccttaccgggttcgctccacagatcaaagatgaggtgttcgaggaaaccgagaaaaattttcggatgcaggagcggttaattaagtcctttatacgagacctttccttgtacttacaacatattcgggagtctgcatgcgttaaggtcgtggcagcagtgtctatgtgggacgtttgtatggagagggggcatcgcgacctggaacagttcgagagagttcaccgctatatctccgaccaattatttacaaatttcaaggagaggactgagcgtctcgtgatctcccctctgaatcagctgctctcaatgtttacaggaccccataagctggttcagaaacgctttgacaagttgctggacttctataattgcactgaaagggccgagaagctaaaggataagaagacattagaagaactgcagtcagctcgcaataattatgaagcactgaatgcacagctactggatgagctgccgaaatttcatcagtacgcgcagggcttgttcaccaactgtgtgcacgggtacgctgaggcacattgtgattttgttcatcaagctcttgagcagctgaaacccctgctatctctcctcaaagttgccggtcgggagggcaatttgatagcaatatttcacgaggagcactcgcgcgttttgcagcagttgcaggtgttcacattttttccagaatcgcttccggcaactaaaaaacctttcgaacgcaagactatcgatcggcagtcagctagaaagccgctgctgggactccccagctacatgctgcagtccgaagagctgcgcgcaagtctgttagccagatatccacccgaaaaactgttccaagccgagagaaactttaatgctgcacaagacctggatgtttcgctcctagagggtgacctggtcggcgtcatcaagaagaaagatcccatgggcagccagaacaggtggctcattgacaacggggtgactaaaggctttgtgtattctagcttcctgaagccctacaacccaaggcgaagccacagcgacgcgtccgtaggctcccattccagcacagagtcggaacatggctcttcatcgccccgatttcccaggcaaaacagtggcagcacgttgacatttaacccatcttctatggccgtcagttttactagcggctcatgtcagaagcaaccgcaggatgccagcccccctccaaaggaatgcgatcagggaacactttcagcttccttgaaccccagcaactccgagtcaagtcccagtcggtgcccttcggatccagactctacgtcccagcctcgctctggcgattcagccgatgtggcgcgagacgtgaagcagcccacggcaactcccaggagctatcgcaacttcagacatcccgaaatcgtggggtactcagtgccaggcagaaacggacagagtcaggaccttgtgaagggctgcgctcgcaccgctcaggcacctgaggaccgaagtactgagcctgatgggagtgaggcagaggggaatcaagtgtactttgctgtgtataccttcaaagctcgcaatccaaacgagctgtccgtctctgcaaaccagaagttaaaaatattggagtttaaagatgtgactggcaatacagagtggtggctcgcagaggtcaacggtaagaagggttacgtccccagtaactatatccgaaagacagagtatacttag

SEQ ID NO: 28044 - DNA, 3186 bp, synthetic construct
  source 1..3186: mol_type = other DNA; note = Synthetic coding sequence
atgctgagaactgcaggacgcgacgggttgtgtagacttagcacgtatctcgaagagcttgaggctgttgagctcaaaaagttcaaactgtacttaggaacagctactgaactgggggaaggaaaaattccatggggtagtatggagaaggcagggccactcgaaatggcccaactactcatcacccacttcggccctgaggaagcatggagactggccctgtccactttcgaacgcatcaaccggaaagacctgtgggaaagaggccagagggaagacctagtacgagacactccacctggcggaccttcttctctgggtaaccaatctacatgcctgctggaagtcagcctggtgacgcctaggaaagatccccaggaaacgtatcgggactatgtgaggagaaagtttagattaatggaggaccgcaatgccaggctgggcgagtgtgtcaatctcagtcacagatacactcgcctgcttctggtgaaagagcactctaatcccatgcaggtgcagcagcagctgttggataccggacggggacacgcacggactgtcggtcatcaagcaagtcctattaagatagagaccctgttcgagcccgatgaggaacggccagagccgcctagaacagtcgttatgcagggtgcagccggaattgggaagagcatgttggcacataaagtaatgttagactgggctgacgggaagctgtttcagggcaggtttgattatcttttttatattaattgccgggagatgaatcaatctgccacagaatgttctatgcaggatctgatcttttcctgttggccagagcctagtgcccctctgcaggaactcatcagagtgcctgaacgcttattgttcataatcgatggcttcgatgagttgaaaccgagtttccacgatccccaggggccttggtgcctctgctgggaagagaagagacccaccgaacttctcctcaattctctcatccggaagaagctgctgcccgagctgagcctattaataacaactagacctacggctctggaaaagctgcatcggctccttgagcatcctcggcatgtggaaattcttggtttctccgaagctgagaggaaagagtatttctacaaatattttcataacgcagaacaggccggacaggtcttcaattatgttcgcgataatgaaccactgtttactatgtgtttcgttcccctcgtatgttgggtggtgtgtacttgtctgcagcagcaattggaagggggtgggctgctgaggcaaacgtcgaggactacaacggcggtctatatgctgtatctgttgtcgctgatgcaaccaaagcccggagctccgaggctgcagccgccacctaatcaacggggactgtgctcactcgcagcggacggcctttggaatcagaagatcctgttcgaagaacaggacttaaggaagcatggactagatggcgaggatgtgagcgcatttctgaacatgaatattttccaaaaagacatcaactgcgaaagatactatagcttcattcatcttagcttccaggagttcttcgccgctatgtattatattctcgacgagggtgagggtggagccggacccgaccaggatgtcactaggttacttaccgagtatgccttctccgagaggtccttcctggcccttacctcacggtttcttttcgggttgctaaacgaggagactcgcagccacctggagaaatcgctttgttggaaagtctcccctcacatcaaaatggacctcctgcagtggatccagtccaaagcccagtccgacggctccactctgcagcagggatctctggaatttttctcctgtctgtacgagatacaggaggaggaatttattcaacaagcactgagtcactttcaagtgatagtcgtcagcaatatcgccagcaagatggagcatatggtcagctcattttgtctcaagaggtgtcgcagcgcccaggtgctccatctgtacggcgcaacctatagcgcagacggcgaagatcgcgcaaggtgctccgctggggcacataccctcctggtgcaactgccagaacgcacagtgctactagatgcctactcagagcacctcgccgcagccctttgtaccaatccaaacctgatagagctgtccctctataggaatgccctggggagcaggggagtgaaattgctttgccagggtttgcggcacccgaattgtaaactgcagaacctgcggctgaaaagatgtcgtataagctcttccgcttgcgaggatttgagtgctgcccttatcgccaacaagaacctcacccgaatggatctctccgggaatggtgtggggttccctggaatgatgctgctgtgcgaggggctgaggcatccccagtgccgcttgcagatgattcagttgcggaaatgtcagttggagagcggtgcgtgccaggagatggctagcgtgcttggaactaacccccacctagtggagttggacctcacagggaacgccctggaagatctgggactgcgactgctctgtcagggtctgcggcaccctgtctgccggttgcggaccctatggctgaagatctgccggctgaccgctgcggcatgtgatgaactggctagcaccctgagcgtgaatcagtctctcagggaactcgatctttccctaaatgagcttggggatttgggagttcttttgctctgtgagggtctgcgtcaccctacctgcaagttacagacactgcgtctcggcatttgtcgactggggtccgccgcttgcgaagggctgtctgttgtcctgcaggctaatcataatttgagggaactagacctcagttttaacgacctgggcgactggggactctggctgctcgctgaggggctgcagcatcctgcttgccgactgcagaagctgtggcttgacagttgcgggctgaccgccaaggcctgtgagaatctctacttcacactcggaatcaatcagaccctgaccgacctgtatctcaccaacaacgcacttggcgatacaggcgtgcgtctgctgtgtaaacgcctgtcacatcctggatgcaagcttcgagtgctgtggctatttggcatggacttaaacaagatgacacactctaggctggcggcactgcgggtcacgaagccataccttgacatcggatgttag

SEQ ID NO: 28045 - DNA, 3963 bp, synthetic construct
  source 1..3963: mol_type = other DNA; note = Synthetic coding sequence
atggccaatgactcccctgccaaaagcctggtagacattgacttaagttctcttagggacccagcaggcatatttgagctcgtggaagtggtaggcaacgggacctacggacaggtttacaagggcaggcatgtgaagacaggccagctggccgctattaaagttatggacgtgaccgaggacgaggaggaagagattaagttggaaatcaatatgttaaagaaatactcccaccaccgcaatattgctacatattacggagcttttatcaaaaagagcccacctggccacgacgaccagttgtggctggtcatggaattctgcggcgcaggcagcattaccgatttagttaaaaatacaaaaggcaataccctaaaggaggattggattgcttatatctcacgcgagatcctgagaggcctagcacatctccacatacaccacgtgattcaccgagatattaagggacagaacgtcttgcttacagagaacgccgaggtgaaactggttgactttggcgtgtctgctcagctggaccggaccgtcggacgcagaaacacattcatcggaaccccttactggatggcacctgaggtgatcgcttgtgacgaaaatccagatgccacctacgactataggtcagacctgtggtcatgcggaatcactgccattgagatggccgagggggcacccccactgtgtgatatgcatccaatgagggccctgttcctcattcctaggaatcctcctcctcgactgaagtctaaaaaatggtccaagaagttcttctcctttatcgagggctgtcttgtgaagaattatatgcaacgtccaagtactgagcagcttctgaagcatccctttatcagagaccagccgaacgagcgccaggttcggatccagttaaaggaccatatcgatcggacgaggaagaagcggggtgaaaaagacgagacggaatacgaatacagtggcagcgaagaagaggaggaagaggttcccgagcaggaaggagaaccatcctcgatcgttaatgtgcctggcgaatccaccctgaggagagacttcctgcgcctgcaacaagagaataaggagaggagcgaggctttgagaagacaacagctgctgcaagagcagcagctgagggagcaggaggagtacaagaggcagctgctcgcggagcgacagaagcggatcgagcagcagaaagagcagagacggaggttggaggaacagcagcggagagaacgagaagcaagaaggcagcaggagcgggagcaaagacgtagggaacaagaggagaagcgacgcctcgaggagctcgagcgacgcaggaaagaagaggaggagcgccgacgggcagaggaagaaaagcgtagagtcgagcgggaacaggaatatatcagaaggcagctggaagaggagcaaagacacctggaagtactgcagcaacagctactgcaagaacaagccatgcttctggagtgcagatggagagagatggaggagcatagacaagctgagagactccagcgtcagctgcagcaagaacaggcttatctgttatcacttcagcacgaccacagacggcctcacccccagcattctcagcaaccacctcccccacaacaagaaagaagcaagcccagctttcacgcaccagagccaaaggcccattatgagccagccgaccgcgctagggaagtagaggaccgatttcgaaagaccaatcacagctctcccgaagcgcagtctaaacagaccggtcgtgtcttggaaccccctgtccccagtcgttccgaatccttcagcaatggtaactcagagtctgtccaccccgctctgcagagacccgcagagccccaggtccagtggtctcacttggccagcctaaaaaacaacgtcagccccgtgagcagaagccactccttcagtgacccttccccgaagtttgcgcaccaccatttgcgctcacaggacccatgccccccttcccgctccgaagtcctgtcccagtcaagtgattcaaagagtgaggccccagatccaacacaaaaagcatggagcagatctgatagcgatgaggtcccaccacgagtgcccgtccggacaacatccaggagtcctgtgctcagcaggcgggacagccctctgcagggctctggacaacagaacagtcaagccggacagagaaattccacctcctctatcgagccgcgtcttctttgggaaagagtcgaaaaattagtgcctcggccaggttctggttccagctcaggctcctcaaactccggctcccagccgggtagccacccaggcagtcagtctggatcgggcgagcgctttagggtgcggagtagttctaaatcggaagggagccccagccagaggttagaaaacgccgtaaagaagccggaggacaaaaaagaggtgtttcgtcccctcaagcctgcagtgcgaatcgatctcaccgcattagccaaggaactgcgtgcagttgaggatgtgcggccaccccataaagtcactgactactctagttcctcagaggagagcggtacaaccgatgaggaggacgatgacgtcgagcaggaaggcgcagacgaatccacctccggccctgaggacacgcgggcagcctcttcactaaacctgtctaacggtgagactgagagcgtcaagactatgatcgtgcacgatgacgttgagtcagaaccagccatgaccccttctaaagagggtacacttattgtgaggcagacacagagtgccagcagcacattacagaaacataaatctagctccagcttcacaccatttatcgacccacgactgctccagattagcccatctagcggcaccaccgtcacgagcgtggtcggcttctcttgtgacgggatgcggcctgaggccatccgccaagaccctacccggaagggttccgtggtcaacgtcaaccctaccaatactaggcctcagtctgatactcctgaaatccgtaaatataagaaacgatttaatagcgaaatactgtgtgcggcactctggggggtgaacctcctcgtgggcactgagtctgggctgatgttattggaccggtctgggcaagggaaggtctatccactgatcaaccgtagacggtttcagcagatggacgtcctggagggcctgaacgtgctggtgaccataagcgggaaaaaggataagctgagagtgtactatctgtcatggctgaggaataaaatcttacataacgatccggaagtggagaaaaaacagggttggactactgtcggcgacttggagggctgtgtgcactacaaggtggtcaaatacgagcggattaaatttctggtgatcgctctgaaatccagcgtggaagtatacgcgtgggcccctaagccctaccacaagttcatggccttcaagagctttggcgagctagtgcataagcctcttctggtggacttaactgtggaggagggacagcggctgaaggtcatctatggctcttgcgccggattccatgccgttgacgttgactctggatcagtgtacgatatctaccttcccacccatattcagtgctcaattaaaccccacgccattattatactgccaaatacggacgggatggaactgttagtgtgttacgaggacgagggagtatacgtcaatacgtacggccgaatcactaaggatgtagttttacagtggggggaaatgccaaccagcgtggcctacatcaggtcgaaccagactatggggtggggagaaaaagccatcgaaattcgctcggtggagactgggcacctggatggtgtgttcatgcataaacgcgctcagaggctcaaatttctgtgcgagagaaatgacaaggttttcttcgccagcgtgcgtagcggtgggtcgtcacaagtatatttcatgacgttaggcagaaccagcctcctatcctggtag

SEQ ID NO: 28046 - DNA, 606 bp, synthetic construct
  source 1..606: mol_type = other DNA; note = Synthetic coding sequence
atgtatacgctacttagtggtttgtacaaatacatgtttcagaaggatgagtactgtattctcatcctgggtctcgacaatgccggaaaaactaccttcctagagcagtccaagaccaggttcaacaagaactataaaggaatgtcactgagcaaaattaccacgaccgtcggcttaaatattggaacggtggatgtggggaaggcccgtttaatgttctgggatctgggtgggcaggaggaactgcagtccctgtgggacaagtactacgccgagtgccatggtgtcatctacgtgattgactccactgacgaagagaggctggccgaatcaaagcaggctttcgagaaagtggtaacaagcgaggctctctgcggcgtgcccgtactcgtcttggctaacaagcaggatgtggagacctgcttgagtatccctgatatcaagactgcattttcggactgcaccagcaagattggacgccgtgattgcttgacgcaggcgtgcagcgcactcactggaaagggcgtgagggagggcatcgagtggatggtgaaatgtgtggttcgaaatgtgcataggccaccacgacagagggacatcacctag

SEQ ID NO: 28047 - DNA, 1329 bp, synthetic construct
  source 1..1329: mol_type = other DNA; note = Synthetic coding sequence
atgaggggtgccatggagctggagcccgagctgctcctccaggaggcaagagaaaatgtggaggcagcccagtcgtacaggagagaactagggcaccggctggagggccttcgggaggcaaggaggcagatcaaagagagcgcctcgcagactagggatgtgctcaaacagcactttaatgacctcaaagggaccctgggcaagctcctggacgaacgcctcgttacacttttgcaagaggtcgacacgattgagcaagagactatcaaacctctcgatgattgtcaaaagctgattgaacatggtgtcaataccgcagaggacctggtgagggagggagagattgccatgctgggtggtgtgggcgaggaaaacgagaaattgtggtccttcacaaagaaggcaagccatatacagctcgatagcctgcccgaagtgccattgttggtggatgtaccatgtctctcagcgcagctggacgatagtattcttaatatcgtcaaggaccacatattcaagcacggtaccgtggccagcagacctccagtacagatcgaggagctcatcgaaaaacccggagggataatagtccgttggtgtaaagtagatgatgatttcactgcccaggattatagactacagttcaggaagtgcacctctaaccatttcgaggatgtgtacgtgggatcagagaccgaatttattgtattgcatattgaccccaacgtggattatcagttcagagtatgtgcgaggggcgatgggcgacaggagtggtctccttggtcagttccgcagatcggccattctacactggttccgcacgagtggaccgcaggcttcgaaggttattccctatcaagcaggaggaacatcgccttgcgcaatgacagtgagtcctcaggtgtcctgtactcaagagcccctacatatttttgcgggcagaccctcaccttcagggtagaaacggtcggtcaaccggaccggagagattccatcggcgtttgcgccgaaaagcaggatgggtacgacagtctgcagagagatcaggcagtatgcatctctaccaacggtgctgtgtttgttaatggcaaggagatgaccaaccaactgccagccgtaacctcaggtagcactgttaccttcgacatagaggccgtgacgctgggcaccaccagcaataatgaaggcggtcatttcaagcttagagttaccatatcctccaataacagggaggtggtgttcgattggttgctcgatcagtcatgcggaagtctgtatttcgggtgcagtttcttttaccccggatggaaggtccttgttttctag

SEQ ID NO: 28048 - DNA, 1428 bp, synthetic construct
  source 1..1428: mol_type = other DNA; note = Synthetic coding sequence
atggcggctttgacaacattattcaaatatatcgatgaaaatcaggatcgctacatcaagaaactagctaaatgggtggcaattcaaagcgtgtccgcttggcccgaaaagcgcggtgagatccggagaatgatggaggtggccgctgctgacgtgaagcagctgggaggtagtgtagagctagtggacatcggtaagcagaaacttcccgacggatcagagatccctttgccgcctattctcctgggccgactgggctccgaccctcagaagaaaaccgtctgcatttatggacacctggatgttcagccagccgctctcgaggacgggtgggacagcgaaccattcaccttagtggagcgggacggcaaactatacggaaggggaagtacagacgacaagggtccagtcgctggctggattaatgctcttgaggcgtatcagaaaactggccaggagattcccgtcaacgtacgcttttgcctggaggggatggaggaatctggtagcgaaggactagacgagctgatcttcgcgagaaaagacacattctttaaagatgtcgactacgtgtgtatttccgacaactactggctcggcaaaaagaagccttgcatcacatatgggctgcgaggaatatgttacttttttatcgaagttgagtgcagcaataaggatctccatagcggagtatacggcggatcagttcacgaggccatgacggacctgatacttcttatgggttctcttgtcgacaagagaggcaatattctcatcccaggcattaatgaagccgttgcggcagttacagaggaggaacacaagttatacgatgacattgatttcgacatcgaggaatttgccaaggatgtgggtgctcagatcttactgcattcacacaaaaaggatatactgatgcataggtggcggtatccaagcttgtccctgcatggaattgagggtgccttcagcggcagcggcgcaaagacggtcattccacgtaaggtagtaggtaaatttagtatccggctggttcccaacatgactcctgaagtcgtcggggaacaggtgacttcctacctgacaaagaaattcgccgagctgcgaagcccaaatgagttcaaggtctacatgggacacggaggcaaaccctgggtatcggacttttcacacccccattacttggccggtagaagggccatgaaaacagtgtttggcgtagagccagaccttactagggaaggcggatctatcccagtgacattaaccttccaggaagccaccggcaaaaacgtgatgctgctgcccgttggatccgcagacgacggcgcacactctcagaacgagaagcttaataggtataattatatcgaggggactaagatgttggccgcatatttgtatgaagtgagtcagctgaaggactag

SEQ ID NO: 28049 - DNA, 6290 bp, synthetic construct
  source 1..6290: mol_type = other DNA; note = Synthetic coding sequence
atggcagaagtgaccgtgccccgagtgtatgtggtctttggcatccattgcatcatggcaaaggcatcaagtgatgtccaagtgtcaggtttccatcgcaaaatacagcatgtgaagaacgagctgtgtcatatgttgtccctagaggaggtcgcacccgtcttgcagcagacgctcctgcaggacaacctactagggagggtgcactttgatcaattcaaggaagccttgatcctcattctgtcgcgcaccctgtctaacgaggagcatttccaggagcccgactgttcacttgaggcccagccgaagtatgtgagggggggtaaacggtacggaaggcggtccctacccgagttccaagaatcagtagaggaattccctgaggtgactgtcatcgagcctttagacgaagaggcccgaccaagtcacatccccgcaggtgactgttctgagcactggaaaacccagagatctgaggagtacgaggccgagggccagttgcggttttggaaccccgatgatctgaacgcttcccaatccggaagttctccaccacaggattggatcgaggagaagttgcaggaggtctgcgaggatctgggcatcacccgcgacggacatctgaatcgcaaaaaattagtgtccatatgcgaacagtacggacttcagaacgtggacggagagatgttggaagaagtcttccataatttggatcccgatggaacaatgtctgttgaagactttttctacggtttattcaaaaatggaaagagcctgaccccgagtgcatcaactccgtatcgccagctcaaaaggcacctgagcatgcagtcattcgacgagtctggcaggcggacaaccacctccagcgccatgacgagtacgatcggattcagagtgtttagctgtcttgacgacgggatgggacatgcttcagtcgagagaatcttggacacatggcaagaagaagggattgaaaatagccaggaaatactaaaggctctcgatttctcattagatggcaacattaacctgaccgaactgacactagcgctggaaaacgaactgctggtcaccaaaaactccattcatcaggcggctctcgctagttttaaagccgaaatcaggcacctacttgaacgcgttgatcaggtagtgagggagaaggagaagctacggtccgacttagataaagccgagaaactcaaaagcctcatggccagtgaggttgatgaccaccatgcagccatagaacggagaaacgaatacaatctgcggaaactcgatgaggaatacaaagaaagaattgctgccttgaaaaatgaacttaggaaagaaagggagcaaatcctacagcaagctggcaaacagcggcttgaactggaacaggagatcgagaaggccaaaaccgaagagaactacattcgagataggttggccttgtccctcaaagagaatagcagattagaaaatgagttgctcgagaatgccgaaaaactggccgaatatgaaaatttgacaaataagctgcagcgcaacttggaaaacgtcctcgctgagaagtttggtgatctggaccctagttccgccgaattcttccttcaggaagagagactcacccagatgaggaacgaatacgaaaggcagtgtcgtgtgttacaggaccaagtggacgagttgcagtcagagctggaggaatacagagcccaaggaagagttctccgcttgcctcttaaaaactcgccatctgaagaagttgaggccaattccgggggaattgaaccggagcacggcctcggtagcgaagaatgcaaccctctgaatatgagcattgaagccgagctggttatcgaacagatgaaagaacagcaccatagggacatatgctgtctgcgcttggagttggaagataaagtgagacattatgaaaagcagctagatgagactgtcgtctcctgcaagaaggcccaggagaatatgaagcaacgccatgaaaacgagacccatacactggagaaacagatctcggacttaaagaacgagattgccgaattacagggtcaggctgcagtcctcaaggaggcgcatcacgaagcaacttgccgacacgaggaagagaagaagcaactgcaagtgaagctggaagaagaaaagacgcatctgcaggaaaaattgcggctccagcatgagatggaactaaaggctcgtctgactcaagcacaggcctcatttgaaagagaacgcgaggggttacagtcatcagcatggactgaagaaaaggtgcgcggacttacacaggaactggagcagttccaccaggagcagctaacctcactggtggagaaacacacactcgagaaggaagagctgcgtaaggagctgctcgagaagcatcagagggagctccaggaggggcgagagaagatggagacggagtgtaataggaggacctcacaaatcgaagctcagtttcagagcgactgccagaaggtgaccgagcggtgcgagtcagccctccagtctttggagggcaggtacaggcaggagttgaaagatctgcaggagcagcagcgcgaagagaagagccagtgggagtttgagaaggacgagctgacccaggagtgcgcggaagcccaggaactcctgaaggaaacactgaaacgggagaagacgacttctctggtactcactcaggaacgggaaatgctcgagaagacatacaaggaacacctgaatagcatggtggtcgagaggcagcaactgttgcaggacctggaagatttgagaaatgtctccgaaactcagcaatccctcctgtcagaccagattctagagctcaagtcctctcacaagagagagctacgggaacgagaagaagtgctgtgccaggcaggagcaagcgaacagctcgcgagccagcggctggagagactcgaaatggagcatgatcaggagcgtcaggaaatgatgtctaaactgctcgccatggagaatatccacaaggccacctgcgagaccgcagaccgcgagcgcgctgaaatgagcaccgagatctcgagactgcaaagcaagatcaaggagatgcagcaggccactagtccactgagcatgcttcagtctgggtgccaagtcatcggggaggaagaggttgagggcgatggcgctctgtccctgttgcagcagggagaacagcttttggaagagaatggtgacgtacttctctctcttcaaagagcccacgaacaggctgtgaaggagaacgtcaaaatggcaacggagatcagcagactgcagcagcgattacagaaactggaacccggtctggttatgagttcatgtcttgacgagccagctacagaattcttcgggaacaccgccgagcagaccgagcagttcctgcagcagaaccgaaccaaacaagtcgagggggtgacccggcgtcatgttttatccgacctggaggatgacgaagttcgcgacttgggttcaaccggtacctcaagcgtccagcgtcaggaggtgaagatagaggagtccgaagctagtgtggaaggattctctgagctggaaaactcagaggagactaggacggagagttgggagctcaaaaatcaaatctcccagctacaggagcagctcatgatgctctgcgctgattgcgatagggccagtgaaaaaaaacaggatctgctatttgacgtttcagtactgaaaaagaaactgaaaatgctcgaacggatcccagaggcgagcccaaagtacaaactactgtacgaggacgtgtcacgtgaaaacgattgtctgcaagaggagttaaggatgatggagactagatacgacgaggccctcgagaacaacaaggaattgaccgccgaagtcttcaggttgcaagatgaattgaagaagatggaagaggtcacagaaactttcctatcccttgaaaaatcatatgatgaagtcaaaatcgagaatgaaggtctgaacgtcttggttctgagacttcagggcaaaatcgaaaagctccaggagtcggtggtccaaagatgcgattgctgcttgtgggaagcatcgctggagaatctcgaaattgaacctgacgggaatattttacagctcaaccagacactggaggaatgtgtgccgagggtaaggtctgtgcatcatgtgattgaagagtgcaagcaagaaaatcaatatctcgaaggaaacacccagctactcgagaaggtgaaagcacacgagatagcatggctgcacggtaccattcagacccatcaggagaggcctcgcgttcagaatcaggtgatactggaggagaacacaacacttctgggatttcaagataaacactttcagcaccaggccaccatcgctgaattagagctggaaaagaccaaactgcaagagttgacgcggaaattgaaggagagagtgaccatactggtcaagcagaaggacgtactctcccatggcgaaaaggaggaagaactgaaagctatgatgcacgatctgcagattacgtgtagcgaaatgcagcagaaagtcgaactactgaggtatgaatccgaaaagctccagcaggagaacagcatcttgagaaatgagatcactactctgaatgaggaagactcaatctctaacctgaagttgggcaccctgaacggcagccaggaagagatgtggcagaagacggagacagtgaaacaggagaacgcagcagtgcagaaaatggttgagaacctgaagaagcaaataagcgaactgaagatcaaaaaccaacagttggatttagagaataccgaactttctcagaagaactcacagaatcaggagaagttgcaggaactgaaccaaaggttgaccgaaatgttgtgtcagaaagaaaaagagccaggcaactcagcactcgaagagcgggagcaggaaaaattcaacttaaaggaagagctcgagcggtgcaaggtgcagtcctctactctggtgagctcattggaagcggagctctcggaggtgaagattcaaacacatatcgtgcagcaggaaaatcatctgctcaaagatgagctggagaagatgaaacaactccatcgctgccccgatctgtcagatttccagcagaagatatcatcggtcttgagttataatgagaaactgcttaaggaaaaagaagccctgtccgaagaattaaacagctgcgttgataagttggctaagagtagcctcctggagcatcgcatcgccaccatgaagcaggaacaaaagtcctgggagcatcagtccgcaagcctgaagtctcagctggtggccagccaagagaaagtacagaatctcgaagacacagtccagaatgtgaatctgcagatgtctaggatgaagtccgatctgagggttacgcagcaggagaaggaggccctgaagcaggaagtgatgtccctgcacaagcaactgcaaaacgcagggggtaagtcctgggctccggaaattgcgacacacccatccgggctccataatcagcaaaagagattgtcctgggacaaactcgatcaccttatgaatgaggaacagcaactgttatggcaggaaaacgagcggctccagactatggtgcagaatactaaggccgaactcactcattctcgagagaaggttaggcagcttgagtctaacctgctacccaagcaccagaaacacctgaatcccagtggcaccatgaacccaaccgaacaggaaaaattatcccttaagcgggaatgcgaccaattccagaaggaacagagccccgcaaatcgcaaggtgtctcagatgaacagcctagaacaggagctggaaactatccatctggaaaatgagggactcaaaaaaaaacaggtgaagctcgatgaacagctgatggagatgcagcacctaagatcaaccgccactccatccccctctcctcatgcatgggatctccagctgctgcaacagcaggcctgcccgatggtcccacgggagcagttcttgcagctccagcggcagttactccaggcggaaaggattaatcagcacctccaggaggaattggaaaaccggaccagtgaaaccaacaccccacagggcaaccaggaacagttggtgacagttatggaagagcgcatgattgaggtagagcagaaacttaagttagtaaagcggttgcttcaggaaaaagttaatcaacttaaggagcaagttagcttgcctggccatttgtgttcaccgacatcacattctagtttcaactcatcatttacttcactctactgtcatta

SEQ ID NO: 28050 - DNA, 1176 bp, synthetic construct
  source 1..1176: mol_type = other DNA; note = Synthetic coding sequence
atggccgctctaacaacgctctttaagtatattgacgaaaatcaggatcgctacattaagaagctggccaagtgggtcgcaatccagtccgtgtctgcttggcccgagaagagaggggaaattcggagaatgatggaagtcgccgctgctgacgtgaagcagctgggtggctccgtggagttagtcgatattggtaagcagaaggagattccagtgaacgtgaggttttgtctagaaggaatggaagaatctgggtcagaggggctcgacgagttgatcttcgccaggaaggataccttttttaaggacgtggattacgtgtgcatttctgataactactggttaggcaagaagaagccctgcatcacatacgggctcagaggcatctgctacttcttcatcgaggtagaatgtagtaacaaagacctgcattctggggtatacggcggaagtgtacatgaggccatgaccgacctgatccttctcatgggctcgctggtggacaaaaggggaaacattctgattccaggaatcaacgaggcagtggctgcagtcacagaagaagagcacaagttgtatgatgacattgacttcgatatcgaagaattcgctaaagacgttggcgctcaaattctgctgcactcacacaagaaagatatactcatgcacaggtggcgatatcccagcctgtctttgcatggcattgagggggctttttccgggagtggtgccaaaaccgtcatccccagaaaggtcgtcggtaaattcagcatcaggctggtacccaatatgacccctgaagtcgttggggaacaggtgacctcctatttgacaaagaagtttgccgaactcaggtctcccaacgaatttaaagtctatatgggacatggtggcaagccgtgggtgagcgacttctctcacccccactatctggccggacggcgagccatgaaaaccgtatttggggttgaacctgacttgacccgtgaagggggtagcattcctgttactctaacattccaggaggccacgggtaaaaacgtcatgctgctcccagtcggaagtgcagacgatggtgcgcattctcagaacgagaagctgaatagatataattacattgaaggaactaaaatgctggctgcctatctgtatgaagtgtcacaactgaaggactag

SEQ ID NO: 28051 - DNA, 5969 bp, synthetic construct
  source 1..5969: mol_type = other DNA; note = Synthetic coding sequence
atggatgaagtcgagcaagaccagcacgaggccaggctgaaagaactgttcgactcctttgacacgaccgggaccggtagcctaggtcaggaggaactgactgatctgtgccacatgctcagccttgaagaagtagcaccagtgctgcagcagactctcctgcaggacaatttgctgggcagggtgcactttgaccagtttaaggaggccctgatcctcatcctgagcaggactttaagcaacgaagagcattttcaagaaccagactgttctctcgaagcgcagccaaagtacgtgcgcggtggaaaacgatatggcaggcggagcctgcctgagtttcaagaatcagtggaggagttccctgaggtaacagttatcgaaccactggacgaagaggcccgtccctcccatattccagccggagattgctccgagcactggaagacacagcgatcagaggagtatgaggcagaaggccagttgcggttctggaaccccgacgacctgaacgcatcccaaagtgggtcttcgccgccacaagactggattgaagaaaaactgcaggaggtctgcgaggatctgggcattacacgggacgggcacctaaacaggaaaaagctggtctccatatgcgagcagtacggcctgcagaacgttgatggggagatgctggaggaggtgttccacaatctggaccccgacggcactatgtcagtagaggattttttctatggactgtttaagaatggaaagtcacttactcctagcgcttctaccccctaccgacagctgaaaaggcatctgtcgatgcagtcttttgatgagagtgggaggagaactacaacttccagtgcaatgacctctacaatcgggtttcgggtgtttagttgcctcgacgacggcatgggccacgcctctgtggaaaggattctcgatacctggcaagaggaggggatcgagaactctcaggagatactcaaggccctggacttctccctcgacggcaacattaaccttacggagctcaccctcgctctggagaacgaattgctagtgacaaaaaactcgatccatcaagccgcactagcttcattcaaggccgaaattaggcatctgctggagagggtcgatcaggttgtgagagagaaagagaagcttcgctccgacttagataaggcagaaaaactaaaatcgctgatggcttccgaagttgatgaccatcatgcggcaatagaacgtcgaaacgagtacaatctgagaaaactcgatgaggagtacaaagaacggatcgctgcgctcaagaatgaactgcgcaaagaacgagagcagattctccaacaagcaggcaagcaaaggttggaactcgagcaggagatcgagaaggccaagactgaagaaaattacatccgcgatcggttggccctgagtctcaaggagaatagccgcctggaaaacgagctgctggaaaacgctgaaaaactggccgaatatgagaacctaaccaataaactgcagcggaacctggagaatgtgctcgcagagaaattcggtgatctagatcctagttctgctgaattctttttgcaggaagagcgattgacacagatgcgaaacgagtatgaaaggcaatgcagggtcttgcaggatcaagttgacgaactacagtctgaattagaggaatatcgtgcccagggcagggtgctccgcttaccgttaaagaattcacctagtgaagaagtagaggcaaactccgggggtatcgagcctgagcacggcctggggtccgaggagtgtaacccattgaacatgagcatagaggcggagctggtgatagagcagatgaaagagcagcatcaccgcgatatttgctgtctgcgtcttgagctagaggataaggtgagacattatgaaaaacagcttgacgaaaccgttgtgtcatgtaagaaagcgcaggaaaatatgaaacaacggcacgagaacgagacccatactttggaaaagcaaataagcgaccttaaaaatgaaatcgccgagctccaggggcaggccgcagtgttgaaggaagcgcaccacgaggctacttgccgccatgaggaagaaaagaagcaattacaggtcaagcttgaagaagagaagacacatctgcaggaaaaactgagattgcagcacgagatggaattaaaggccagactaactcaggcccaggcatcttttgaacgcgaacgggaaggtttacagtccagtgcgtggaccgaggagaaagttaggggactaacgcaggagctcgagcagttccaccaggagcagttgacatccctggtggaaaaacacacactggagaaggaggaactgcggaaggaactgctcgagaagcaccagcgggaattgcaggagggaagagaaaaaatggagactgaatgtaaccgcagaacctcacagatcgaggcacagttccagagcgactgccagaaagtcactgaacgatgtgagagcgcgttacagtccttggaagggagatatcggcaggaactgaaagacctgcaggaacagcagcgagaagagaagagtcagtgggaatttgagaaggatgagctgactcaggagtgtgccgaagctcaagaactacttaaagaaaccctcaagagagaaaaaacgacctcgttagtgctaacccaagaacgggaaatgttggaaaaaacctacaaagaacatctcaactcaatggtagttgagaggcagcaactcctgcaggatctcgaggatctcaggaacgtcagcgagacccaacagtctttgctctcagaccagatcctggagctgaagagttcacacaaacgagagctcagagagagagaagaggttctgtgtcaggccggtgcatcagaacagcttgcgtcccagcggttggaaaggttagaaatggagcatgaccaggagcggcaggagatgatgtctaaactccttgccatggagaatatacacaaagcaacgtgtgagaccgcagacagggagcgggctgagatgtcaacggagatttctagactgcagagcaaaattaaagagatgcagcaggctacctcgcccctgtccatgctgcaatctgggtgccaagttataggtgaggaggaggttgaaggtgacggagctctgagtctgctacagcagggagaacagttgcttgaagagaacggggatgtgcttctttcactgcaacgggcacacgaacaggcagttaaggaaaatgtcaagatggcaacagagattagcaggttgcaacaaaggttgcagaaactggagcctggcctggtgatgtctagctgtctagatgagccagctacagagttcttcggtaacactgctgaacagacagagcagttcctgcagcagaatcgaacaaaacaggtggagggcgtgacaaggcgccacgtgttgtcggatttagaagatgacgaagtccgggacttgggcagcactggaaccagctcggtgcagcgacaggaagtgaaaatagaggaatctgaagctagtgtggaaggcttctcagaactggagaattctgaagagactcgtaccgagagttgggaactcaaaaatcaaatctctcagctgcaagaacagctcatgatgctttgtgctgactgcgacagagcctcagagaagaagcaggatttactgtttgatgtctccgtgctgaaaaagaagctcaagatgctggagcgcatccccgaggctagccctaaatataaactgctctatgaggacgtgtcccgagagaatgattgcctccaggaagagctcagaatgatggagactagatatgacgaagccttagagaataacaaggagctgacagccgaggtgttcagactgcaggatgaactcaaaaaaatggaagaggtcactgagacctttctcagccttgagaagtcatacgatgaggtcaaaattgaaaatgaggggctgaatgtcctggtgctccgtctgcagggtaaaatagaaaagctgcaagaatcagtggtgcaacgctgcgactgctgcctatgggaagcaagccttgagaatctggagattgaacctgatggcaatatcctccagctgaaccagacactggaggaatgtgtaccaagagtgcgctctgtacatcacgtgattgaggagtgtaaacaggagaatcagtatctggagggcaacacacagctcctggaaaaggtaaaggcccacgagattgcatggctgcatggcaccatccagacccatcaggagcggcctcgggtccagaaccaggtgatcctggaagagaacacaacactgctgggattccaggataaacactttcagcatcaggccacaatcgctgagctggaactcgagaaaaccaagctgcaggaattgactaggaagctcaaagaaagggtgacgattctcgtcaagcagaaagatgtcctctcacacggggagaaggaggaggagctgaaagccatgatgcacgacctgcagatcacgtgttctgaaatgcagcaaaaggtggagttgctcaggtacgagtccgaaaaactgcaacaggagaattccattctgcggaacgaaatcaccacccttaacgaggaagactcaatctcgaatctaaagctgggtacactgaatggaagccaggaggagatgtggcaaaagaccgaaactgtgaagcaggagaacgccgctgtccagaagatggtggagaacttgaagaaacagatttcagagctgaaaatcaaaaatcaacaactcgatctggaaaataccgagctgtcccagaaaaacagtcagaatcaagagaaactgcaagaactgaatcagaggctgacggaaatgttgtgtcagaaggagaaggaacctggaaacagcgctcttgaggaacgcgagcaggagaaattcaatctgaaagaggagctggaaaggtgtaaagtacagtcgtccacactagtttcaagcttagaggccgagttgtctgaggtgaaaatccaaactcacattgttcagcaggagaatcacctgctgaaagatgaacttgaaaagatgaagcagctccaccgctgcccagacctctctgactttcaacagaaaatttcaagcgttctgtcgtacaacgaaaaattgctaaaggagaaagaagccctgagtgaggagctgaattcatgcgtggataagttggctaaatcttcgctgctggaacatcggatcgccacgatgaaacaggaacagaaatcttgggagcaccagtccgcctccctgaagagccagctcgtagcctcacaagagaaagtgcaaaatctggaggacacagtacagaacgtgaacctgcagatgagcaggatgaagtccgacctcagagttacccagcaggaaaaggaagctctcaagcaggaggtgatgtcactgcacaagcaactgcaaaatgccggaggcaagtcttgggcacccgaaatagcaacccaccccagcggcctgcataatcaacagaaacggctgtcctgggataagcttgatcacctgatgaatgaggagcagcagctattgtggcaggagaatgaaaggctccaaaccatggtgcagaatactaaggctgaactgacacattcaagagaaaaggttcgccagctggaatctaacttgctgcccaaacatcagaagcacttgaacccatctggaactatgaatcccacagagcaggagaagttgagccttaagagggagtgtgaccaatttcagaaggagcagagtccagccaacagaaaggtcagtcagatgaattcactggaacaggaattggaaaccatacatctggagaatgaggggctgaagaagaagcaggtgaagctcgatgaacagctgatggaaaattctgttgtgggatcgagcagggaagggtgcagctctttgccagagattgtatgcgaggacgccgcaccagaagtgcattgtgatgccta

SEQ ID NO: 28052 - DNA, 915 bp, synthetic construct
  source 1..915: mol_type = other DNA; note = Synthetic coding sequence
atgggccagtgtgtcaccaagtgtaaaaatccgagctcaaccctcggcagcaagaacggggaccgggagcctagtaataagagtcacagtcggcgaggtgctggacatcgggaggaacaggtgcctccctgcgggaagccaggaggcgacatcctggtaaacggcaccaagaaagccgaggccgctacagaagcatgccagctgccaacaagctcaggagacgctggaagggaaagtaagagtaacgcagaagagagcagcctgcaaaggctggaggagctgttccgcaggtacaaggatgagagagaggacgcaatcttggaagaaggcatggagcggttttgcaacgacctgtgcgtagatccaacagagttccgagttctcctccttgcttggaagtttcaggccgcaaccatgtgcaagttcaccagaaaagagttctttgacggctgtaaagcaatttccgccgattctatcgacggaatatgtgcaagatttcccagtctgctgaccgaagcaaaacaagaagacaaattcaaggacctctaccgtttcacttttcaatttggactggattccgaggaaggacagcggagcctgcatagggagatagcgatagccctatggaaattggtgttcactcaaaacaatccccctgtgctggaccaatggcttaattttctgaccgaaaatccaagcggaattaaaggaatctctcgggacacatggaacatgtttctgaacttcacccaggtgatcggacctgatctgtcgaattactccgaggacgaagcatggccatctctgttcgacacttttgtggagtgggagatggaacggaggaagcgcgagggcgagggacgaggggcactttcttccgggcctgagggtctgtgtccagaagagcagacctag

SEQ ID NO: 28053 - DNA, 1914 bp, synthetic construct
  source 1..1914: mol_type = other DNA; note = Synthetic coding sequence
atggctgcgatggcggttggtggggcagggggttcaagagtttcgtcgggccgagaccttaattgtgtgccggaaattgccgatacattgggtgccgtcgccaaacagggattcgattttctctgcatgccagtctttcatccacggttcaaaagggagttcatccaggaacccgctaagaatcgccctggcccacagacaagatccgacctgctgttatctggcagagactggaataccttgattgtgggcaagctaagcccttggatcaggcctgattcgaaagtcgagaagatccggaggaatagtgaggcagcgatgctgcaagagctcaacttcggggcttacttggggctgcccgcatttttgctccctctgaatcaggaggataacaccaacctcgccagggttctgaccaaccatatccatacaggccatcacagctctatgttttggatgagagtgccgttagttgcccctgaggatcttcgagacgacattatcgaaaacgcaccaactacccacacagaggagtacagtggagaagagaagacctggatgtggtggcataatttcagaacattgtgcgactacagtaaacgtatcgcagtggcactggaaattggagccgatcttcccagcaatcatgtgatagacaggtggttaggggaacccatcaaagcagccattctgccaacctcaatctttctgacgaataagaaggggttccctgtgctgtccaaaatgcaccagaggctgatattccgcctgctcaagctcgaagtgcagttcatcatcaccgggaccaaccaccattccgagaaggagttctgttcttacctccagtatctggaatacttgtctcagaaccgccctcctccaaatgcctatgagctcttcgccaaagggtacgaagactacttacagagtcccctgcaacccctcatggacaacctggagtcacagacttacgaagttttcgagaaagaccctataaagtacagtcagtaccaacaagccatctacaaatgcctcctggacagggtacccgaagaggagaaagatacaaatgtgcaggtcctgatggtccttggtgctgggaggggccctctggttaatgcaagtctccgcgctgccaaacaggcagataggcgtatcaaactgtacgccgtggagaaaaacccaaatgccgtggtcaccctagaaaactggcagttcgaggagtggggcagccaggtaaccgtggtgagctccgacatgcgagagtgggtggcccctgagaaggctgacattatcgtttccgagctgcttggcagttttgccgacaacgaactgagccccgaatgcttggacggcgctcagcattttctgaaagatgacggtgtctcaattcctggcgagtataccagctttctcgcccctatctcttcctcaaagctgtacaacgaggtaagagcgtgtcgggagaaagaccgcgacccagaggcccagttcgagatgccctacgtggtgagactccataatttccaccagctgtctgcaccccagccctgctttactttcagccaccctaatagggatcccatgattgacaataacagatactgtaccctggagttccctgtggaagtgaacactgtgctccacgggtttgccggttattttgagactgtactttatcaagatatcactctgtctatccgacccgaaacacattctcctgggatgtttagctggttccctattctcttccccatcaagcagcccataacagttcgcgaaggccagaccatctgcgtgcgattctggcgatgcagtaatagtaaaaaagtctggtatgagtgggcagtaacagcacccgtctgtagcgcaatccataacccaaccgggaggagctatacaattggtctctag

SEQ ID NO: 28054 - DNA, 1041 bp, synthetic construct
  source 1..1041: mol_type = other DNA; note = Synthetic coding sequence
atggccccaggatccgtgacgtccgacatatcccccagctctacttccacagccggaagttccagaagcccagaaagtgaaaagcctgggccatcccatggcggtgttcctcctggcggacctagccacagctcactacccgtcgggaggcgccatcccccagttttaagaatggtactggaggccctccaagccggagagcagagacgagggaccagcgttgcagccatcaaactgtatatcctgcacaaataccctaccgtggatgtattgcgcttcaagtacctgttaaaacaggctttagcaaccgggatgcgcagagggcttctggctcgacctctgaattccaaggctagaggcgcaaccggatccttcaagctagttcctaaacataagaagaagatacagccaaggaaaatggccccagctacagcccctcgcagggctggagaagcaaagggcaaaggccctaagaaaccgagtgaggctaaagaagaccctcctaacgtcggcaaggtgaaaaaggcagcgaagcggccagccaaagtccagaaacctcctccaaaaccaggggcagccactgaaaaggcgaggaaacaaggcggtgccgctaaagacacaagagctcagtctggcgaagcacgaaaggtcccacccaaacctgataaggccatgcgtgctcctagttccgcgggtgggctaagccggaaagcgaaagcgaaagggtcgaggtcttctcaaggagatgcagaggcctaccgcaaaaccaaggctgaaagtaagagttcaaagcctactgcatccaaagtgaagaatggtgccgctagccccactaaaaagaaggtggtggccaaggccaaggcaccaaaggccggacagggcccaaacaccaaggccgctgcacccgcaaagggcagtggaagcaaggtggtaccagcacatctctccagaaaaaccgaagcaccgaagggaccgaggaaagctggccttccgattaaagcatcatccagcaaggtgtcttcacaacgcgctgaagcttag

SEQ ID NO: 28055 - DNA, 1869 bp, synthetic construct
  source 1..1869: mol_type = other DNA; note = Synthetic coding sequence
atggcaatggcaccgtcccccagcttggtacaggtgtacacctcgcctgccgctgtggccgtttgggagtggcaggacggactgggcacctggcacccatatagcgcgactgtgtgcagcttcatcgagcaacagttcgtgcagcagaaaggccaaaggtttggacttgggagtttggctcactctattcctctcgggcaggcggaccctagcctcgccccttatataatagaccttccaagttggactcagttccgccaggatacaggcacgatgcgggctgtcagaagacatctgtttcctcagcactcagccccaggtagaggcgtggtctgggagtggctaagtgacgacggctcctggaccgcatatgaggcctccgtctgtgattatctcgagcagcaggtcgctagaggaaatcaattggtagatctggcaccactcggttataactacactgtgaactacaccactcatactcagaccaacaagacgtcatccttttgccgttcggtgcggagacaggctggcccaccttatccagtgaccaccatcattgcaccaccgggtcataccggtgtggcatgctcttgtcaccagtgcctgagcggttctagaaccggccctgtgtccggtaggtatcgccactcaatgactaacttgcctgcatacccagtgccccagcaccctcctcatcggaccgcttccgtgtttggaacgcatcaggcttttgcgccatataataagccgagcctatcgggggctaggagcgctcccaggttgaacactacaaatgcctggggagcagctcccccttctctgggcagccagccgctgtacaggagctcactcagccacctgggtcctcagcacctgcccccaggtagctctacctctggtgcagtcagtgctagtcttccaagtgggcctagtagcagccctggctccgtgcccgcaaccgtccccatgcagatgccaaagccatctagagttcagcaggcacttgccggaatgactagcgtgctcatgtcggctatcggcctgcccgtgtgcctgtcacgagcgcctcagcccacctcaccgccagccagcaggctggctagtaagagtcacgggtcagttaaacgtctgcgcaagatgtccgtgaagggtgctactcccaaaccagagcccgaaccagagcaggttattaaaaactatacagaagaactgaaagtccccccagacgaggactgcattatctgtatggaaaaactgtccactgcctcaggatacagcgatgtgaccgatagcaaagccatcgggtccctggcggtgggccacctgacaaaatgtagccatgcattccacttattgtgcctgctggctatgtactgtaatggcaacaaagacggatctctccagtgcccatcctgcaaaactatctatggagaaaaaacgggaacccagccacagggaaagatggaagtgctacgctttcagatgtcactccctggtcacgaggattgcggcactatcttaatcgtctattcaatcccacacggcatccagggtccagagcaccccaaccccggaaagccctttacagcacgcggatttcctcgacaatgttacctcccagataacgcacagggaagaaaggtactggagctgttgaaagtcgcctggaagaggcgactgatcttcacagtgggcacctctagcacaactggggagaccgacaccgtagtatggaatgaaattcaccacaaaacagagatggaccgaaacattactggccatgggtatcctgacccgaactacctgcaaaatgtgctggcggagttggccgctcagggcgtgacagaggattgtttggagcagcaatag

SEQ ID NO: 28056 - DNA, 786 bp, synthetic construct
  source 1..786: mol_type = other DNA; note = Synthetic coding sequence
atggccgcaacagccagagaggacggcgcttctgggcaagaaagagggcaaagggggtgtgaacattacgaccgcggatgccttctcaaagccccatgttgcgacaaattatacacatgtagactttgccacgacaacaatgaggaccatcagttagacagattcaaagtgaaggaggttcagtgcattaactgtgagaagatccagcatgcccaacagacatgtgaggagtgttctaccttgtttggagaatactactgtgatatatgccatctcttcgataaggataagaagcagtaccactgcgaaaattgcgggatttgccggatcgggcctaaggaagactttttccactgtctgaaatgtaatttatgcctcgcaatgaatctgcagggacgacacaaatgcattgagaacgtgagtagacaaaactgtccgatttgcctggaagatatccacacatcccgagtggtcgcccacgtactgccctgcggccaccttctccatcgtacatgttacgaggagatgctgaaggagggctaccgatgcccactgtgtatgcactctgcactcgatatgaccagatattggcggcaacttgatgacgaggtggcccaaactcctatgccctccgagtaccaaaatatgacggttgatattctgtgcaacgactgcaacggtagatccaccgtgcagtttcacatattaggcatgaagtgcaagatctgtgaaagctataatacagctcaggccggaggtaggagaatcagtttagaccagcagtag

SEQ ID NO: 28057 - DNA, 1983 bp, synthetic construct
  source 1..1983: mol_type = other DNA; note = Synthetic coding sequence
ctgagcctgccgtcagtgacctacctgctgctcgaggtcatccccgattctatgcggaagcaggaggtccggacagggagagaggctggacagggtcatggaacaggctccccagctgagcaggttaaggcactgatggatctcctggccggaaaggggagccaggggtcccaggccccacaggcactcgatcgcactcctgacgctcctctggggccttgcagtaacgactctcgaatacagcggcatagaaaagcattacttagcaaggtggaagcaacacggggaggtggacatccggctagaaccgtagctctggataggctgtttttgcctcttagcagggtgagtgttcctccaagagtgagcatcacaataggagtcgcgggaatgggtaagaccactcttgtacggcactttgtgaggctgtgggctcacggtcaggttggaaaagacttcagcctagttctgccactgacatttcgggaccttaatacacatgaaaagctgtgtgctgaccggctgatctgtagtgttttcccacacgtgggggaaccatcgctggccgtggcagtacctgcaagggcactactcatccttgacggactcgacgagtgccggacacctctggacttcagcaacacagtcgcttgtaccgatcccaaaaaagagatcccagtggatcacctgattactaatatcattcgaggtaacctgttcccggaagtgtcaatctggattacaagtcgaccatcggcatccggccaaattcctggagggctggttgaccgaatgaccgagatcagaggcttcaacgaagaagagataaaagtgtgcttggagcagatgttccctgaagatcaggccctgctaggttggatgctgagccaagtccaggccgatagggctctttacttgatgtgtaccgttcccgctttctgcagacttacagggatggcccttgggcatctctggaggagccgcacaggtccccaagacgccgagctgtggcccccacgaactctgtgtgagttatattcatggtacttccgaatggccctgagcggcgaagggcaggagaagggaaaggcctcacccaggatcgaacaggtagcacatggcggtcggaaaatggttgggactttagggcgtttagcctttcacggtctgctgaagaaaaaatatgtgttctatgaacaggatatgaaagctttcggcgtggaccttgccctgcttcaaggggctccttgttcttgcttcctgcagagggaggaaacccttgcgtcatctgtcgcctattgttttacacacctgagtctgcaagaattcgtggccgctgcttattattatggggcttctaggcgagccatctttgatctgtttacagagtccggagtaagttggccacgtcttggcttcctgacacattttagaagtgccgctcagcgggctatgcaggccgaagacgggcgtctggacgtgtttttacggttcttgagcggcttgctttccccccgtgtaaacgccctgctggccggatcccttctagcacaaggagaacaccaggcatatagaactcaggttgctgaactccttcaggggtgcttgcggcctgacgccgctgtttgtgccagggccatcaatgtgctccactgcttacatgagctccaacacacagagttggctaggtccgtggaagaggccatggaaagtggtgcattggccaggcttacaggtcccgcacaccgtgctgcactggcctatcttttgcaagtttcagatgcatgcgcacaggaagctaacctttccctgtctctgagccaaggcgttctgcagtcccttctgcctcagctcctctactgtcggaagctccggtggattcctggccagggagctggagccggtgaaggggcagaggagcgcgcagaggcagtgccctcgcccccaccaagcttttctgtgtccctcctcggcctgccgtag

SEQ ID NO: 28058 - DNA, 1152 bp, synthetic construct
  source 1..1152: mol_type = other DNA; note = Synthetic coding sequence
atgctgtctaggaaaaagacgaagaatgaggtttcaaagcccgctgaggtccagggcaagtatgtcaagaaggagacctccccactactcagaaatctgatgccttctttcatacgccacggtcccaccatcccacggcgaactgatatctgtttgcccgacagctcccccaacgcattctctactagtggcgatgtggtgagccgtaatcagtcctttctcaggacaccaatccagcgcaccccacacgaaataatgaggagggaatctaaccgcctttctgcccctagctatctcgcacgctccctcgcagacgtccctcgagaatatggttcttctcagtcctttgtgacagaagttagcttcgcagtcgaaaacggcgactcaggatctcggtattactatagcgataactttttcgacggccagcggaaacggcctcttggtgaccgggctcacgaggactatcgttattacgaatataaccatgatctctttcagagaatgccacaaaaccaggggaggcatgcctcggggatagggagggtggccgctaccagcctaggcaacctgactaatcatggttctgaggatctgccgttgccccctggatggtctgtcgactggaccatgagggggagaaaatattacattgaccacaacacaaatacgactcactggtcgcacccactggagcgggaaggcctccctccaggttgggagagggtcgagagctccgaattcggaacttattatgtcgaccacaccaacaaaaaggcccagtaccgtcatccatgtgccccttccgtcccaaggtacgaccaaccaccgccagttacatatcagccccaacagactgagcgaaaccagtccctcctggtgcccgcaaatccctatcacactgctgaaataccggattggttacaggtatatgcccgtgcccctgtgaaatatgaccacatcctcaaatgggagcttttccagttggcagacctcgacacttaccagggcatgctgaaattgctgttcatgaaagagctggagcagatcgtgaaaatgtatgaggcgtaccgtcaggcactgctgacagaactggaaaaccgtaagcagcggcagcaatggtacgcacagcagcacggaaaaaacttctag

SEQ ID NO: 28059 - DNA, 2376 bp, synthetic construct
  source 1..2376: mol_type = other DNA; note = Synthetic coding sequence
atgagtaatcagcaggagaaatatgaagctcaaaacatagttaattccaccgaagagtctgatgacgccttcgacaccgtgacaatacccgtgcctagcgaagagcctcaggagagtgaccaaaccgaagagcacgagtctggcatagagcagtttagcgaaagccacgcaattcacgttgaggagcagtccgatcagagcttttccagcctggagcccgataacgagcaactgatggaggaagttatttccccaaggcaggtgtcctatactccccagcaccatgagaaacaatatgccatgcagcgtcctaatgatgattctctggcgtttctggacaagataaagtcagtcaaagaatccctgcaggaatctgtagaagactctttagccacggtgaaggtggttctcatccctgtgggccaggaaatcgtgatcccattcaaagtggatactatcctcaaatacctgaaggaccatttcagccaccttcttggtattccccactcagtattgcagatccgctattcgggcaagatcttaaaaaataacgagaccctcgtgcagcatggggtgaaacctcaagagattgtccaagtggagattttcagtactaatcctgacctgtatcccgtacgtcggatcgacggtttgaccgatgtttctcagatcattaccgttaccgtacagaccgggctggaccaataccagcaggtccctgtggaaattgtcaagtctgatttccataagccttttcttggaggattccgacacaaagtgaccggcgttgagtatcataacgccggaactcagaccgtacccaagcgtatcccagaacgcctaagtatcttctgtcgagacacccaaacggtgtttcagaaaaagaacctgcaacagaccaccaatacaactagcacccagatgacaaatatcggagtttacgtgagtaacatgacagacaagctcgtcacccctggcaagtatttttccgccgctgaataccacgcccaacgacttaaggccgtcatagtcatccaaacttactatagacagtggcacgccaagatcttcgttgagaatctacgtcgccagaagtccctgaggctggagtgggagacacaacaggaactgagaaaaattagagaaaaggaagagtggattaagctggattatcacaggcggcataatcccaagacaaatgaagactttgagtttctgtataatgcactagagttttggcgacaggaggaattgacacggatcaaccaatccttcacaggggctgaacgaaaggccgctttatgcgaactgctcgaaaaagagacccaaatcattgcaagtatcggtcgccacaggtacattgcctatatggccaaccaggaggccgctattcaagctttccttgacaagtgtagtgcaccaaaaatttggcgcacaccaaatggtaaaacaatcgagatggacacccagttcacaattagggcgagggagctccagaatatctacaaatgtattatgcttaagaacatttctcaggacgaacgcctggacgtgctgcttaccctgaagcatacagtcaaagaacatgagtgcaagctgactcaagaaatcctggaattgattgatagagaggtggatcttatgatgaggggcgttaagcaccacaaccttgaaggtctgcgcaaacggatagcgacactcttcttccattacataaaaactcctttattcaatcccgaagtggctaagtacctgaaagtgcctcaggatccactgaagttctacaagaagatctacttctgccattcctgtcagttatacctcccttcaacagagttcagcgtgagttccacatctagacgaatctaccgctgtcgcaattgtatcaatttacaaaatgaggctcagaaacgggagtcttttttgaaatataaatgtctgttgcaacaactgtattatacggaggccgactacgaggatgactcaaaaattgccttcctgatgcagctccaggacatccagtacctcaccgaaaatatttgggccagccagtcagtgctgtctgcatgcgataacctatctgatctggtcatggtgaggtggaataaaagcctcgagtggtccccttggaattgcatattgctgaccaaggacgaggcagcggctcacctcaagctgacttccattgaagaagggtacgaaagatcgttcattcacaagattaaacataaacatatcttggccaaaaattacttcagccaagtccctgttctggctagttttatcctggacgacggcgaaatagatgagatcaggtggaaataccactctgacaccacaccgaagatcattgagtctcaacgaccgccacactag

SEQ ID NO: 28060 - DNA, 1767 bp, synthetic construct
  source 1..1767: mol_type = other DNA; note = Synthetic coding sequence
atgagttcctgcgtatcgtcccaacccagtagcaacagggcggcacctcaggacgaattagggggacggggatcctcctcctccgaaagccagaagccatgcgaggcactccgtgggttatcaagcctgtcaatccacctgggcatggagagcttcatagtcgtgactgagtgcgaaccaggatgcgcggtggatcttggacttgctagagacaggcctctcgaagcagacggccaggaggtaccgctggataccagcggatcccaggcccgtccccacctgtccggacgaaagctctcactccaagagaggtctcaggggggactagcagccggagggtcgttagatatgaacggaaggtgcatttgccccagccttccctattctcctgtgtccagtccgcagtccagccctagacttcccagaagaccaacggtggagtcccatcatgtctctattacagggatgcaagattgtgtgcaactgaatcagtataccctcaaggatgaaattgggaagggctcatatggagtggtcaaactggcctataatgaaaatgataatacctattatgcaatgaaggtgttatctaagaagaagctaatcagacaggctggttttccgaggagaccacccccaaggggcaccaggcccgctccaggcggatgcatccagcctcgaggccctattgagcaggtatatcaggaaatagcgatcctgaaaaagttggatcatcccaacgtagtgaaactggtcgaggtgctcgatgatcccaacgaggatcatctgtacatggtttttgagttagtcaaccaggggcctgtgatggaggtgcccaccctgaagcctctcagtgaggatcaggccaggttctactttcaggatttgatcaaaggtattgagtaccttcattaccagaaaataatccaccgagacattaagccatccaacttactggtgggagaggacggccacatcaagatcgcagactttggcgtgagcaatgagtttaagggctcagacgcattgttatccaataccgtcggaacaccagctttcatggcgcctgagtccctttccgagacacggaagatcttctctgggaaagccctcgacgtctgggcaatgggagtgaccctgtattgctttgttttcggtcagtgcccttttatggacgagcgaatcatgtgtttacactccaagatcaaaagtcaggccttggagttccccgatcagcccgacattgctgaggatcttaaggatttgattaccagaatgctggacaagaatcctgagtcccgaattgtggtaccagagatcaagctgcatccttgggttactcgtcacggagcggagcccttgccctcggaggacgagaattgtactctcgttgaagtgactgaagaagaggtcgaaaacagcgtcaagcatatcccttccctggcgacagtcatcctcgtgaagacgatgattcgcaagagatcattcgggaatcccttcgaggggtcccgcagagaggaacgaagcttatcagctcccggtaatctgttaacgaaaaagccaactcgcgagtgtgagagcctttcagagttgaaagaagcgaggcagcgccgtcagccccctgggcatcgccctgctcctcggggtggaggcggtagcgcactggtccgcggtagcccctgtgtcgaaagctgctgggctcccgcaccgggatctccagccagaatgcacccgctgaggccggaggaggcgatggaacctgagtag

SEQ ID NO: 28061 - DNA, 2052 bp, synthetic construct
  source 1..2052: mol_type = other DNA; note = Synthetic coding sequence
atggccttatccaagcgcgaactcgacgagctgaagccctggatagaaaagaccgtgaaaagggtgcttggattttctgagcctactgtggtcaccgccgcattaaactgtgtgggaaagggaatggataaaaaaaaggccgctgatcacctgaaaccatttctggatgacagtactttgaggtttgtcgacaaactcttcgaagccgtggaagagggtcgatcatccagacactcaaaatcttcatccgatcgaagcaggaaacgagagcttaaagaagtcttcggggacgactctgagatctcaaaagagtcttccggcgtcaagaagcggagaatccctcgatttgaggaggtcgaagaggaaccagaggttatcccgggtcccccatcagagagccctggtatgctcaccaagctccagataaagcaaatgatggaagcggcaacacgacagatcgaagagcgcaagaaacagctttctttcatctcccccccaaccccacagcccaaaaccccatcctcatcccaacccgagcgtctacccattgggaatacaatccagccatcccaggccgctacgtttatgaacgatgccatagagaaggcacgcaaggccgctgagcttcaggctcgcatccaggcacaactcgctctgaagcccggactgatcgggaatgcaaacatggttggactcgctaacctccatgctatgggaattgcgccacccaaggtcgagttgaaagatcagaccaagcctacacctctcattctggacgagcaaggaagaacagtggacgcgacaggaaaggaaattgaactgactcaccgtatgcccaccctgaaggcgaacatcagggccgtgaaaagggagcagtttaaacaacagctcaaagaaaaacctagtgaggatatggaatccaacaccttctttgacccgagagtaagcatcgctccgtcacagcgacaaaggcgcacattcaagttccatgataagggcaaattcgaaaagattgcccagcggctacggaccaaggctcagttagaaaaactccaggctgagatttctcaagccgctaggaagacgggaattcacacctctacacgcctggctctgatagcacctaagaaagagctaaaggaaggagacattcccgagattgagtggtgggactcttacatcatcccgaatgggttcgacctgactgaggagaatcctaaaagagaagactactttgggatcacaaatcttgtggaacatcccgcacagctgaacccaccagtcgataatgatacgcctgtcacactgggagtgtaccttaccaagaaagagcaaaagaagctccggagacaaactcgtcgcgaggctcagaaggagttgcaggagaaagtcagactgggtttgatgccccctccggagcctaaagtacgcatctccaacctgatgagggtccttggcaccgaagcagtacaggaccccactaaagtggaagcccacgttcgggctcagatggctaagaggcaaaaagctcatgaggaggccaacgcagcaaggaagctgactgccgagcagcgaaaggtgaaaaagatcaagaaactgaaggaggatattagtcagggggtccatatctcagtctaccgcgtcaggaatctctctaaccctgccaaaaagttcaagatcgaggcgaacgctggtcagctgtaccttactggcgtggtggtcttgcataaagatgttaatgtagtggtcgtcgaggggggaccaaaggctcagaagaagtttaagcggttaatgctgcataggattaaatgggacgaacagactagcaatacgaaaggagacgacgacgaggagagcgatgaggaagcagtgaaaaagacgaataaatgcgtcctagtctgggagggcacagctaaggatagatcttttggggaaatgaagttcaaacagtgtcccaccgaaaatatggcacgcgagcatttcaagaagcatggggcagagcattactgggacttagccttatccgaaagcgtcctagaatcaacggattag

SEQ ID NO: 28062 - DNA, 1938 bp, synthetic construct
  source 1..1938: mol_type = other DNA; note = Synthetic coding sequence
atgagtgataagtcagatctgaaagcagaactagagagaaaaaaacagaggttggctcagatccgtgaagaaaaaaaaagaaaggaggaggagaggaagaagaaggaggcagatatgcagcagaagaaggagcctgtacaggacgactccgatttagatcgaaaacgcagagaaactgaggctcttctgcagtctatcggcatttctcccgaacctccactggttcagcctcttcacttcctgacttgggacacgtgctactttcactacctggtccctacacccatgtcaccatcaagtaaatctgtctccactcccagcgaggccggttctcaagacagcggggaccttgggcctctgacaaggactcttcagtgggacacagatccatctgtcctgcaattgcagtccgatagtgaattgggtagacggctacataaactgggggtgtccaaagtgacccaggtggattttctaccgagagaggtcgtttcttattccaaagagacccaaacccctcttgccacccatcagagcgaggaagacgaagaagacgaagagatggtcgaatctaaagtggggcaggattccgagctggaaaaccaagacaaaaaacaagaggtgaaagaggcccctcccagagaactgaccgaggaggaaaaacaacaaatactgcattctgaggagtttttgatttttttcgatcgaactatcagagtcattgagcgagcacttgccgaggactcagatatcttttttgactatagcggaagggagctggaggagaaggatggggacgtacaggcgggtgctaatctcagcttcaaccgacagttttacgatgagcactggagtaaacaccgcgtggtgacgtgcatggactggagtttgcagtaccccgagctgatggtggcttcctataataataacgaagacgcaccccatgagcccgatggggtcgccctggtgtggaatatgaagtttaagaagacaacgccagagtatgtgtttcattgccagtcatccgtgatgtctgtgtgtttcgctaggttccaccctaatctagtagtggggggaacttacagcgggcagatcgtactgtgggataaccggtcccataggcgcactccagtgcagagaactccactgagtgccgcagcccacacacaccctgtctactgcgtcaatgtagtgggaactcagaatgcccacaatttgattaccgtatctacagacggcaaaatgtgcagttggagccttgatatgctttcaacgccacaggaaagtatggagctggtttacaacaagtcaaaacccgttgcggttacgggtatggctttccccactggggacgtgaataactttgttgtggggagtgaggaggggactgtgtacaccgcctgcaggcatggcagtaaggctggcattggagaggtatttgagggccaccaaggcccagtaacaggcattaattgtcatatggcagtaggcccaatagatttttcgcacctgttcgtcactagcagctttgactggaccgtcaagctgtggactaccaagcataacaagcccctctactctttcgaggataatgctgattacgtatatgacgtgatgtggagtccagtgcacccagcgctgtttgcttgtgtggatgggatgggacgattggatctctggaacttgaataacgacactgaggtgcccactgcgtcagtggccatagaaggagcctcagcactcaacagagttcgctgggcccaggcaggtaaagaagtcgcagtcggggattcagaaggcaggatatgggtctatgatgtaggagaactggcggttccccataatgatgaatggactaggtttgctcgcaccctcgtggagatcagggcaaacagagcagattcggaggaagaagggactgtcgaattgtctgcctag

SEQ ID NO: 28063 - DNA, 7805 bp, synthetic construct
  source 1..7805: mol_type = other DNA; note = Synthetic coding sequence
atgaagaggaaagtcgttaatacccacaagttaagactctcccccaacgaagaagctttcatcttaaaagaagactatgagaggaggaggaaacttcggttacttcaagttcgggaacaggagcgcgacatcgccctgcagattcgcgaggatatcaagcaacggcgaaaccagcagttcactagacttgccgaagaattgcgcgctgaatgggaagagagtcagactcagaagattcaaaatctcgagaaactctatctcgcttcactacggtcaatgggagaaggtcaccgccaggctaaggagaatgagcctgacctcgatgcgttggcccaaagagccgctgagcgcaaaaggaaagccgacctgcgccacaaggaagcacttaaggtgcaaaagaatcagaaagaaattttgcttaagcagaagacttggcacataaaagccaggaaggaggctctcttggtagaaaaagaacgatcagcaaagatcacttctctccctccccctccccctacattgttcgaaaacattgaggttaagaggattagtgccgtaaagacgaacagcagcacgtaccatcatttgcacaccttcgtcaacagagagaccgataccaagagacccgatgcaagattggctgctgaggaagaggctaaacgtctggaagagctgcaaaaacaggcagcacaggaacggatggaaagatttgaaaaggcacacgtgcgaggctttcaagctatgaagaaaatacatctcgctcagaatcaggagaaattaatgaaggagctgaaacagctgcagcaagaagacctggccagacgcaggcagacagtggcacagatgcctccgcaactcgtcgagctcccttataagcggagcgaaatgaaggaggattggcagagggagctagagttcgctttcgaagatatgtataatgccgaccggaaggtcaagggcaaccttatcctgcacctggagccagaaccgttacccacggtcaccaaccaaattcaggacgaagaactggacctgtcgatggagcaggaaaatctcggcgcagccgaggatcttcccgtcaccgaagctgaaatctgctccagtgaaaccgatgtccccctcgtaatgaaaactcagcagatcccatcaaaagtcctgtttaaaaaactcctaaacaagattagatcccaaaaaagtctctggaccatcaaaagcatgagcgaagatgagtctgaaatgatcacgactgtgagcgagattgagtcgaaagcccctacagtcgagtctggcacaatcgcgtccaaggaacgaaccctgagctctggacaggaacaggttgtagagtctgatactctgacgattgaatctgggccactagcttcggaggataagccactgtcgtgtggtacaaactccggcaaagagcaggagatcaacgaaaccctgccaattaccaccgttgcgcagagctccgtgctcctgcaccctcaggaagcggctgctcgaatacggatgagcgccagacagaaacagattatggaaatcgaggaacaaaaacagaaacaattggagcttctggagcagatcgaacagcaaaagcttaggctcgaaacagactgctttagagcccagctggaggaggaaaagcgcaagaaaacccagcccacaggagtcgggattgcccctgcgagctgcccagttatctccgatgaggattctcacaggcagatgatccgcaactaccagcatcaactccttcagcaaaaccgtctgcacagacagtcagttgaaaccgcgcgtaagcaattattggaatatcaaaccatgctaaagggaaggtgcccttcagtatcggccccaagcctgatcaccgatagcgtgatctccgtgccttcttggaaatccgaacgaccaacagctatctcggagcattgggatcagggacagagactgaagctgtctccaaacaaatatcagccgatacaacccatccagacatctaagttggaacaggatcatttccaggtggccagacaaaaccactttccccagcgacaggtggagactaccgagactttgagggcatctgacatcttgacaaatcaagccctcgagtctcaggaacacttgcggcagttttcccagaccgagacccagcagcgggactacaagctggtcccaaaggacagcgagacattgtctcgcgctctgtcacacgaccggcagctgatcagtcaggacgccagaaagatctcggagacgttcggagccacaacgtttcagagcctggagagccaacagctcttcagcgagaattctgaaaacatctcctatcatcttaccgagccatcatcttttgttccgctcgttccacagcactctttcagttcattgcctgttaaggtggagagtggcaagattcaggaaccattctctgcaatgagcaagagcacagtcagtacctctcacagcatcatctcccagatgcatgataggccactactgccctcggaaaatattaccgcgcaacagggtaatatgaaggccctgcaggagcagctcgacctccagaagaaagtgctgcaagccacccaggaagcgcaggagcagctgctgctctgtaagcagaaggaagttgaacaacagaccggtctcagtgtgtttctgccactggttacacccgacagttccgctctgctcccaagcgccaaagccgaccttggcagaatccaagagagttctcccaccaagaacaacattgccgtaagcagcgaccatcatgtgatctctcagttgcaggataaaagactctcgctgtctcagccaatcctgtctcagcagaataattttaagtttttgcaagagcaactgaatatacagaaggattctctccaggctcggagggaggcgcaggaggtcctgtatgtccataaacagtctgaattagaccggcgagtctgcagcgagcaggcggagcctagctttccttttcaggtcgcacagcatacgtttacctccttacccagtgcagacactaagagtggaaagatccaagaacagcacagcagtaagtccgagaaggggttagtttcctgtcagagcgacatccccatatctcaggacgggtcactgagcttcctccagcagttcttgcccctgcacgattccctcaagctgctacaggagcagctgaccaaacaaagagatactctgcaagctcgacacgaagcacaagtagagctgttacttcacaggcagagagaccttggggattcaaagtctgggctggtaagtagttcctcatcaccagtagtggtacagcattccgtcgcttcacaggccagcgccaaagccgagccccgtcgcattcaggaattatatctgagcgaaaaggagaacgtgggaccatcctgtcacctcattatccccacttttcaggacaagagtttgtcattcccccaacacagtctcgcccagcaggaaaatttgacaatacttcaggagcagtcacagattcagagagtcatcttaggtgctaaagaaggcacacaggaattcgtccatacggaatcggagctggagaaacgaatctctagtgaacaaacaggcacatcctcaagcctcagtcaggtggacgagtccgagcgatttcaagaatgtatttccataaaaagcgacagcacaatccctctaagtcacccaaaaatccccaggtgccaagaacgtctcttaagagtgagccagcatatgctccctctgcaggacaacctcgaagaacatcaagcgtggctggataccgaaaaagaagcttttcacttctctcaaaaaacgcaggagaataccagtagtgaacagactggctctagttctttcatccctcagcttgtacagctgagcttcacctctctggcctccgctgaaagcgggacaatattagaacccttgttcaccgagtcagaaagcaagattttcagctcgcaccttcagatcccccagcttcaggacaggttacttcgaatttctcaactcatccaaccacaacaggataatctgaaagccctgcaggagcagctggccacgcagcgtgaggcaataatcctcgcacggcaggaagccagagaagagctactattgcatcagtcagagtgggaggggcgtatttctccagaacaagttgataccagttcactccctttggtaccgcagcacagtttcgcctcactacctttgaacgagtctgagagaaaccaggaaccctgctctattaacagtgataatatcgtctcatcagggcactcagaaatccctaccctgcctgacggcctgctgggcttgtcccacctggtcctaccccaacaggacaacctcattgctctggaagagcacctgcacgctcagacagattttctcccttcaatcgagaagacccagaaggagctagtgctttccaaaccctgtaagttcgaagagaaagtatccagtgaacatttcatccaatctcatcacggagatttgcaagcgctccaacagcaactggacacacagaaaaaggcaatccggagtatccaagaggtgcaagaagaactgctactacaacgcctgtctgagctggagaaaagagtctcctcggagcaggtgtgttcaagcagctttgtgtcccaagtgcctgtagcggattctgagcgcactcagaaatctttccccacaaagtcaaacgacaccctaccatcttcacaccgggagattccccgtctgcaagatcggctcctatccttgagcaagcctatccttccccagcaggacaatatgactgcccagctggatgctcagagagaggtgatgtactcctatgagaagccacaggaagagctgtctctgaataaacaacggaaactgaataagagcgagtcggctgaacacacaatcccctctctgtttctgcccaaagagacagagcatagttttattcccctgccctttgcagaagccaagccaaaatccacctgcgagctgtattccagccaaaatgagcacgccgcacccccatcaaatcctgttattcctggctttcaggataggctgctcagcttctctcagagcgtgctaacccagcaggataacttgggtcttcagaaacaactggatctccaaagggaggtgttgcattattcccagaaggcacaagaaaagttgttagtgcagagacagaccgcattgcaacagcagattcagaagcatgaggaaaccttaaaagactttttcaaggactcgcagatctcaaaaccaacggttgagaacgatctcaagacacagaaaatggggcagctcagagattggttcccaaatacccaagatttggcagggaatgatcaagaaaatatcagacatgctgacagaaataactctgacgacaatcacctggcctctgaagacacttccgctaagcagtctggagagcaccttgaaaaagacctgggtcgccgttcttccaaaccgcctgtcgccaaagtcaagtgtggactagatctcaaccagcatgaactgtccgcaatccaggaagtggaaagccccgcaataggcaggacaagtattctgggtaagccagggatatacgaagacagggaccctcttcgggtgtccatttccagagagcaatccttttttggaagtccactcgctcacgatcctttttcctgcttacagctcgtgggacaggaaaacgtctgtggtgatgactatgacgaggccgtgaaacttaaagagagcgttgttgagaatcacgcagttctgagttatgctgtcgaggaagaacacgcctatctcgggcctaccgtgaagccagacgacaaggctaaaacgttatcctacgagcctctctcaagtgccaccgtgagcaccgggtctctgctgtcctacgaaaataccgatctgagcctcacagacccggagagttttagcgagcacatggacgatagcaagcaggagagcacgacttcaaaagaagaagaaaccaatatcattagctctatagtgccaagtactcaggacatctaccagagacaaaacagctccgatgtgcataagtctctgttgcccgcagtggacgaaacgacatgtgggcatacccatttccaacaaatgatcgataaatacattaacgaagcgaacttgatcccagaaaaaaccgatcttcaggagttggaacacatcttccccaatctgcaccaccaactgtttaagcctctggagcctcacccagactttgatttaagttcgagcagttccggcattagccctgacaatcgtgacttttaccaaagatcggattcgtcctccgaatctcactgtgctactggcctatccaagtccaccgtctactttacagccctacggaggacttcaatgcacagttcacttaatacctccccaaatcagcagccagacaccaacttagctcacgtgggggctcattctttcgcgacagagaacatcataggcggatcggagcagtgctttgaacagctgcagcccgagtattcaagccaagaagagtcacagcatgctgacctcccttccatcttcagtatcgaagcacgggactccagccaggggatgaagaatcaaaactatcctagcgaagagcacactgaaatcctccagaacaaaaagaaaattgtgcatttccagctaagcatcggtaacctcagttctgtgtacagttcgtctgatgaggcaaatgtgtttgaccagcttaatgtacagcacagtactccttgtggctctaactcttccgaatgctcaactaagcaccagcttgaatcacggaaggagtcgatgggtttcgaggaactctctaaaaggggagtggtcactatgctgcagtcccagggattaatcgaggataacaaaaacgaaacttgccgggtcttggatattaaccctcaggtggaagagacagattcaaggctgtgcgttagaacagtggagatgggcaccagcatccaggcaccttacagtttgaccacccagaatgagaaatattttgaaaatagtgcggagaccgatattcccaagataaccaaaaaactgagccaactgggtgagtcagaactgttcgcaagctccggctccttttcactgcaaagctccattcccgtctgggaaaccgaaacaggccacggtataatggaggaacctgagctcacattgatttcaaccacagatactagtattgcagagatggattttgccaatcttaccctggaggagaagtccgagaatgaagccaagtgtttttttcaggtttccgaattcctgccactggtttcagcgacagaagcgtcagattaccccgctgtgagtgagttgagtatagaaaaacccagaaccgcttctacagagaccccgaggcggctgacccctgttcctggttccttgcaagaggcctttattaagaggaagaaatctttcatggaacggtctcatcagagacagaaggaaatccgcaacaagattcacgtttcagaaaatagccagatcaagacagtgaaagaaaaaccctccatttcctcctcggtgtcacgactcaaaggtgtcaacaaggttcgggcttctttccccgaggatcgcaagaccacacaagccctccggcaccaacggggtctccgcctgtataaccaattggctgaagttaagcagcaaaaagaggagaaaaccaaacaggaagcctacgcccaaaaccgcgctcgggctaaagaatttcataaaaagaccctggagaagcttcgcgcaaagaatacctgcta

SEQ ID NO: 28064 - DNA, 2397 bp, synthetic construct
  source 1..2397: mol_type = other DNA; note = Synthetic coding sequence
atggctgcttctctgcctggccctggaagccgactgttcagaacttacggtgccgctgacggacgcagacagcgcaggcccggacgagaggctgcgcaatggtttccccctcaagaccgtaggcgcttctttaactcctctggctccagcgacgcctcgattggggaccctagtcagtccgacgacccagacgatcccgacgaccctgacttccctgggtcacccgtgaggcgccgaagacggcgtccagggggacgggtccccaaagatagacccagtcttactgttactccaaaacgttggaagctccgtgcacgccctagtctgacggtcaccccgaggcggctcgggctacgggctagaccaccacagaagtgtagcactccttgcggcccattgaggctccccccttttcccagcagggatagcgggaggctgtcgcccgacctgtccgtatgcgggcaacctcgtgacggtgacgagctgggtatcagcgcatccttattctctagcctcgcctccccctgtcccggaagtcctacgccgagagattccgtgattagtatcggaaccagtgcgtgcctggtggccgcatctgccgttccaagtgggttgcatctgcccgaagtctctctcgaccgcgctagtctcccttgctcacaggaagaggcaacaggcggtgctaaggacaccaggatggttcatcagacccgggcatccctgcggtctgtgttgtttgggctgatgaattccggcactccagaagactccgaatttcgagccgacgggaagaacatgcgtgaatcctgctgtaaacggaaactggtggtcggcaatggcccagaaggtccaggcttgagctcaaccggcaagcgtagagccactggccaggactcctgtcaagagcggggtttgcaagaagcggtccgccgtgaacaccaggaggcgtctgttccgaaggggaggattgtccctcgagggattgatcgactagagcgcactcgttcttcacggaaatcaaagcaccaagaagccacagaaacttctctacttcattctcatagatttaagaaggggcaaaaactgggcaaagacagctttccgactcaagacttgacccccctgcagaacgtttgcttttggaccaagacacgcgcttccttctccttccataaaaaaaaaattgtgactgacgtgagcgaggtttgctccatttacaccaccgcgacctctctgagtggatctctgctgagtgaatgcagcaatcggccagtgatgaatagaacttcgggtgcaccatcgagttggcattcaagctcgatgtatctcctgtcgcccttaaacaccctcagcatctctaataagaaggcctccgacgcagagaaggtctacggcgagtgtagccagaagggcccagtccctttttcacattgcctgcctaccgagaaattgcagcgatgcgagaagataggtgagggtgtgtttggcgaggtgtttcagactatcgcagaccatacccctgtcgccataaagattattgctatcgagggccctgacctggtcaacggtagtcaccagaagacctttgaagaaatcctccccgagattatcataagtaaggagttgtctttattatctggtgaggtttgcaatcggaccgaggggtttataggtttgaactctgtgcattgtgtgcagggtagctacccccctctgctgctgaaggcttgggatcattataactccaccaagggttccgcaaatgatagaccggatttcttcaaagacgaccagttgtttattgttctcgagttcgaattcggcggtatagacctggagcagatgcggaccaagctgtcaagtctcgccaccgccaagtctatcttgcatcagctgacagcaagcctcgcggtcgccgaagcctccctcaggttcgagcacagggacctacactggggcaatgtcctgttgaaaaaaacttcacttaaaaagcttcactatacgctgaatggcaaaagcagcactatcccctcatgcgggctgcaggtgtctattattgattacacgctctcccggctggaaagggacggtatcgtggtcttttgcgacgtgtccatggacgaagatttgttcaccggcgatggtgactaccaatttgacatttaccggctcatgaagaaggagaataacaaccgctggggcgaataccacccatattccaatgtgctgtggttacactaccttaccgacaagatgctgaaacagatgaccttcaagacaaagtgtaacacccctgcgatgaagcagatcaaacgaaagatccaggagtttcacaggactatgctaaacttctcatccgcaacggacctgctgtgtcagcactcactgttcaaatag

SEQ ID NO: 28065 - DNA, 765 bp, synthetic construct
  source 1..765: mol_type = other DNA; note = Synthetic coding sequence
atggtgagggaggctaatattaagcaggctacagccgaaaagcaactcaaggaggcccagggcaagatagacgttcttcaggctgaggtggctgcactcaaaacgctagtactcagctcctccccgacatcaccaacgcaggagcccctgccgggtggaaaaacgccctttaaaaagggacacacgcgcaataagtcgacatcctctgccatgtccggatcccatcaagatctgagcgtcatccagcctattgtgaaagactgcaaggaggccgatctgtccctctacaacgaattccgactgtggaaggacgagccgactatggacaggacttgcccatttctcgacaaaatctaccaggaggatattttcccttgcctgacgttttctaaatctgagctggctagtgccgtgctggaggccgtggaaaacaataccctgagtatagagcccgtggggctgcagcccatccggtttgtgaaggcgagcgcagtcgaatgcggcggtccaaagaaatgtgcgctcacaggccagtctaagagttgtaagcatagaatcaaacttggtgacagtagtaattattattacatcagccctttctgtaggtatcgcattacgagcgtttgcaatttttttacttatatcagatacatccagcaaggcctggtgaaacagcaggacgtggatcagatgttctgggaagtcatgcagctgcggaaagagatgagcctagccaagctaggctatttcaaggaggagctatag

SEQ ID NO: 28066 - DNA, 1077 bp, synthetic construct
  source 1..1077: mol_type = other DNA; note = Synthetic coding sequence
atgtacgctagccagtggttcttaaccctgtttaccgctaagtttcctctgtgcatggtgtttcatatcatcgatttgctcttatgcgaagggctgaatatcatcttccacgtcgccctagcactgctgaagacgagcaaagaggacttactccaagcagatttcgagggcgctttaaagtttttccgggtccagctgcccaaaaggtacagggcggaagagaacgcacggcgtctgatggagcaggcgtgtaacattaaggtacctaccaagaagctgaagaagtatgaaaaggaatatcagacaatgagggagtcccaactgcagcaggaagacccgatggaccggtataagagggagaaccggagactgcaggaggccagcatgcgactggaacaggagaacgatgacttggcacacgagttggtcacttccaagatcgcgctaaggaacgatctcgatcaagcggaggacaaggctgacgtgctgaacaaagagctgctcctaaccaaacagaggctcgttgaaaccgaagaggagaagaggaagcaggaggaggaaacagcccagctgaaggaggtcttccggaagcagttggagaaagccgaatatgagatcaaaaaaaccaccgctattatcgcggaatacaaacagatctgcagtcaacttagcacaagactggaaaaacaacaagctgcgagtaaggaggagctcgaggtggtgaagggcaagatgatggcgtgcaagcattgttccgacatattcagtaaagaaggagcgctgaagctcgccgctacaggcagagaggatcaggggattgaaacagacgacgaaaaggactcattgaaaaaacagctgcgcgagatggagctggagctggcccagacaaaactgcaactcgtcgaagcaaagtgcaagatccaggagttggaacaccagagaggtgccctgatgaacgaaatccaggctgcaaagaattcttggttctctaaaacccttaacagcataaagaccgctaccgggacccaaccactgcagccagcccctgtaacgcaaccacccaaagagtccacatag

SEQ ID NO: 28067 - DNA, 2436 bp, synthetic construct
  source 1..2436: mol_type = other DNA; note = Synthetic coding sequence
atgccactttcatccccaaacgctgccgctactgcaagcgacatggataagaattctggtagtaactcctcttccgcatctagcggttcaagtaagggccagcagccgccacgtagtgcttccgctggacctgctggggagtccaagcccaagtccgacggaaagaacagctccggatcaaaaaggtataatcgaaaaagagagctgtcgtatcccaaaaatgagtctttcaacaatcagtcaagacggagttccagccagaagagcaaaacattcaacaagatgccacctcagcgtgggggaggatccagtaaactcttctctagctcctttaatggcggtcgcagagacgaagtcgctgaagcccagagagccgagttttctccggcacaattttcgggcccaaagaaaattaatctaaaccacctgctcaattttacatttgagcctaggggtcagacagggcacttcgaggggagcgggcacgggagctggggtaaacgaaataaatgggggcacaagccatttaataaggagttattcttgcaggccaattgccaatttgtggtcagtgaggaccaggattatacagctcacttcgctgatccagatactttggtcaattgggactttgtggaacaggtgagaatctgcagccatgaggtccccagctgccccatttgcctctacccaccgaccgctgcaaagatcactcgatgcgggcatatcttttgttgggcctgcattcttcactacctgagcctgagcgaaaagacctggtctaagtgccctatttgttattcatccgtgcacaagaaggatctcaaaagtgttgtggctactgaaagtcaccagtatgtggtaggggatactattacaatgcagctcatgaagcgggagaaaggcgtgctggtggcgctgccgaaatcgaagtggatgaatgtggatcaccctattcatctgggtgatgagcagcactctcaatattctaaactgctgctagcaagcaaggaacaggtcttgcaccgcgtggtccttgaagaaaaggtagccctcgagcagcagttggcagaagagaagcacacgcctgagtcctgcttcattgaagcagccatccaggagctgaaaactagagaggaggcactgtccggactggctggtagcaggagagaagtgaccggtgttgtggccgctcttgaacagcttgtcttgatggcccctctggcaaaagagtctgtgtttcaacccagaaaaggagtgcttgagtatcttagtgcctttgatgaagagactacagaagtgtgctcgctcgacacaccctccagaccactcgctcttccactggtcgaagaggaagaggcagtgtcagaaccagaaccagaaggactgccggaggcctgcgatgacttagaactggctgatgataacctgaaggagggtaccatctgcactgaaagcagccaacaggaacctatcacaaagtcagggtttaccaggttgtccagttctccttgctactacttttaccaggctgaggacggacagcacatgtttctgcaccctgtgaacgtgcgttgcttggtgcgggaatatggatctctggaaagatctcccgaaaaaattagtgcaacagtggttgagatagctggctacagcatgagcgaagacgtgcggcagcgccatagatacctttcccacctccccctcacttgtgaattctcgatttgcgagctggccttacaaccgccagttgtgagcaaggaaacactggagatgtttagcgacgatattgagaaaagaaagcgccagaggcaaaaaaaggctcgagaagaacgccgacgcgagcggagaatcgagatcgaggagaataaaaaacagggcaagtatccagaggtgcacattcctctggaaaatctgcagcagttccccgcttttaattcctacacctgttcctcagacagtgccctcggacccaccagcaccgaaggccacggagctttgagcatttctcccctgtcccgttctccgggttcccatgccgatttcttgctgacacctctgtcacccacagctagccaggggagcccttccttctgtgttggctcgctggaagaggactctccattccctagctttgcccaaatgctgcgggtgggcaaagctaaagccgatgtttggcccaagaccgcgccaaaaaaagatgagaattccctggtgcctcccgcacccgtggactcagatggcgagtccgacaattctgacagggtgcctgtgccaagcttccagaattcattctctcaagctattgaggctgcattcatgaaactcgacaccccagcaacgtctgaccccctttctgaagaaaaaggcggaaagaagaggaagaaacaaaagcagaaattgctgttttctacatccgttgtccatacgaaatag

SEQ ID NO: 28068 - DNA, 5825 bp, synthetic construct
  source 1..5825: mol_type = other DNA; note = Synthetic coding sequence
atgaagaccagcgaccttgttcccagtttcgggtatttcatcaggtctccagagaaacgtgaacctatcgccttaattcgaaagagtgatgtaagccggggaaatctggagaaagaaatggcacacctgaaccatgatctatattctggcgatcttaatgaacaaagtcaggcccaattgtcagagggtagtattactctacaggtcgaagccgtcgaaagcacatctcaagtggatgaaaacgatgtgacgcttactgccgacaaaggaaaaacagaggacacattctttatgtccaataagccccagcgttacaaagataagctgccggattccggagatagtatgctgcggatttctactatcgcctccgccatcgccgaggccagtgtaaatactgatccttcacagcttgccgctatgattaaggcacttagtaataagaccagagacaaaaccttccaggaggatgaaaaacagaaagactacagccacgtcaggcattttttgccgaacgacctcgagaagagtaatggatctaatgcattagacatggagaaatacctcaaaaagacagaggtttctcgatacgagagcgcactggagaacttctctcgggctagcatgtccgatacctgggacctctccttgccaaaggaacagaccacccaggacatccacccggtggatctctcagcaaccagcgtgtccgttcgagcccctgaggagaacacagccgctatagtctacgtggagaatggagagtctgagaatcaggaatcttttagaaccatcaattcaagtaactctgttaccaatagagagaataacagtgccgtcgttgatgtgaagacgtgttcgattgataacaagctgcaggacgtgggcaatgatgaaaaggccacgagtatttcaactcctagcgactcctactcgtcagtcaggaatcctagaattaccagcctgtgcctccttaaagattgtgaggagattcgcgataacagggagaatcagagacagaacgagtgtgtgtccgaaatctctaattccgagaagcacgtaacattcgagaaccatcgtatcgtctcacctaaaaacagcgatctgaagaatacctctcctgaacacgggggacgagggtctgaggatgaacaggagagttttcggcctagtactagtcctctatcccattcgagtccctctgaaattagcggcacctcttccagcgggtgcgcccttgagtcctttggtagcgctgcgcagcagcaacaaccaccatgcgaacaggagctctctccactggtgtgttcaccagccggtgtcagccggctgacgtatgtgtccgagccagaatcgtcctaccccaccacagctaccgacgacgctctggaggaccgtaaaagtgacatcactagcgagttgtctaccacaatcatccagggatctccggctgctctagaggaaagagcaatggaaaagttacgtgaaaaggtgcctttccagaataggggtaaggggacactgagctctatcatccagaacaattccgatactaggaaggcaacagaaacaacatcattgagctcgaagccagagtacgttaagcctgacttccggtggtcaaaggaccctagctccaaaagcggaaaccttctcgagacttccgaagtgggctggacgtcaaatccagaggagcttgatcccatcagactcgctctacttggaaagtctggcctgtcctgtcaggtgggatccgcgacaagccatcccgtgagttgtcaggaacctattgacgaagaccagcgaatctcccctaaggacaaatctactgcaggcagggagttctctgggcaggtcagccaccagaccaccagcgaaaatcagtgtaccccaattccttcttcaacagtccattcctctgtagcagacatgcagaacatgcccgcagctgttcatgccctgttgacccagccatcgctttcagctgcaccctttgcccaaagatatcttggcaccctgccctccacgggaagcacaacactacctcaatgtcacgccggaaatgctacagtgtgcgggttcagcggcggtctcccctaccccgcagtggcgggtgagcccgtccagaattctgttgcagtaggcatctgcctgggatcaaacatcggcagcgggtggatgggaactagcagtctgtgtaatccatactcaaacactcttaatcagaacctgctctctacaacaaagccgttccccgtaccatcagtggggactaattgcggaattgagccgtgggatagcggcgtgacgagtggtctcggaagcgtgagagtgccagaagagttgaaattgccccatgcatgttgtgtcggcatcgccagtcagacgctcctctccgtgctgaaccctaccgatcgctggttgcaggttagtatcggagtgctctctatttcagtcaatggcgagaaagtggacctatccacctacagatgtctggtgtttaagaacaaagctatcatccgtccacacgctactgaggagatcaaggtcctgttcattccctcttcaccaggcgtctttcgctgtacattctcggtggcatcgtggccctgctctactgatgccgaaaccattgtccaagccgaagcccttgcaagtactgtgacactgacagccattgcggagtccccagtaatcgaggtggaaaccgaaaaaaaggatgtcctcgacttcggcgaccttacatatggagggtggaaggcgctccctctgaagctgataaataggactcacgcaacagtccccattcggctcattataaatgcgaatgcagtagcatggcgatgctttaccttcagcaaagagtctgttcgggctccggtggaagtcgcgccatgcgcagatgtcgtgactcgtttggccggtccaagtgttgtgaatcatatgatgccagccagttatgacggacaagaccctgagtttctgatgatatgggttctgttccacagtccgaagaaacagatcagctccagtgacattcttgactcagccgaagagtttagcgccaaggtcgatatcgaagttgacagccccaatcctacccccgtcctccgatcagtctccctgcgggcacgggcaggcatagctcgcatccacgcccctcgcgatttgcaaactatgcatttcctggcgaaagttgcctccagcaggaagcagcatcttcctctcaaaaacgcgggtaatattgaggtatatctggatattaaggtgcccgaacagggctctcatttcagtgtggaccccaaaaacctgctcctgaaacctggggaggagcacgaagtgatcgtgtccttcacccccaaggatccagaagcatgcgaagagcgaatcctgaaaatcttcgtccaaccgttcggtccgcagtacgaggtcgtacttaagggagaggtgatctcctcaggatctaagcctctcagtcctggaccatgccttgacatcccaagcatcctgagcaataagcagtttctagcatggggtggagtcccgctggggagaacacagctccagaagctagcactcaggaacaacagcgctagcactactcagcacttgcggttactcatacggggacaagaccaagattgtttccaactccagaacacttttggaagtgaacaacggctcaccagcaattgcgagattcgcattcatcctaaggaagacatctttatcagtgttcttttcgctcccaccagattgagctgtatgctggcaaggttggaaattaaacaactggggaacagatcccagccaggcattaaattcaccatcccacttagcggctacggcggtacctccaatcttatcctggagggggtcaaaaagttgtccgatagttacatggtaactgttaacggcctggttcctggtaaggagtcaaaaattgtgttttctgtcagaaacaccggcagccgcgcagctttcgttaaagcagtaggatttaaggacagccagaagaaggttctgttagacccaaaagtcttgcgtatcttcccggacaaattcgtacttaaagaacgcacgcaagaaaatgtaactcttatctataatccatcagaccggggaataaataataaaacagctaccgagctgtccaccgtctacctatttgggggtgacgaaatctctcgacaacagtatcgcagggcccttcttcacaagccagagatgatcaagcagatcttacccgagcacagtgtgctgcagaatatcaacttcgtagaggcctttcaggatgaattgctggttacagaggtctacgatctgccacagaggcctaatgacgttcagctcttttatggttcgatgtgcaagatcatcctcagtgtaattggggagttcagagactgcatctccagcagggagttcctgcagccctcttctaaagcctcactggagagcactagtgacctgggcgctagcggcaaacatggaggaaatgtgtctctcgatgtactaccagttaaaggcccacaggggagcccgttacttagccgagctgcacgcccacctcttgaccagttggcatctgaggagccgtggacagtgttaccagaacatcttatcttggtggcgccatctccatgtgacatggcgaagacagggcgttttcagatagttaataactctgtgaggctgctgcggtttgagttgtgttggcccgctcactgccttaccgtaactccgcagcacggttgcgtcgcgcctgaaagcaagctccagattctggtcagcccaaacagctccctgtcgaccaaacagtcgatgtttccttggagcggtcttatctatattcactgtgatgatggtcagaagaagattgtgaaggtgcaaatccgtgaggatctaacccaggttgagctcttaacccgcctgactagcaagccgtttggcatactatctccagtgtctgaaccctccgtgtcccaccttgtcaagccaatgacgaagcccccaagtactaaagttgagatcagaaataaaagcattacttttcccaccacagaaccaggtgagacctccgagtcatgcctagagctcgagaaccatggaacaacagacgtaaagtggcaccttagctcgctggcccctccttacgtgaaaggagtcgacgaatcgggcgacgtatttcgcgcaacatatgcagctttcagatgctcaccgatctccggcctcctggagagtcatggtatccaaaaggtgagcattacgtttcttcctagaggaagaggtgattacgcgcagttctgggacgtagagtgtcatcctctgaaggagccacatatgaagcataccttgaggtttcaactatcaggccaatccattgaagctgagaacgagccagaaaatgcatgtttatcgacggactctctgataaaaatcgatcatctggtgaaacccaggcgccaggctgtctcagaggctagtgctcgtatacctgagcaactggacgtgaccgccagaggcgtgtacgccccagaagacgtgtaccgttttaggccaacatcagtgggcgaatctagaacgttaaaagttaacctcaggaacaacagctttatcacacacagtctgaaattcttaagccctcgagaaccattttacgttaagcattccaaatactctctgagagcgcaacattatatcaatatgcctgtccaattcaagccaaaatctgcaggcaaatttgaggccctgctggttatccagacagacgaagggaaatctattgctattagattgataggtgaagccctaggtaagaacta

SEQ ID NO: 28069 - DNA, 4167 bp, synthetic construct
  source 1..4167: mol_type = other DNA; note = Synthetic coding sequence
atggcgcctggatgcaagacggaactccgatccgtaaccaatggacagagtaatcagccttctaacgagggggatgccataaaggtattcgtccgcatacgccctcctgctgaaaggagcggaagcgcggatggagagcaaaatctgtgtttaagcgtcctgtcttccacttccctgagacttcactctaaccccgaaccaaagacatttacttttgaccatgtggctgacgttgataccacccaagagtcagtattcgctactgttgccaagtctattgtcgaaagctgcatgtcgggctacaatggaacgatctttgcatacggccagaccggatccgggaaaacattcactatgatgggaccatcagaaagcgacaacttctcccataacctgcgcggtgtcattcctagatcttttgaatatctcttttcactgatagacagagagaaagaaaaggccggagcgggaaaaagctttctgtgtaaatgttctttcattgaaatatacaacgaacagatctacgacctccttgatagtgcttccgccggactttacctgagggaacacatcaagaaaggcgttttcgttgtgggtgcagtcgaacaggtagtgacatcggctgccgaggcctaccaggtgctcagtggtggatggaggaaccggagggttgcctccacctctatgaaccgggagtcctctcggtcacatgccgtgtttactatcactatagaaagtatggaaaagagcaacgagattgtaaacatccgcacaagcctgctcaacttagtggatttggccggtagcgagcggcaaaaagacacacatgccgaaggcatgcgcctcaaggaggccggtaacatcaatagaagcctgtcatgtctgggccaagttatcacggctctagtcgacgtgggtaacggcaagcaaagacacgtgtgctaccgcgatagtaagctgacttttctccttcgcgatagcttggggggaaacgccaagactgccatcattgcaaacgtacaccccggatctaggtgtttcggcgagactttaagtacattgaattttgcccagcgggcaaagctgattaagaataaagctgtagtaaacgaggacactcaggggaatgtaagtcagcttcaggctgaggtgaaaaggctcaaggaacagcttgcggaactagcctcaggccagactccccctgaatctttcttgacgcgtgataaaaaaaaaactaactacatggagtactttcaggaagcaatgctcttcttcaagaaaagcgaacaggaaaaaaagtccctcattgaaaaggtgacccagctcgaagacctgacgctaaaaaaggagaagttcatacagtctaataaaatgatagtaaagtttagagaagaccagatcattcgccttgaaaaactgcacaaggagtcccgaggcggtttcttgcctgaggagcaggatcggttactgagcgaattacgcaatgagattcagaccctgcgcgagcaaatcgaacaccatcctagggtggccaagtacgctatggagaatcattcgctccgcgaggagaacagaaggttgagacttctggagcccgttaaacgagcccaggagatggacgcacagaccatcgcgaaactggaaaaggctttttccgaaatttccggtatggagaaaagtgataaaaaccagcagggatttagtccaaaagctcagaaagagccctgtctgtttgccaacactgagaaacttaaggcgcagctcttgcaaatccagaccgaacttaataactcgaaacaagagtacgaggagttcaaggagctaactcggaagaggcaattggaactggagagcgagcttcaatcactgcagaaagccaacttgaacttagaaaacctgctggaagctactaaggcttgtaaacgacaggaggtctcgcagctgaacaaaattcacgctgagaccctgaaaataattacgacacccacaaaagcctatcagctgcacagtagaccagtccccaaactcagccctgaaatgggaagtttcggttcactgtacacgcagaactcttcgatcctagataacgatatcctgaacgagccggtaccaccagaaatgaacgagcaggcattcgaagccatcagcgaggagcttcgtaccgtccaagagcaaatgtccgccctgcaggctaagctagacgaagaagaacataaaaacctgaagctccagcagcacgttgacaagctcgaacaccactcaactcaaatgcaagagctgttttcatccgagcgaattgattggactaagcagcaggaggaactgctgtctcaactgaacgtgctggagaagcagctccaggaaacacaaactaagaacgatttcctcaaaagcgaagtccatgacctccgcgtcgtccttcattcggccgacaaggaattatcatctgtaaagctggagtatagcagtttcaagactaatcaggaaaaggagttcaacaagctgagcgaacgacacatgcacgttcagctgcagctggataacctaagacttgagaatgaaaaactactggagtcaaaagcgtgtctgcaagactcttatgacaacctgcaggagatcatgaagtttgaaatcgaccagctgagcagaaacctgcagaacttcaagaaggagaacgaaaccctgaaaagtgatctcaataacctgatggagttactggaggccgagaaggaacgtaacaacaagctgtcattgcagtttgaggaagacaaagagaattccagtaaggagattctcaaagtgctcgaagccgtgagacaggagaagcagaaggagactgcaaaatgcgaacagcagatggccaaagtccagaagctggaggagtctctcttagctaccgagaaagtgatttcatcattggagaagtctagggacagtgacaaaaaggtagttgccgatctgatgaaccagatccaggagctccgcactagcgtctgcgagaagactgaaaccattgatactcttaagcaggagctcaaggatatcaactgtaagtacaactctgccctggttgatcgtgaggaaagccgagtactcatcaaaaaacaggaggtggatattttggacctaaaggagacccttcggctgcgcattctgtctgaggatatagaaagggatatgctgtgtgaggatctggcccacgcaacagaacaactgaacatgctgaccgaggcttccaagaagcattccggtctgctgcagtcggcccaggaggagctcactaagaaagaggccctgattcaggagctgcagcacaagctgaatcagaaaaaagaagaggttgagcaaaaaaaaaatgaatataattttaaaatgaggcagttggaacacgtgatggactcggcagccgaagacccacaaagcccaaagacaccaccacatttccagacccacctggccaaacttctggagactcaggaacaggagattgaagatggtcgagctagcaagacgtcactggagcacctcgtgactaagctgaacgaagaccgcgaggtgaaaaacgccgaaatcttacgaatgaaagaacagctccgagaaatggaaaacttaaggttggagtcccagcagcttatagaaaagaattggcttctgcagggtcaactggatgatatcaaacgtcaaaaggaaaattcggatcagaatcatcctgataatcagcagttgaagaacgaacaggaggaatctatcaaagagaggctggcaaagagcaaaattgtggaagagatgctgaagatgaaggctgaccttgaggaggtgcaatctgctctgtacaacaaagaaatggagtgcctgaggatgaccgacgaggtggaacgcacacagaccctggaatcgaaagcattccaggagaaagaacagctccggagtaagcttgaagaaatgtatgaggagcgagaaaggacatctcaggagatggagatgctgcggaaacaggtggagtgcctggcagaagagaatggcaaattggttggtcaccaaaacctgcatcagaaaatccagtatgtcgtaagactaaaaaaggagaacgtgagacttgctgaagaaacagagaaactgagagccgagaatgtgttcttaaaggaaaaaaaaagatccgagagttag

SEQ ID NO: 28070 - DNA, 4766 bp, synthetic construct
  source 1..4766: mol_type = other DNA; note = Synthetic coding sequence
atgctaccgccaaagcatctgtccgccaccaaaccaaaaaagagctgggccccaaacctgtatgagctcgattccgacttgaccaaggaaccagacgtgattataggggaaggccctactgactccgagttcttccaccagcggttccgaaacctcatctacgttgagtttgttggcccaagaaagacactcattaagctgcgaaatctctgcctcgactggctgcagccagagacaagaacaaaagaggagatcatcgaactgctagtgctcgagcagtatctgacaatcattccagagaagttgaagccatgggtgagggccaagaaaccagaaaactgcgaaaaactggtcactttgctcgaaaattataaggagatgtaccagcccgaggacgacaataattccgacgttacatccgatgatgatatgactaggaacaggcgagaatctagtcccccacacagcgttcactctttttctgatagggattgggatcgaagaggcaggagtagggatatggaaccacgagatcgctggtctcacacgcggaaccctcggagcagaatgccaccccgagatttgagcctgccggtggttgctaaaacctccttcgagatggaccgggaggacgacagagatagtagagcttacgagtcccgaagccaggacgctgaatcttaccaaaatgtggtcgatctagccgaagaccggaagccccacaatacgatacaagacaacatggagaattatcgaaaactgctcagcctggtgcagttagccgaggatgacggccattcccacatgacacagggccactcatccaggagcaaaagaagtgcttacccctcgacctcgaggggtctgaaaacaatgcctgaggcgaaaaagtcaacacacaggcgcggtatttgcgaggacgagtcgagccacggtgtgatcatggaaaagtttatcaaagacgttagccggtcgtctaagtcagggagggcccgagagtctagcgacagatcacagaggtttcccagaatgtccgacgacaactggaaggatatcagcttgaataagcgagagtctgtcattcagcagcgtgtttacgaaggaaacgcattccgcggtggttttcgttttaattctaccttggtatctcgcaaacgcgtcctggagaggaagagacggtatcacttcgatactgacggaaaaggtagcatccatgaccagaagggctgcccccgaaaaaaaccattcgaatgcgggagcgagatgagaaaggctatgtctgtgtcctccctgtcgtccctctccagtccttcatttaccgagagtcaacccattgattttggggctatgccctatgtttgcgacgaatgcgggagatctttttccgtgatctcagagttcgtggagcaccagatcatgcacacaagagagaatctctatgagtacggagagtcctttatccactccgtggccgtgtctgaggtccaaaagagccaggtgggcggaaaacggttcgaatgtaaggactgcggggaaaccttcaacaagagcgctgccttggctgaacatcgcaaaattcatgctagaggatacttagttgagtgcaagaatcaggaatgcgaagaagctttcatgcccagcccaactttttccgagctgcagaagatctacggcaaggacaagttctatgaatgccgggtctgcaaggaaacctttcttcacagttccgcccttatcgagcatcagaaaatccatttcggggacgacaaggataacgagcgcgagcacgagagggaaagggaaagagagcgaggcgagacttttcggccttcccctgcgctgaacgagttccaaaagatgtacggcaaggagaaaatgtacgaatgcaaggtatgtggggagacatttctgcattcctctagtttaaaagagcatcaaaagatacacaccaggggaaacccctttgagaacaagggaaaagtgtgcgaggaaacttttattcccggacagtccttgaaacgtcgtcagaagacgtacaataaggagaaactttgcgattttacagacggccgtgacgccttcatgcagtccagtgagctgtcagaacatcagaaaattcactcaagaaagaatctgtttgaaggcagaggttatgaaaaaagcgttatccattccgggccattcactgaatctcagaaatcccacacaatcactcgcccattggaaagtgatgaagacgagaaagccttcaccatatcaagtaatccctacgagaatcagaaaattcccactaaagaaaatgtgtatgaggccaaatcctatgagcgaagcgttattcactctctggccagcgttgaagcacagaaatcacacagcgtggccggaccgtccaagccgaaagttatggccgagtctacaattcagagctttgacgccataaatcatcaacgtgttcgggcaggcggaaacacaagcgagggaagggaatattcacgtagcgtcattcatagccttgtagctagcaaacctcccaggagccacaacggaaatgagctggtggaatctaacgagaagggagagagcagcatctatattagtgacctgaatgataaaaggcagaaaattccagcccgtgagaacccttgcgagggaggatcgaaaaacagaaactatgaggattctgtaatacaaagcgtctttagggccaagccacagaagagcgttcccggagaagggagcggtgaatttaaaaaagatggagaatttagtgtgcctagttcaaatgtgcgcgaataccaaaaagcacgggcaaagaagaaatatattgagcaccgaagcaacgagacctccgtgatccatagcctgcctttcggagagcagacctttcgtcccagaggtatgctgtatgagtgccaagaatgcggggaatgctttgctcattcttctgacctgactgagcatcaaaagatacatgatagagagaaacccagcggatcccggaactacgagtggagtgtgatccgctctctggctcctaccgacccccagacatcatatgcgcaggagcagtacgcgaaggaacaggccagaaacaagtgtaaggatttcagacagttttttgctactagtgaggacctgaatacaaatcagaaaatatacgatcaggaaaagagccatggtgaagaaagccaaggtgagaataccgatggcgaagaaactcatagcgaagagactcatgggcaagaaaccattgaggaccctgtcattcagggatccgacatggaggatccgcagaaagatgatcctgacgataagatatacgaatgcgaagactgtggacttggcttcgtggacctgaccgacctcactgatcatcaaaaggtccattcccgtaagtgcctcgtcgacagtagagagtacacccattctgtgatacacacccattcaattagcgaatatcaacgggattatacaggcgagcagctctatgagtgccccaagtgtggcgagtcttttattcactcgagttttctattcgagcatcagcgcatccatgagcaggatcagctgtactcaatgaagggttgtgatgatggctttatagctctgcttcccatgaagccacggcgaaaccgtgcggcagagcgtaatccagccctggcaggctcggccatccggtgcctgctgtgtggccagggttttatccattcttctgcactgaatgagcacatgagactccaccgtgaggacgacctacttgaacagagccagatggccgaagaggccattattccgggactggctctgactgagttccaacgaagccagaccgaagaacgtctcttcgagtgtgctgtctgtggagagagcttcgttaaccccgctgagctggcagatcatgtcaccgtccacaaaaatgagccctacgagtacggcagctcatacactcacacaagttttctgaccgaaccactcaaaggagcaattcccttttacgagtgtaaggactgtggaaagagcttcatacatagcactgtcctgaccaaacacaaggaactccatctcgaggaggaagaggaagacgaggcagctgcggcagccgctgcagctgcccaggaagtcgaagcaaatgtgcatgtgccccaggtggtgttgaggatccagggcttgaacgtcgaagcagccgaaccagaggtagaggccgctgaacccgaagtcgaagcagccgaacccgaggtggaagctgctgagcccaacggggaggctgaaggacctgatggagaggctgcagaacccatcggagaggctggacagccgaacggtgaggcggaacagccgaacggtgatgcggacgaaccagacggtgccggtatcgaagatccggaagagcgtgctgaagagccagaagggaaggcagaagaacctgaaggcgatgctgatgaacctgatggagtgggcattgaagaccccgaagaaggcgaggaccaggagatacaagtggaggagccatactacgattgtcatgagtgtacagagacgtttacctcttcaacagccttttcggagcatctcaaaacccatgcatctatgattatcttcgagccagccaatgccttcggtgagtgttcaggctatattgaacgagctagcacctccacaggcggtgccaaccaggccgacgaaaaatacttcaagtgtgacgtctgcgggcagctctttaacgatcggttatccctcgccagacaccagaatacgcacacaggtta

SEQ ID NO: 28071 - DNA, 2508 bp, synthetic construct
  source 1..2508: mol_type = other DNA; note = Synthetic coding sequence
atggggaattacaaatccaggcctacccagacctgcaccgatgagtggaagaaaaaagtctctgaatcatacgtgattacgatcgaacggcttgaggacgacctgcagatcaaggagaaagagcttacagaactcaggaacatctttggtagcgatgaggccttctctaaagtgaacctcaactatcgcacagagaacgggctttctctcttacacctgtgttgcatctgtggtggcaagaaatcccacatacgtacattgatgctgaagggcttgaggcctagtcggctcactcggaacggtttcacagcgcttcaccttgccgtgtacaaggataacgccgagctgattacgagccttcttcattcaggcgcagacatccagcaggttgggtacggaggcctgacagcgcttcatatagctaccattgcgggtcatctggaggccgcagacgtcctgttgcagcatggcgcaaacgtaaacatccaagatgcagttttctttactcctctgcacatcgctgcctattacggccacgaacaggtcactaggcttctgctgaagtttggggcagacgtgaacgttagcggcgaggtcggcgacagacctctgcacttagcttctgcaaaagggtttctgaacattgctaagctactgatggaggagggatcaaaggctgacgtcaatgcccaggataacgaggatcacgtgccgctgcatttctgtagtagattcggccaccacgacattgtgaaatatctgttgcaatctgacctcgaggttcaaccccacgtggtcaatatctatggagatacccccctccacctcgcgtgttacaacggcaagttcgaggtggccaaagagatcatccaaatttccggtaccgagtccttaaccaaggagaatatctttagcgaaacagcattccactctgcttgcacatacggcaagtctatcgacctggtgaagtttctcctcgaccagaacgtaatcaatatcaaccaccagggtcgcgacggccataccggtttacattccgcatgttatcacgggcatatccgcctggtgcagttccttctggacaatggcgctgacatgaatctggttgcctgcgatccatcacgatccagtggggagaaggacgagcagacctgcctcatgtgggcttacgagaaagggcacgacgctattgtgacactgctgaagcactacaaacggccacaggatgaactgccctgtaatgagtacagtcagcccggtggcgatggcagctacgttagcgtgccctctcctcttgggaagattaagtccatgacaaaggaaaaggccgacatactcttgctgcgtgccggactgcctagccacttccacctacagctgagtgaaatagaattccatgagatcattggcagcggcagctttggtaaggtttacaaaggtagatgtcgcaacaaaattgtagctatcaaacgctatcgcgcaaatacgtactgttcaaagtccgacgtggacatgttttgccgggaagtcagtattctctgccaattaaatcatccatgcgtcatccagttcgtgggcgcatgcctgaatgacccaagtcagttcgcaattgtaacccagtatattagtggaggcagcttattttctctgctgcatgagcagaagaggatactggacctacagagcaagctaatcattgctgtggacgtagcaaaaggcatggaatatctgcataatctcactcaacctatcatccacagagatctgaacagtcacaatattctgctttatgaagatggccacgctgtggtcgctgactttggtgagagtcgttttctccagtctctggacgaagataacatgaccaaacaaccaggaaacctgcggtggatggccccagaagtgttcactcaatgcaccagatacactatcaaggcagacgtgttctcctacgcgctgtgcctgtgggagatcctaacgggcgagattccatttgcgcatctgaaaccagcagcggcagctgctgacatggcctaccatcatatcaggccacctattggttattccataccaaagcccattagctccctcctgattcggggttggaacgcatgtcccgaagggcgaccggagttctcagaggtcgtgatgaagttggaagaatgtctgtgcaacatcgaactcatgtctcccgcttccagcaacagctctggctcattgagcccttcgagctcatctgattgcctggtcaatcggggtgggccaggccgtagccatgtggctgctttaaggagtaggttcgagctggaatacgccctgaatgcacgttcctacgcagcactgagccagtctgcaggacagtacagcagtcaaggcctgagtttagaagagatgaaacgcagcctccagtatacccccattgataaatacggttatgtctcagatcccatgagttctatgcattttcattcatgtagaaactctagtagttttgaagactcgagctag

SEQ ID NO: 28072 - DNA, 1767 bp, synthetic construct
  source 1..1767: mol_type = other DNA; note = Synthetic coding sequence
atgaataccagtatcccctatcagcagaacccttacaaccctcgcggatccagcaacgttattcagtgctacaggtgcggcgacacctgcaagggggaggtcgtgagggtgcacaataaccactttcacatccgatgttttacctgccaggtgtgcggctgcggcctggcccaaagcggatttttcttcaaaaatcaggaatatatatgtactcaagactaccagcaactatatggaactcgatgtgatagttgcagagattttatcacaggtgaagtgatctccgcgctgggtagaacctatcacccaaaatgctttgtgtgctccttgtgccggaagccattccctattggggacaaggtgacttttagtggcaaggaatgcgtttgccagacctgcagccagagcatggcctcatccaaacctattaaaatccgcggaccttctcattgtgcaggttgcaaggaagagattaaacatggtcaatccctgctcgctttggataagcagtggcacgtcagctgtttcaagtgtcagacatgttcagtgatcttgaccggggagtatatctccaaagacggcgtgccttactgcgagtcggactatcatgctcaattcggtataaagtgcgagacttgcgatcggtacataagcggcagagtactggaggcaggcggtaagcattatcatcctacctgcgctcgctgtgtgagatgccatcagatgttcaccgagggggaagagatgtacctgactgggagtgaggtgtggcaccccatttgcaagcaggcagccagagcggaaaaaaagctcaagcaccgacgtacctcagaaaccagcatatcgccaccagggagctccatcggatccccaaaccgtgtcatctgcgacatctacgagaatctggatctgaggcaacgaagggcatcttcgccagggtacatagatagccccacttattctaggcagggaatgagccccaccttctctcggtcgccccaccactactataggagcgccggagattccaatatttataggaagccacctatctataagcgccatggggatctctcaacagcgactaagagcaagactagcgaggatattagtcaaacctcgaagtactctcccatttacagccccgatccttactacgcctccgaatcagagtactggacatatcacggctctcctaaggtacctagggcaagaaggtttagttccggaggggaggaggacgattttgatcgctcaatgcataagctccagagtggaatcgggcgtctgattttaaaagaagaaatgaaggctcgatctagctcttatgctgatccctggactccacctcggagttccaccagcagccgggaagcattacacaccgcaggatatgagatgtcccttaatggctcacccagatctcactatttagccgattctgacccgctcatatccaaaagcgcaagcctgcctgcttaccgcaggaacggcttacacaggacaccttctgctgatctgtttcactatgacagtatgaatgccgtgaattggggcatgcgggagtacaaaatctatccttacgaactgctgctggtaaccaccagaggtaggaaccggctcccgaaggatgtggatcggacaagattggagagacatctgtcccaggaagagttttaccaagtgtttggaatgaccatcagcgagtttgatcgattggccctctggaagagaaacgagctgaagaagcaggctagactgttttag

SEQ ID NO: 28073 - DNA, 1050 bp, synthetic construct
  source 1..1050: mol_type = other DNA; note = Synthetic coding sequence
atggccattcccataacagtcctggactgtgacttgttgttgtatggacgaggccacaggacacttgatcgattcaaactggatgatgtaactgacgaatatcttatgagtatgtatgggttccccagacagtttatttattacctcgtcgaactgctgggggctaacctctctcgcccaacacagcgcagtagggctatctctccagagacccaggtgctggccgctcttgggttttacactagcggctctttccagactcggatgggcgacgctattggtatctctcaggcatccatgagcaggtgtgtggctaatgtgacagaagctctggtcgagcgagcgtctcagtttatccgctttcccgctgatgaagcgtcaatccaagccctgaaggatgaattttacggactcgccggaatgccgggtgtcatgggggtggtcgactgcattcatgtggcaatcaaggcaccgaatgcagaagacctaagctatgtcaatcgcaaggggttgcactcgttgaactgtcttatggtctgcgatatccggggaacactgatgacagtcgagacaaactggccaggctctctgcaagactgcgcagtactgcagcaaagtagcctgagttctcagttcgaagccggaatgcataaggatagctggctgcttggtgatagctcgtttttcttgcgtacttggctgatgactcccctacatattcccgaaacaccagcggaatacagatacaatatggcccactccgcaacccactctgtgatcgaaaagacgtttaggacactttgttcccgatttcggtgcctcgacggatcaaagggcgctctgcagtattctcctgagaaatccagccacataattttagcctgttgtgtgctgcacaatatcagtctggaacatggtatggacgtctggtctagccccatgactggtccaatggagcagcctccagaagaggaatatgaacacatggaaagcctggacctggaggctgatcgcattcgccaggaactgatgctaacccactttagttag

SEQ ID NO: 28074 - DNA, 1794 bp, synthetic construct
  source 1..1794: mol_type = other DNA; note = Synthetic coding sequence
atgtcaagcaaagggagttctacagacgggagaaccgatctggcaaacggcagtctttcttcatctcctgaggaaatgtcaggcgcagaggaaggcagggaaacaagctccgggattgaggtagaagccagtgacctcagcctgtctctgactggagacgacggcggtcctaatcgaacaagcacagagtctcgaggcacagacaccgagtcttctggagaggacaaagatagtgattctatggaggacacaggccattacagcatcaatgatgagaacagagtgcatgataggtctgaggaagaagaggaagaagaggaggaagaggaggaagagcaaccacggcgtagggtgcagcggaagcgtgccaacagagaccaggactcgtctgacgatgagagagcactggaagattgggtctccagcgaaaccagcgctttacctagaccaaggtggcaggctcttccagcactgcgtgagcgggagctgggcagctccgctagattcgtgtacgaagcatgtggcgcacgcgtctttgtgcagaggtttcggcttcaacatggattggaaggtcatacgggatgcgtgaataccctgcatttcaatcagcgtggcacatggctggcctccggctctgacgatctgaaggtcgtagtttgggactgggtacggaggcagcctgtactggatttcgaatctggacacaaatcaaacgttttccaggcaaagttcctcccaaactccggggactcaaccttagcaatgtgcgctcgagacggacaggtgcgcgttgccgagctatcagctacgcaatgctgcaaaaataccaaaagagtagcacaacataaaggcgcaagtcacaagttggctctggaacctgactccccctgtaccttcctatccgcaggggaggacgccgtggtgttcacaattgacctgaggcaggatcgacccgctagcaagcttgtagtaacaaaggaaaaggagaagaaggtgggtttatacaccatctacgtcaaccccgcaaacacgcatcagttcgctgttggcggtcgagaccagtttgtccgcatttatgaccagcgtaagatagacgagaatgagaataatggagtactgaagaaattctgtcctcaccacttggtgaattctgagagcaaagctaacattacctgtttggtgtacagccatgatggcacggaactgttggcaagctacaacgacgaggatatttatctcttcaactcctctcacagcgatggtgcacaatacgttaaaagatataaaggccaccggaacaatgccacggtgaaaggcgtgaacttctacggcccaaagtccgaatttgtagtgtccgggagcgactgtggccatattttcctgtgggagaaaagcagttgccaaatcatacagttcatggagggagataaggggggtgttgtgaactgtcttgaaccccacccccacctcccagtactggccacgtctggccttgaccacgatgtcaaaatctgggccccaacggccgaggcttcaaccgagcttactggtcttaaagacgtgattaaaaaaaacaagcgcgaaagggatgaagatagcttgcaccagaccgatctgttcgactcacacatgctgtggttccttatgcatcacctgcgacagcgaagacatcaccggcgatggcgagaacctggcgtcggggcaaccgacgccgattcagatgagagcccctccagctctgacacttccgacgaagaagaggggcctgaccgcgtgcaatgcatgccatcctag

SEQ ID NO: 28075 - DNA, 933 bp, synthetic construct
  source 1..933: mol_type = other DNA; note = Synthetic coding sequence
atgtcgcaacagctgaagaaacgggctaaaaccaggcatcagaaaggactgggcggaagggcgccttcaggcgcaaagccgcgacaggggaagagctctcaggacttgcaggccgagattgaaccagtctccgccgtgtgggcactatgtgacggctatgtctgctacgagccaggaccacaggccctgggaggcgacgatttctcggattgctacattgagtgtgtaattagaggggagttctcacagcctatccttgaggaagattctctgtttgaatctttagagtaccttaagaaaggaagtgaacagcaattgtcacagaaagtattcgaggcctcctccctagaatgttcactggagtatatgaagaagggtgtgaagaaagagctacctcagaagatcgtgggagagaactctctggagtattctgagtacatgaccggtaagaaactgccaccgggaggcattcccggaattgatctgtctgatcccaagcagctggcagagttcgctcgcaagaagccaccaataaacaaagagtatgactcactcagcgctatcgcatgcccccagtccgggtgtacaaggaagctgagaaatagggccgctctccggaaacatctgctgatccatggccctcgggatcacgtgtgcgcagaatgtggtaaggcctttgttgaaagctctaagctgaaacggcactttctcgttcataccggggagaaaccattccgctgcaccttcgaaggttgcggcaaacggttctcactggacttcaatctccggactcatgtgcgcattcataccggcgaaaagaggtttgtctgcccctttcaggggtgtaaccgccgttttatccagagcaataaccttaaagcccacatactgacccatgcgaacactaacaagaatgaacaagagggtaaatag

SEQ ID NO: 28076 - DNA, 1149 bp, synthetic construct
  source 1..1149: mol_type = other DNA; note = Synthetic coding sequence
atgctgcggtggaccgtccacctggaagggggtcccaggagggttaaccatgctgcggtcgccgttggacatcgcgtctacagcttcggcggatactgttccggagaagactacgagaccctcaggcagatcgacgtgcacatttttaacgcagtgagcctgagatggacaaaactgccacccgtgaagtccgccattaggggtcaagctcctgtggtcccctatatgcgatatgggcacagcactgtcctcatcgatgacacagtcctgctgtgggggggacgaaatgataccgagggcgcttgtaacgtcctttatgctttcgacgttaatactcataagtggtttactcctcgggtgagtgggaccgttccaggtgccagagacggtcatagcgcttgcgttttgggcaagattatgtatatctttggcggttacgagcagcaggcggattgcttctctaacgatatccacaagctggatactagtactatgacctggactctgatttgtaccaagggctcacccgcaagatggcgggacttccatagcgctaccatgctgggatcccacatgtatgtgtttgggggacgtgcagaccggttcggaccttttcattcaaataacgagatctactgtaatcggatccgcgtttttgatacccgtacagaggcctggctggattgcccacccacacccgtcctccccgagggaaggcggtctcactctgcttttggatacaacggagaactatacattttcggaggttataatgcacgattaaataggcacttccacgacctctggaagttcaatcctgtgagcttcacttggaaaaaaattgagccgaaagggaaggggccatgtccccgtcggcgtcaatgctgttgtatagtgggggacaagattgtgcttttcgggggaacgtcccccagtccagaagaagggctgggcgatgagtttgacctcatagatcatagcgatctgcacattctggacttttcgccctcactaaaaacactgtgcaagctagcagtaatccagtataacttagaccaatcatgtttaccccacgacattcgctgggagctcaatgccatgaccaccaacagtaacatttcacggccaatcgtgagtagccatgggtag

SEQ ID NO: 28077 - DNA, 1827 bp, synthetic construct
  source 1..1827: mol_type = other DNA; note = Synthetic coding sequence
atggccgctgctgcagctgcagtgggtcccggtgcaggcggagccggatccgcagtccctggcggagccggaccgtgcgccacggtttcagtcttccccggagctcgtctgctgacaatcggggatgccaacggagaaattcagagacacgctgagcaacaagcgttacgcctggaagttcgggcaggccctgattctgccggaattgccttgtattcgcatgaagatgtgtgcgtgtttaaatgcagtgtgtcaagggaaaccgagtgttctcgagtggggaaacagagctttattatcacattgggctgcaattctgtgctgatccagtttgccaccccgaacgacttttgttcattctacaatattctgaagacttgcagggggcacaccctggagagaagtgtcttctccgaaagaacagaagaaagttcagccgtccagtatttccaattctatggttatttgtcacagcagcagaatatgatgcaggattatgtgagaacagggacttatcagcgcgcaatccttcagaaccacactgactttaaggataagatcgtgttggatgtggggtgcggctcagggatactaagcttctttgcagcgcaggcaggcgcacggaaaatttatgcagtcgaggcctctaccatggcccaacatgcagaagtgctggtcaaatccaataacctgacagatcggatagtggtgatccccggtaaggtggaggaggtttctctccccgaacaggtggatatcataattagcgaacctatgggctacatgttgtttaatgagcgaatgctcgagtcatacctccatgccaagaaatacctaaaaccttcaggaaatatgtttcctacaattggggatgtccatctggcgccttttaccgatgagcaactttatatggaacagtttacgaaagctaacttctggtatcagccttcattccacggggtggatctgtccgcactccgtggcgcagccgtcgatgaatacttccgccagcccgtcgtcgataccttcgatattagaattttgatggccaaaagtgtgaaatatacagtcaacttcctggaggcaaaagagggcgacttgcaccgcatcgagattccctttaagttccatatgctacacagtgggctggtgcacggtttggccttttggtttgatgtcgcgtttattggcagtatcatgaccgtgtggctcagcacagcacccaccgagccattgacccactggtatcaagtaagatgtttattccagagccctcttttcgccaaggccggtgatacgctgtctggcacctgcctgctgatcgcaaataaacgccaaagctatgatatttccatagtagcccaggtcgaccaaacaggctctaaatcctctaatttattagatctgaaaaaccccttttttagatatacgggaacgactccctcccccccaccgggaagtcattataccagtccttcggagaacatgtggaatacaggctcaacgtacaatctgagctcagggatggccgtggctggtatgccgacagcatacgatctctccagtgttattgcgtcgggctcgagcgtgggccacaacaatctgatccctcttgctaatactggtatcgtgaaccacacacacagccgcatggggtctatcatgagcacaggcatagtgcaaggatcatccggggctcaaggcagcggcggtggttccacgagcgctcattacgcggtgaacagccagtttaccatgggtgggcctgcaatctctatggcttcgcctatgagcattcctactaatacaatgcattacgggtcctag

SEQ ID NO: 28078 - DNA, 2913 bp, synthetic construct
  source 1..2913: mol_type = other DNA; note = Synthetic coding sequence
atgcagtccaccgacttgggtaacaaagagtctgggaagatttggcacagaaaaccaagtcccgctacacgcgatggcatcattgtcaacatcatccacaacaccagcgactaccaccctaaagtgttgcggttcctcaatgtcgctttcgacggcaccggggactgtctaatcgctggagaccatcaaggcaatatctatgttttcgatctgcacggtaatagattcaatctcgttcaacgcacagcccaggcctgtacggccctagccttcaatctccgccgaaagtcggaattcctggtggcgcttgccgattacagcattaaatgttttgacaccgtaacaaaggaactagtctcttggatgaggggccacgagagcagtgtcttttccatttctgttcacgcctccggtaagtatgccatcaccacttcgtctgacacagcccaactgtgggacctcgacaccttccaaagaaagcgtaaattgaatattcgccagagtgtcggtatccaaaaggtgttctttctccctctatccaacaccattctgtcctgttttaaggacaattccatctttgcatgggagtgtgacaccctgttctgcaagtatcagctcccagccccaccggagtctagcagtattctgtacaaagtgtttgccgtcacccgtgatggacgcatccttgcggcaggaggaaagtccaatcacttgcatttatggtgcctggaagccagacagctctttcgcatcatccagatgcccaccaaggtgcgcgcaatccgccacctggaattccttccagattccttcgacgcgggatcaaatcaggttttgggtgtcttgtctcaggacggtattatgagatttattaacatgcagacctgtaaattattgtttgagatcggatcactagatgaggggataagtagtagcgcgatttctccgcacgggaggtacatcgctagcataatggaaaatgggtctctcaacatttacagcgttcaggccctaactcaggagataaataagccccctcctcctctggttaaagtcattgaagatcttccgaagaacaaattgtcctctagcgatcttaaaatgaaggtaacgtccggaagggtgcagcagccggctaaaagtagagagagtaagatgcaaactagaattctgaagcaggatctgactggtgatttcgaatcaaagaagaacgagctgccagatgggctgaataaaaagaggctgcagatactgctgaaaggctacggggagtatcccactaagtaccgcatgttcatttggcgctccctgctgcagctccccgaaaaccacaccgctttctctacgctgatagacaagggaactcatgtagcgtttttgaacctccagaaaaagtaccctatcaagagtcggaaacttctccgagtcctccagcgtacgctgagcgcgctcgcccactggtctgtcattttctcagacaccccatacctgcctttgcttgcctttccattcgtgaagcttttccagaataaccagcttatctgttttgaggttattgcaacccttatcatcaattggtgccaacactggttcgagtatttccccaacccccctataaacattctctccatgatcgagaacgtgctggcgtttcatgacaaagagctcttgcagcactttatagatcacgacatcacttctcagttgtacgcctggcctctactggagactgtcttcagcgaagtgttgacacgggaggaatggctgaaactgttcgacaacatcttctcaaaccatccatcattcctgcttatgaccgttgtggcgtataatatttgctcaagaacccccctcctgagttgtaacctcaaggatgattttgagtttttcttccaccacaggaacaatctggatatcaatgtggtgattaggcaggtctatcatctgatggaaactacgcccactgacatacaccctgattccatgctgaatgttttcgtggcacttaccaagggtcagtacccggtgtttaatcagtatcccaaatttattgttgattatcagacccaggaacgggagagaattcggaacgatgagcttgattatttaagggagcggcaaacagtcgaggatatgcaggctaaggtggaccaacaacgagtcgaagatgaggcctggtatcaaaaacaggagctgctcaggaaggctgaggaaacccggagagaaatgttactccaagaagaggagaagatgatccaacaaagacagcggctggccgctgtgaaacgggaattgaaggtgaaagagatgcacctgcaggacgccgcacgtcggagatttctgaagctgcagcaggaccagcaagaaatggagttgcggcgtcttgacgacgagattggtcgtaaaaacctcacagaaaatcaggaggcacttgccaaagagatgcgagcagatgccgacgcttacaggagaaaagtcgatctcgaggaacatatgtttcacaagctgattgaggcgggagagactcagtcccagaagacgcaaaaatggaaagaggcagaagggaaggagtttcgactcaggagtgctaagaaggcgtccgccttatccgacgcgtcaaggaagtggtttctgaagcaggagataaacgccgctgttgaacacgccgagaacccatgtcacaaggaggaacctcgattccagaatgaacaggacagctcttgcctccctcgaacgtcccagctgaacgactcatcagaaatggatcctagtactcaaatctcactgaaccgcagggcagtggagtgggacactacaggacagaacctgatcaagaaggttagaaatcttcgtcagcggctcaccgcgagggccagacatcgctgtcagactccacacctattagctgcatag

SEQ ID NO: 28079 - DNA, 648 bp, synthetic construct
  source 1..648: mol_type = other DNA; note = Synthetic coding sequence
atgtcatgcacaattgaaaaagcactggccgatgcaaaggccctggttgagaggttgagggatcacgacgatgctgccgaaagcttaattgaacagaccaccgcactcaacaaaagagtcgaggctatgaagcaatatcaggaagagattcaagagctgaatgaggttgccaggcaccgcccacggtccacactcgttatgggcatccaacaggagaaccgacaaatcagagaacttcagcaagagaataaggaactacgaacttccctggaggaacatcagtctgctctcgagctgattatgtctaagtaccgtgaacagatgtttcgattattaatggcaagtaaaaaagacgaccccggaataattatgaagctcaaagagcagcattcaaaggagcttcaggcgcacgtagaccaaattacggaaatggctgctgttatgcggaaagcaatagaaattgatgagcaacaaggctgcaaggaacaggagcgcatttttcagcttgagcaggagaacaaaggcctacgggagatcctgcaaattacccgagagtcattcctgaatctgagaaaggatgatgctagcgaatctacctccctttctgccctggtaactaacagcgacctctctctgcgcaagtcatag

SEQ ID NO: 28080 - DNA, 2676 bp, synthetic construct
  source 1..2676: mol_type = other DNA; note = Synthetic coding sequence
atggccgtggctcgagtcgacgccgcactcccccctggcgaaggtagtgttgtgaattggtctggccaaggcctgcagaaactgggtcccaacctgccatgcgaggctgatattcacacactgatcctcgataaaaatcagataatcaagctcgagaacctggagaagtgtaagcgcctgattcaattgagcgtggcaaacaacagactcgtacggatgatgggagtggccaaactgaccctcctgagggtgctgaatctgccgcataatagcatcggctgtgtagaagggttaaaggaactggtccatctggagtggctgaacctagccggtaacaatctcaaggccatggagcagatcaacagctgcaccgcattgcagcacttagacctgagtgataacaacatcagccagataggggatctctcaaagctagtatccctcaaaactcttctgctgcatgggaacatcatcacctcattacggatggccccagcttacctgcccagaagccttgcgatcctgtctctggccgaaaacgagatccgcgacttaaatgagatcagctttttggcatctttgacagagctcgagcagctcagcatcatgaataacccttgtgtgatggccacacctagcatacctggtttcgattatcgcccatacatcgtgtcttggtgcctgaaccttcgcgtcctggacggctatgtaatctcccagaaagagtccctcaaggctgagtggttgtattcgcaagggaaaggcagggcataccggccaggacaacacatccagttggtgcaatatctggccacggtgtgcccgctgaccagtacactggggctgcagaccgcagaggatgcaaaattggagaagatcctgtccaagcagcggtttcaccagcggcagctcatgaatcaatcacagaacgaagaattatcacccctagtccccgtggagacacgcgcttctctgattccagaacacagctcaccagtccaggattgtcagatctcccaggagtctgagccagtcatccaggtaaatagctgggtcggaattaattccaacgacgatcagctctttgcagtcaaaaacaattttcccgcatccgtacacaccactcgctactctaggaatgacctacacctcgaagacattcagactgacgaggataaactgaattgttctctcctgtcctccgagagtacctttatgcccgtggcctctggcctgtcaccactgtcaccaaccgtagaactcagactacagggaatcaacctcgggctcgaagacgacggtgtcgctgatgagtccgtgaaaggcctggagagccaggtgttagacaaagaggaggagcagcctttatgggccgctaatgaaaacagcgtacagatgatgcgttctgaaattaatacggaggtgaacgaaaaggctggcctcctcccctgcccggagcccacaatcatctccgctatcttgaaggatgacaatcactcccttaccttttttcccgagagtaccgagcagaagcagagcgatatcaaaaagcccgaaaacacccagcctgagaataaagagaccatctcacaggccacgtcagagaagctaccaatgattctgacccaacgctccgtggcgttagggcaggacaaggtcgctttgcagaagctaaacgacgctgccaccaaactccaggcctgttggcggggtttctacgccagaaattacaacccacaagcaaaggatgtgaggtatgaaatccgtctccgcagaatgcaggagcatatcgtttgtctcaccgacgagattcgtcgcctgcgtaaagaacgcgatgaggagcgaataaagaagtttgtgcaggaagaggcctttcgctttctgtggaaccagaagtggggtctggcaattcttcctaggcctgtgtctaacttctgggctcaagccgtgttccctcctcagccaccaaaggttaggagcctgcaggtgtggcagcagacagtggatcagcgattatccagctggcatacggacgtgcccccaatttcgtccacccttgtgccatcgaagcatccactatttacccaaagccaggagagctcttgtgaccaaaacgcagactggttcattgcatccgacgtggcaccacaagagaagtcactccccgaattccctgactctggctttcatagctcactgacagaacaggtacacagcctgcagcacagcctggattttgagaagtccagcactgaaggcagtgagagcagtatcatggggaactctatcgataccgtccgatacgggaaagaaagcgacctgggcgacgtcagcgaggaacatggggagtggaacaaagaaagttccaataacgagcaggataactccctgctggagcagtatttgactagcgtccagcaattagaggatgctgacgagcgaacaaatttcgacacggaaacccgcgattcaaagctgcacatagcttgttttcctgttcagttggacactttgtccgacggggcttcagtggacgagtcccacggaatatcaccaccactgcagggggaaataagccagactcaagagaactctaagctcaacgccgaagtgcaaggccaacagcccgagtgcgattcaacctttcaactgcttcatgtgggagttacggtatag

SEQ ID NO: 28081 - DNA, 828 bp, synthetic construct
  source 1..828: mol_type = other DNA; note = Synthetic coding sequence
atggccgaaccggctagtgtggctgccgagtcccttgctggaagcagagctagagccgctaggaccgtgcttggccaggtggttctgcccggagaagagctacttttgcctgaacaggaggatgccgaaggcccaggaggcgcagtggagcgaccactctctctgaatgctcgcgcatgttctcgcgtcagggtagtgtgcggcccaggcctccgccgttgtggggaccggttgttggtgacaaagtgcggcagactgcgccataaagaaccgggaagtggtagcggtgggggagtgtattgggtggactcacagcagaaacgatatgtgccagttaagggcgaccatgtgatcggcatcgtcaccgccaaatccggggacattttcaaagtggatgttggcggaagcgagcccgcatccctttcctacctgtcattcgagggggcaactaagagaaaccggcctaacgtgcaagtcggcgatttgatttatggacagttcgtcgtggcaaacaaagatatggagcctgaaatggtctgtattgattcgtgtggacgagccaatgggatgggggtgatcgggcaagatgggttactctttaaggtaaccctgggccttatccgaaagctgttggcgcctgattgcgagatcatccaggaggtgggaaagctgtaccccctggaaatcgtgttcggaatgaacgggcgaatttgggtgaaggcaaagaccattcaacagaccctgatactcgccaatatattggaagcctgcgagcacatgacatctgaccaaagaaaacaaatcttctcaagacttgccgagagctag

SEQ ID NO: 28082 - DNA, 1620 bp, synthetic construct
  source 1..1620: mol_type = other DNA; note = Synthetic coding sequence
atggccacgagcgccccactgaggtccctcgaggaagaggtcacttgtagcatttgcctggattacctccgcgacccggttactatcgattgtggccatgttttctgccgtagttgcactacggacgtacggcctatctccggcagcaggcccgtgtgtcccctgtgcaaaaaacccttcaagaaagagaatataaggcccgtgtggcagctagctagcttagtggagaatatagagcggctaaaggtcgacaaagggaggcagcctggcgaggtgacaagggaacaacaggatgcaaaattgtgcgagagacaccgcgagaaactgcactattactgtgaggacgacgggaagctcctatgtgtgatgtgccgggaaagtagagaacaccgccctcacaccgccgttctgatggagaaagcagcccagccccacagggagaagatccttaaccacctttctacgctgcgcagggaccgcgacaaaatccaggggttccaagctaagggggaagcggatattctcgcggcactgaaaaaactgcaggaccagaggcagtacatcgttgctgaattcgaacaaggccaccaattcctccgggaaagagaggagcatctgctcgaacagttagcaaagctcgaacaagagctgactgaggggagggagaagtttaagagccgtggtgttggagagctggccagattagccctggtgatcagcgaattggaaggcaaagcccagcagcccgctgctgagctcatgcaagacacccgtgatttcctgaaccggtatcccaggaagaagttctgggtgggtaaaccaattgccagagtggtgaaaaaaaaaaccggcgaattctccgacaagctgttgtcactccagagggggctgcgtgagttccagggaaaattgctcagggatcttgagtacaagacggtgtccgtgactctagaccctcagtccgcctccggatacttacagctttccgaagattggaagtgtgttacctacacctccctctacaagagcgcatacctccacccacagcagttcgactgcgagcccggtgtactagggtccaaaggatttacttgggggaaggtttactgggaagtggaggtagaacgggagggttggagcgaggacgaagaagagggcgacgaggaagaggaaggcgaagaggaagaggaagaggaagaagccggatatggggatgggtatgacgactgggagaccgatgaggatgaggagtctctgggcgatgaggaagaggaagaggaggaagaagaggaggaggtcctggagtcctgcatggtgggagtcgctcgagacagcgtcaagaggaagggtgacctcagtctgagacctgaagatggggtctgggctctgcgtctaagcagcagcgggatatgggccaatacttcaccagaagctgaactctttcccgctctgaggccgaggcgcgttgggatagccctggactatgaaggcggtaccgtgacgttcactaacgcagagtcacaagaactgatatatacattcactgccacctttacacggaggctagtaccctttctctggttaaaatggcccggaaccaggctgctgctgcgcccttag

SEQ ID NO: 28083 - DNA, 1233 bp, synthetic construct
  source 1..1233: mol_type = other DNA; note = Synthetic coding sequence
atgttcaacaacgagctgatggctgacgtgcattttgttgtgggacctcccggtgccaccaggacagtccctgcccacaagtacgtgctggctgttgggagctctgtcttctacgccatgttctatggggacttggcggaagtgaagagtgagattcatattcctgacgttgaacccgcagccttcttgatcttgcttaaatacatgtactctgacgagatcgacttggaggccgacaccgtactggcgactctctacgccgctaagaagtacatcgtgcctgctcttgctaaggcctgcgtgaattttctcgagacaagcctcgaggctaagaacgcctgtgtgctgttgtctcagtctcgcctgtttgaggagccagaactcacacaaagatgctgggaggtgatcgacgctcaggccgagatggccctgaggtccgaaggcttttgtgaaatcgacagacagacactggagattatagtgactagagaggccttaaatacaaaggaggccgtagtgtttgaagcagtgctcaactgggctgaagcagaatgtaagcgtcagggcctccctattacccctaggaataaaaggcatgttctggggcgtgccctctatctggtacgcatccccacaatgacccttgaggagttcgcaaatggcgctgcccagagtgacatccttactcttgaggaaactcattccatcttcctctggtatactgctactaataaacccagactcgactttccgctgacaaaacgaaaagggttagcgccacagcgatgccacagatttcagagtagcgcgtaccgcagcaatcaatggcgataccggggacggtgtgattcgatccaattcgccgtggatcggagagttttcattgcagggcttggactgtacggttcaagttccggaaaagccgaatatagtgtgaagatcgagttgaagcgtctgggcgtggtcctcgcccagaacctgaccaagttcatgtccgatggctcatcaaacacatttcccgtgtggtttgagcaccccgtgcaggtggaacaagacactttttatacggcttccgctgtgttggatggttcagagttgtcatacttcggtcaggagggcatgacagaggtccagtgtgggaaggtagcctttcaatttcagtgtagttcagactctacaaacgggaccggcgtgcagggcggacagattccagagctgatcttttatgcatag

SEQ ID NO: 28084 - DNA, 966 bp, synthetic construct
  source 1..966: mol_type = other DNA; note = Synthetic coding sequence
atgcgggcacttgccgcactgtcggctccacccaacgaaaggttgctcccacgcgatcctgcagctaccagggatcctgatgccgcacggcctgcgcgtcgctccgccgtcgagagactggctgccgacagggccaaatacgtccgtggtaggccgggaacggggaggggagtggcatccgagggctccggccctggcgcaatcaaatgtcctggaaacgatccaggccctcccgctcgggctcccgctcccgtggctaggcgcgcaatcgcaaggaagccgcttcgtccagacagtctgatcatctataggcagaagtgcgagttcgtccgaggcagtggcgcagacggcccaagagcatccctagtaaagaaactgttccagggtccagggaaggacaaagcgcctgttcccaggacaggagacgaaggcaaggctgggaatccggagactgtgccaaccactccaggtcccgctgcagatccggctattcccgaaactcctgccccagctgctcgttccgctgcccctagtagcgtccctgccgctcctcctggtcctgagccgagggtcgtgaggcgacgtggtctgcagcgttcacagtctgacttgtcatcgaggtattccgccgctctcgctgagagcgatacttttttccaatattgtggcctggatcccgaggttgtggaggctctgggacgcgaaaatttcaccgcgggaagcgactgtgtgacactcaaggtgaggtcggtttccgtcgcaacgtctgggtctggattctcccgtcactccggcggagatgatgaaggccttcaggaggaggagcttatagagcaggtgcctagtaccacatccgtcatcgagaggaatgcacgtataatcaagtggctttatacatgcaagaaggcaaaggagactccctcacaggagcagtccaggacccgcggaagcaaacccagtagatag

SEQ ID NO: 28085 - DNA, 945 bp, synthetic construct
  source 1..945: mol_type = other DNA; note = Synthetic coding sequence
atgtccgagaacgccgcacccggtttgatctccgagctaaagcttgccgttccttgggggcacatagccgctaaagcttgggggagtttacagggccctccagtcctgtgtctacacgggtggctggacaacgcaagcagctttgataggctgatcccactcttgccacaggatttctactacgtcgcgatggatttcgggggacatggcctgtcctctcattacagcccgggtgtgccatattacctgcagacattcgtttcagagataagaagggttgttgctgccctcaaatggaacagattctctattttgggccattcatttggtggggtcgtgggcggtatgtttttctgcacattccccgaaatggttgataagctcatactcctggatacgcctctgttccttctagaatctgacgagatggaaaacttactaacttataagaggcgtgcaatcgagcatgtgctccaggttgaggcaagccaagagccaagccatgtgttttctctgaaacagctcctccagagattgttgaaatctaatagccacctgtctgaggaatgtggggaacttctgctccagcgaggaacgactaaggtcgccaccggtttagtgttaaacagggaccaacgactagcttgggcggagaattcaatcgactttatttcaagagagctgtgtgcccactcaattagaaaattgcaggctcacgtcttgctaatcaaggctgtccatgggtactttgactcacggcagaactacagtgaaaaggagagcttgtctttcatgatcgatactatgaaatctaccttgaaagagcagttccagttcgtggaggtacccggtaaccactgcgtgcacatgtcagaaccacaacacgttgccagcattattagctcgtttttacagtgcacgcacatgctacccgctcagctgtag

SEQ ID NO: 28086 - DNA, 3945 bp, synthetic construct
  source 1..3945: mol_type = other DNA; note = Synthetic coding sequence
atggcatcgaagggggcagggatgtccttctccaggaagagctatcgtctaacaagcgacgctgaaaaaagcagggtgaccggtatcgtgcaggagaaattgctcaacgactacctgaacagaatcttcagctcctccgagcacgccccaccagccgctaccagtcggaaaccactcaacttccaaaacctccccgaacatctggatcagctcctgcaagtggataatgaggaagaggaatcgcagggacaagttgagggaaggctggggccatccaccgtggtgctcgatcacaccggcggtttcgaaggtctactgctggtggatgacgatctgttgggcgtcatcggacacagcaacttcggaactatccggagtaccacatgtgtttataaaggaaagtggctgtatgaggtgctaatatctagccagggattaatgcagatcggctggtgcacaatttcttgccgcttcaaccaagaagaaggagtcggggatactcacaactcttacgcctatgatggcaacagagtgagaaagtggaatgtcacgaccacaaattacggtaaggcttgggctgctggcgacatcgtgtcttgcttgatcgatcttgacgatgggactctcagtttttgcttgaatggggtttccttgggtaccgcttttgagaatcttagtcgaggcctgggaatggcctacttcccggctatttccctctccttcaaagagtccgttgccttcaatttcggaagcaggcccctgcggtatccagttgcaggatacaggcctctccaggatcctccctcggcagacttggttcgggcacagcgtctgctgggctgcttcagggctgtactatcagtggaactagacccagtggagggaaggctgttggacaaggaatcatcaaaatggaggctgcggggtcaacccactgtgctgctgacattggctcatatttttcaccactttgctcctctcctgaggaaggtttacctcgtggaagctgtcctgatgagcttccttctgggaatcgtggaaaaaggcacccctactcaagctcagtcagtcgtacaccaagtcttggacctcctctggctctttatggaggattatgaagtccaggattgcctgaagcaattgatgatgagcctcttgcgcttatatcgcttctcaccaatcgtgccggaccttggcctgcagatccattatcttagactgacgatagcgatccttcgccatgaaaaaagtcgaaagtttttgctctccaacgtgttgtttgacgtgctgcggagcgtggtatttttttatataaagagccctctgcgcgtagaggaggcgggacttcaggagctgatcccaaccacctggtggcctcactgcagctctcgggagggcaaagaaagtacagagatgaaggaggagaccgcagaggagagattacgcaggagagcgtatgagcgcggatgtcaacggttacgaaaaagaattgaagtggtcgaagagttgcaggtgcaaatcctgaagctgctgctggataacaaagacgacaacgggggtgaagcctcaagatacatatttttgacgaagttcagaaaattcttgcaggaaaacgcatccggccgaggcaatatgccaatgctatgtccccctgagtatatggtctgttttttacacaggttaatttccgctttgcggtattattgggacgagtataaagcttcaaacccacacgcctcctttagcgaggaggcatacataccccctcaggtgttctataacggtaaggtggactattttgacttgcaacgtctcggaggacttctcagccacctgcggaaaactctgaaggacgatctggccagcaaggctaacatcgtcatcgacccccttgaactgcagagcaccgccatggacgacttggacgaagacgaggaacccgctcccgctatggcacaacgtccaatgcaggctttggctgtgggcggaccactgcctctcccacgtccaggatggctcagctctcctacccttggaagagctaatcggtttctatcaacagccgctgtgagtctgatgacgccgaggaggccactttctacatccgaaaaggtgaaagtacgcactctgagcgttgagcagaggacccgagaagacatcgaaggttcgcattggaacgaaggtctactcctgggccgacctcccgaggagccagagcagcctctaacagagaacagcctgctcgaggtgctggatggggcagtcatgatgtataacctctcggtgcaccagcagcttgggaagatggtaggtgtgtctgatgacgtgaatgaatatgcgatggctctgcgtgatactgaggacaaactgcgccgatgtccgaaacgcaggaaggacattctcgcagaattgaccaaaagccagaaggtcttttccgaaaaattggaccacctgtccaggcggctggcgtgggttcacgcaaccgtgtattctcaggagaagatgctggatatctattggcttttgcgggtatgcctgaggacaatcgagcacggagaccggaccggctccctatttgcgttcatgcccgaattttacttgagtgtcgcaatcaattcttacagtgcactcaaaaattacttcggacctgtgcacagtatggaggagctccctggatatgaagagaccctaacgcggctagccgcaatcctggcaaaacacttcgctgacgccagaatagtggggactgatattagggattctcttatgcaggccctggcctcttatgtttgttacccccacagcctgcgggcagtggagaggatacctgaggaacagcgcatagcgatggtgcgtaatcttctcgcaccttatgaacagcgaccttgggcacagaccaactggatcctggtgagactgtggagaggatgcggatttgggtaccgctataccaggctcccacacctgcttaaaacaaaacttgaagatgccaacctgccctcacttcagaagccatgtcccagcacactgctgcagcagcacatggccgacctgttgcagcaaggacccgatgtcgccccttctttcttgaacagtgtgctcaaccagctaaattgggcgttttcagaatttatagggatgatccaggagattcagcaagctgctgaaaggctggagcgtaacttcgtcgactctaggcaacttaaagtttgtgctacatgttttgatctaagcgtctccctgctcagagtgctggagatgacaatcacactcgttccagaaattttcctagattggaccaggcccacatccgagatgctccttcgaaggctggcccagctgctgaaccaagtcctcaatagagtcactgccgaaaggaacctcttcgaccgagtggtgaccctacgcttaccaggactcgaatcagtggaccactaccccattcttgtcgccgtgaccggtattctggtgcagctgctagttcgagggcctgcatctgagcgtgaacaggccactagcgtactgctggccgacccttgttttcaactccgaagcatttgttatctcttgggtcagccagagccccctgcgccagggacagccctgcctgcacctgaccgcaagcgctttagtctccagtcttatgctgactatatttccgccgacgaattggcacaggtagaacagatgctggcccaccttacatcggcgagtgcccaggctgcggctgcaagccttcccacctccgaagaggacctctgtccaatctgctatgcccatcctatctcagctgttttccagccctgtgggcataagtcctgtaaggcctgcattaatcaacatcttatgaacaataaggactgttttttctgcaaaactaccattgtgtctgtggaggattgggagaagggcgctaacacctccaccacctcatcagctgcttag

SEQ ID NO: 28087 - DNA, 2646 bp, synthetic construct
  source 1..2646: mol_type = other DNA; note = Synthetic coding sequence
atggccggtgcagcgccacgggtgaggtacctcgctggattctgttgtcccctgggcggactggcagccggaaagccgagggtgctgtgtcacgaggctgaagtgttcctctccaccgggtctgagctggtttacgtctatgaccaggagggtggcctgctgaccgcggcattcaggttccccgaccaggtctggcacctggaactattggctcctagacgattgctgtacgccctctgtgccaggaggggcctgtattgcctgtctctggatcatccaggcaggagtcggtccacatctcaggacgatagagacagcgaggatggtgatcagcccagtccggtgatcccagtggaccccgatgcctgtattctgcctgatgcggctctgtgtgcttttaccctgctcgacagtgtgctggtaacactcgttcaaggacctgctcggtggaagatgcaactgtttgagcagccctgccccggtgaagatccaaggcccggagggcagattggtgaggtggagctctcctcctacaccccgccagcaggagtccccggaaagcctgcggctccacatttcctccccgtcctgtgttcagtcagcccatctgggtcaagagttccccatgacctcctgggaggcagtggcggatttacactagaggacgcactgttcgggctcctcttcggggcagatgcaactctcctgcagagcccagtggttctgtgcggactccctgacgggcagctatgctgtgttatactgaaagccctcgtgactagcagatccgccccaggggatccaaatgccttggtcaagatcctccaccacctggaagagccagtaatattcatcggagccctgaagaccgaacctcaggccgctgaagccgctgaaaactttctcccagacgaggatgtgcactgcgattgtctggtcgcgtttggccatcatggtagaatgctggcaatcaaggcctcgtgggacgagtcaggcaagctcgttccagagttgcgcgagtattgcctgcctggaccagtcttgtgtgcagcatgcggcggtggtggtcgggtttaccattcgaccccttccgatctgtgcgtcgtggatctgagcagggggagtacaccactgggcccagagcagccagaggaagggcctggagggttaccaccaatgttgtgtcccgcttccctgaacatctgctctgtggtgtctctcagcgcctccccccgaacccacgaaggtgggacgaagctgttggccctcagcgcgaaaggtcgcctgatgacgtgcagcctggatctcgattccgagatgcctggccctgctcggatgaccacagagagcgccggacaaaaaatcaaggaactgctttctggaatcggcaatatttcagagcgcgtgtctttcctgaagaaagccgttgatcaacgaaacaaggccctcacatcgttgaatgaagccatgaatgtgagctgcgcactactcagttcgggcactggtcctcgccctatctcatgtacaactagcactacttggtcccgactccagacacaggacgtgttgatggcaacgtgtgttctggaaaacagtagcagcttttctctagatcaaggctggacactctgcatacaggtcctgacctcttcctgcgcattagacctggattctgcttgcagtgctatcacctacacaattccagtggatcaacttggtccaggagcccgacgcgaagtgacactgcccttgggacctggggaaaacgggggtctggatctgcccgtgactgtgtcttgcacactattttattctttaagagaagtggtgggaggagcactagcaccgagcgactctgaagatccgtttctagatgaatgcccctccgatgtgctgccagagcaggagggagtttgtctgccgttaagccggcacaccgttgacatgctgcaatgtctgagatttcccggactcgctccccctcacacacgggcacctagtccattgggcccaacacgggacccagtggccacctttcttgaaacatgtcgggaacccggatcacagcctgccggacccgcaagtcttcgcgctgagtatctgcctccatctgtagcctcaatcaaggtgagcgcagagctgctacgggcagcattaaaggacggccatagcggagtcccgctctgctgtgccactctgcagtggcttctggccgagaacgcggctgttgatgtcgtgagagcaagagcactatcaagcatccagggagtcgctcctgatggtgcaaacgtgcacctgatagttagggaggttgccatgactgacctttgtcccgctggccctatccaggctgtcgagattcaggttgagagcagttcactggccgacatatgtcgggcacatcatgctgtcgtgggtcgtatgcagacaatggtgaccgaacaggccacacagggatccagcgctcccgacctccgggtgcagtacctgaggcagatccatgcaaaccacgagactctgctacgggaggtgcagacattgagggatcggttgtgcaccgaagatgaggcatcatcctgcgcaactgctcagagactacttcaggtctaccgtcaactgcgacatccatcactaatccttttatag

SEQ ID NO: 28088 - DNA, 471 bp, synthetic construct
  source 1..471: mol_type = other DNA; note = Synthetic coding sequence
atgggcgacaaaaaatctcccactcggccaaagagacaacccaagccatcctctgatgagggctattgggactgctctgtgtgcacattcaggaattccgcagaagcttttaagtgcatgatgtgcgacgttagaaaaggtacatccaccagaaaggaaaagaaggataaggtggaaaaagagaaaagcgagaaggagaccacctccaaaaagaacagccataaaaaaactcgccctcgactgaaaaatgtggaccgaagttccgcacaacatctggaggtgactgttggcgatctgacagttattatcaccgatttcaaggaaaaaaccaagagccccccagccagtagtgccgcttccgccgatcaacactcccaaagcgggagctcttcagacaatactgaaagagggatgagcagatcctcgtcccctcgtggcgaggcatcatcactaaacggcgaatcacattag

SEQ ID NO: 28089 - DNA, 777 bp, synthetic construct
  source 1..777: mol_type = other DNA; note = Synthetic coding sequence
atgtgtgcactcgagatggccgtgttggagatacagacaaacggcgatacacgagtgaccgaagaagccattgccagagcaaggcactccctctcagacccaaatatgcgggagtttatcctgtgctgtctggctcgggaccctgctagaagaccgagcgcccactcactactgttccaccgcgtcctgttcgaagtacacagcttaaaacttctcgcagctcattgctttatccaacaccaatacctcatgccagagaatgtcgtggaagagaagaccaaggcaatggacctccatgcagtgctggcggagctgccaagaccaaggagaccaccgctccagtggaggtattccgaggtgtccttcatggagctcgacaagttcctcgaggacgttcgaaacgggatctatcctctgatgaatttcgcggctacacgccctctggggctgccaagggtactggcgcctccaccagaggaggttcagaaggccaaaaccccaaccccagagccattcgatagcgagacccgaaaggtgattcagatgcagtgcaacctggaacggtccgaggacaaagcaagatggcatctgacattgttactggtcctggaggacagactccaccgacagctcacatacgacctgctgccaactgatagcgcacaagaccttgcctctgaactggtccattatggcttcttgcacgaagacgacaggatgaagttggctgcatttttagaatcaacattcctcaaataccgcggtacccaggcctag

SEQ ID NO: 28090 - DNA, 564 bp, synthetic construct
  source 1..564: mol_type = other DNA; note = Synthetic coding sequence
atgttggggcgttatagggaatatagcaatggacaagccggagctattgagcatctgaaagagtccttggagcagtccatagatcagcttcggagccaaagactgttacggaactctggtggacggagcatctcagtcacttcactcagtgcttccgacctcgacggtggaacaggctctgagctccaccatttccctcctacctcgcctctcaaagattatggcgacccccagggaatcaaaaggatgcgttcccgcactggggttcggtttgtgcaggagacagatgacatgactcagctgcacgggttccaccagtctcttcgcgacctgtcatctgagcagatccgtctcggagacgactttaatagggagctgagccgccgatctagaagtgacgctgaaaccaaaagggccttggaagaactcacagagaagctgaacgaagcccagaagcaggaagtgttcttcgtaaagtcactcgggaaggtaaagatccagtgcctcagctcagcagaggtggataatgtcttccccataaacgtatggcagtgcggaatctag

SEQ ID NO: 28091 - DNA, 927 bp, synthetic construct
  source 1..927: mol_type = other DNA; note = Synthetic coding sequence
atgatggacgtgtccggggtgggatttcctagcaaagtgccttggaagaagatgtcagcagaagagctggaaaaccagtactgtccgagccgctgggttgttcgattaggcgcagaggaagccttacggacctacagccagattgggatcgaggccactactagagctagggctacccggaagtcgttgttgcacgttccttatggcgatggtgaaggcgaaaaagtggatatatactttcccgatgagtccagcgaagccctgcctttttttctcttcttccacggtggatactggcagtcaggcagcaaggacgagtccgcgttcatggtgcaccccttaactgctcagggtgtcgcagtcgtaatcgtagcatacggaatcgccccaaaaggcactctagatcatatggtggaccaggtcacccgcagcgtcgccttcgtccagaaacggtacccttctaacaaggggatctacctatgcggccacagcgctggcgcacatcttgccgctatgatgttactggccgattggacgaagcacggtgtgacacctaacctgaggggatttttccttgtgtctggcgtttttgacttagagcctatcgtgtatacctcgcaaaacgtggccttgcagctgaccttggaggacgcacagagaaactcacctcagctcaaggtagcccaagcccagcccgtggatcccacctgccgagtgttggttgttgtggggcagtttgattcacccgagtttcaccgccagtcctgggaattctatcaagtgctgcccgttcagaccctgtgtcaaggcgaatggaaggcaagctttgaggaactgcacgacgtggaccactttgagatagtggagaatttaacacaaaaggacaacgtgttaactcaaattattctcaagacaatctttcagtag

SEQ ID NO: 28092 - DNA, 1461 bp, synthetic construct
  source 1..1461: mol_type = other DNA; note = Synthetic coding sequence
atgagcgggagtacacccttccagatgcggttggttcacctcgacctcaagggagccccaccaaaagtaagttacttgtcggagatctttccacttttcagggcactcggggctaatgggctgctcatcgaatacgaggatatgtttccctatgagggtccactgaggctgttgcgagccaagtatgcctactctcctagtgaaattaaggaaatcctacatctcgcaggtctgaacgagctggaagtcatcccgctagtgcaaactttcggccacatggagttcgtgctgaagcataccgcctttgcccaccttagggaggtaggcagcttcccatgcaccctgaatcctcacgaggccgaaagccttgccctcgttggcgctatgatcgaccaggtcctcgagctccacccaggtgcccaaagactccacattggatgcgacgaagtgtactatctaggggaaggcgaggcctccaggaggtggctccagcaggagcagaatagtacaggtaagctgtgtttaagccacatgagagccgtggccagtggagtgaaggctcgcagacccagtgtcactcccctcgtgtgggacgatatgctgagggacttgcccgaggaccaacttgccgcatctggggtccctcagctggtagaacccgtactttgggactatacagcggatctggacgtgcatggcaaagtcctattaatgcaaaaatatcgaaggtgcgggtttccccaactctgggccgcaagtgccttcaaaggtgccactggcccttcacaggctgtacctccggtggagcatcacttgagaaaccatgtgcagtggctgcaagtcgctggatcaggcccaactgattctttgcaaggtattatcctcacgggatggcagaggtatgatcactatagtgtcctgtgcgaactactaccagccggagtgccaagtctagctgcctgtctgcagttactacttcgaggtgggtttgacgaagacgtcaaagccaaggtggaaaacctgcttggtatttcatcacttgaaaaaacagaccctgtgcgcgaaggagctggcagtttccctggttccaacatcctggccctcgtgacccaagtcagtctgcacctgagatccagcgtggacgccctgttggaaggcaacagatatgttaccggctggttttcgccctaccatcggcaaaggaagctgatccacccggtcatggtgcagcatatccagcctgctgccttgagtctgttagcacagtggagtaccctcgtgcaagagctggaagcagccctacagctcgctttctatcccgatgctgtagaggaatggctcgaggagaatgtccacccgtctctgcaaagactgcaggcccttctgcaggacctgtctgaagtgtcagcaccccctctccccccaacgagtccgggacgggatgtggcccaggacccatag

SEQ ID NO: 28093 - DNA, 240 bp, synthetic construct
  source 1..240: mol_type = other DNA; note = Synthetic coding sequence
atgagctctcagcagcagcaacgccaacagcagcagtgcccgcctcagcgggctcagcagcaacaggttaaacagccttgtcagcctcctcccgtgaagtgtcaggaaacatgtgctccgaaaacaaaggacccttgcgcgcctcaggtcaaaaaacaatgtccacccaaaggaacaattatacccgctcagcaaaagtgccctagtgcccagcaggcctccaagagtaagcagaaatag

SEQ ID NO: 28094 - DNA, 822 bp, synthetic construct
  source 1..822: mol_type = other DNA; note = Synthetic coding sequence
atgggccagaaggtaactggcggtatcaaaaccgtcgacatgagagacccaacctaccgtcctctgaaacaggagttacagggtctcgactattgtaaaccgactcgtctagatttgctactggatatgcctccagtcagctacgatgtccagcttctccattcctggaacaacaacgaccggagtctgaatgtgtttgttaaggaagatgacaagctgatctttcatcggcatcccgtggcccaaagtactgacgcgattcggggtaaagtgggatacaccagaggcctacacgtgtggcagatcacatgggcaatgaggcagcgcggaacacacgcagtagtgggggtcgctacagctgacgctcccctccatagtgtgggctataccactttagtgggaaacaatcatgaaagctggggttgggatctgggaaggaaccgactgtaccacgatggcaaaaatcagccctccaagacctacccagccttcttagagccagacgagaccttcatcgtgcccgactcctttctggtcgctctggatatggacgatgggactttgtccttcattgtagatgggcagtacatgggggtggcgttcaggggcctgaaaggaaaaaagctgtacccggttgtcagcgcagtgtgggggcactgtgagatcagaatgcggtatctcaatggcttagatcctgagccactcccactgatggatttgtgtcgcaggtctgtaagactcgctttgggtagagagcggctgggcgagatccacacacttcccttacccgcaagccttaaagcatacctcctttaccagtag

SEQ ID NO: 28095 - DNA, 3315 bp, synthetic construct
  source 1..3315: mol_type = other DNA; note = Synthetic coding sequence
atgggaaacgccgcaggctctgctgaacagccggcaggacctgccgctccccctccaaagcagcccgctccgcctaagcagccgatgcccgctgctggggagttagaagaacgctttaatagagcgctaaattgtatgaacctgcctcccgacaaagtgcagctcctgagccaatacgacaacgagaaaaaatgggagcttatctgcgaccaagaacggttccaagtcaaaaatcccccagccgcatatattcagaagctcaagagctacgtggatacagggggagtctcccgtaaagtagccgctgattggatgtcaaacctgggatttaagcgcagggtgcaggaaagcactcaggtgttgcgtgaactagaaacatccctgcggaccaatcacataggatgggttcaagagtttttgaacgaagagaatagagggctcgacgttctgcttgaataccttgctttcgctcaatgttcagttacttacgatatggaatcaacagacaacggtgccagcaatagcgaaaaaaataaaccactggagcaaagtgttgaggacctgtccaagggccctccatcctcggtccccaagtcgcgccacctcaccatcaagttaacccccgcacatagtcgtaaagctctgcgcaactctagaatcgttagccagaaggatgacgtgcacgtgtgtattatgtgtttgcgggcaatcatgaactaccagagtgggttctctttagtcatgaaccatccagcctgcgtgaacgagattgcactgtctctcaacaataaaaaccccagaaccaaagcattggtccttgagctgctagcagccgtttgcttggtaagaggcggacacgacataatactagctgcgtttgacaacttcaaagaggtttgtggggagcagcacagattcgagaagctgatggagtatttcaggaacgaagactccaacatcgatttcatggtagcctgtatgcagtttattaacattgtggtccattccgtggagaatatgaacttccgcgtgttcctccagtatgaatttacccaccttggactcgacctgtacctagagcggctaaggctgacagagagcgataaacttcaagtgcagattcaagcatatctggataacatcttcgatgttggcgcattactcgaggatacggagacgaagaacgctgtactggagcacatggaggaactgcaagaacaggtggctctattaactgagaggttgcgagatgccgagaatgagtccatggctaaaatcgccgaactagagaaacagttgtcgcaggccagaaaagagctggaaacgctcagagaaaggttttcggaatcaaccgcaatgggaccctcacggagaccgccagagcctgaaaaggccccacctgctgcacctacacggcctagtgctctggaattaaaggtggaagaacttgaagagaaaggattgatcagaatactgagagggccaggtgacgcagtgagtatcgaaattctcccggttgccgtggcaacacccagtggcggtgatgcaccaacgcccggtgtgccgactgggtcaccgagtccggaccttgcccctgcggcagagccagccccaggtgctgccccaccaccaccaccccctcttccaggtttgcctagtccccaagaggcccctccttctgcaccaccacaggcccctcccctccctggatcccccgagccaccccctgccccacctcttcctggcgacctacctcctcctcctcctccacctccaccaccccctggcacagatgggcctgtgcctcctccgcctccacctcctccccctcccccaggaggtcctccagatgctttgggacgcagagactccgagctcggacctggggttaaagccaaaaagcctatacagacaaagttcagaatgcctcttcttaattgggtcgcccttaagccgtcacaaattaccggaactgttttcactgaactaaatgacgaaaaggttcttcaggagctggacatgtcggattttgaggaacagttcaagacaaagagccagggtccgtcgttggacctctccgctttgaaaagcaaggctgcccaaaaggccccatcaaaagctactttgattgaagctaatcgggcaaaaaacctggccatcaccctgagaaagggcaatctgggcgctgaacggatatgtcaagcgatcgaagcatatgatctgcaggccctaggcctggactttttagagcttctcatgcgatttctaccgaccgaatacgaacgctcgctgatcacccgcttcgaaagggagcagcggcctatggaggaactctcagaggaagacagattcatgctctgcttttccagaattccacggttgcccgagcggatgactaccctgacctttctcggtaatttcccagacaccgcgcaactgttgatgcctcaactgaacgccatcatagccgcttccatgtccattaagtctagtgacaagcttcgccagattctcgaaattgtgctggccttcggtaattatatgaattcgagtaagaggggagccgcttacggattcagactccagtctttggatgctcttctggagatgaagagcaccgatcgcaaacagacactcctgcattacctggtaaaggtgatcgctgagaagtatccacagctcacaggcttccactccgatctccatttcctcgataaggcgggttctgtgagcctggactcagtcctcgcagatgtacgatctctgcagaggggcctggagctgacacaacgggagtttgtgaggcaggacgactgcatggtgctgaaagagttcctccgcgcaaacagccccaccatggataaactcctcgcggacagcaaaacagcccaggaggcattcgaaagcgttgtggagtactttggggaaaacccaaagacaacatctcctggactcttcttcagcctgttctctcgctttattaaagcatacaaaaaagccgaacaggaggtcgagcagtggaaaaaagaagccgcagctcaggaggccggagctgataccccgggtaaaggggagcctcctgcgcctaaaagtcctccaaaggcaaggcggccacagatggacctcatttcagagctgaaacgtcgccagcagaaggagcctctgatatatgagagcgaccgtgatggagccatcgaggacatcattacagacctccggaaccagccatacatcagagcggataccggcagaagatctgcacgccgtcgtcccccaggccctccacttcaggtaactagcgacttgtcactctag

SEQ ID NO: 28096 - DNA, 603 bp, synthetic construct
  source 1..603: mol_type = other DNA; note = Synthetic coding sequence
atggaagagaagccctcgaaagtatctttaaaaagtagcgatagacaagggtccgatgaggaaagcgttcatagtgacactcgggatttgtggacaactactactctgtcgcaggctcagctcaatatgcccctttccgaggtctgtgaggggttcgacgaggaaggcaggaatatctcaaaaacacgaggatggcacagcccagggagaggaagtcttgatgaggggtataaggcatcccacaagcctgaggaactcgacgaacacgcactcgtagaactggagctccatagaggctcttctatggagatcaacctgggtgaaaaagataccgcgtctcagattgaggccgaaaagtccagttctatgtctagtctgaacatcgccaaacacatgccacatagagcctattgggctgaacaacaatctagactgccattgcccttaatggagttaatggagaatgaggctttagaaattctcacgaaggccctcaggagttaccagctgggtattggtcgggaccacttcctgactaaggagttacagagatacatagaaggcctgaagaaaaggagatctaagaggttatacgttaattag

SEQ ID NO: 28097 - DNA, 1044 bp, synthetic construct
  source 1..1044: mol_type = other DNA; note = Synthetic coding sequence
atgaagctgacatctgagaagctcccaaagaaccccttctacgctagcgtatcccagtatgcagctaagaatcagaagttcttccagtggaagaaggagaagaccgactatacacatgcgaatcttgtggataaggcactccaattgctcaaagaaagaattctgaagggggacaccctggcgtacttcttgcggggtcagctatactttgaggaggggtggtacgaagaagcgcttgagcaatttgaagaaattaaagagaaggatcaccaagcaacttatcagctgggggtcatgtattatgatggcctcgggactaccctcgatgccgagaaaggagtggattacatgaagaagatcctcgacagtccctgcccaaaggccagacacctaaaatttgctgcagcctataacttaggacgcgcatactacgaaggtaaaggagttaaacgatctaatgaggaagccgaaaggctgtggttaattgctgccgacaatggcaacccgaaggcatctgtcaaggcgcagagtatgttaggactttactactctaccaaagaaccgaaagaactagaaaaggccttttactggcattccgaggcatgcggaaacgggaacctcgaatcccagggggctctggggctgatgtacctttacggccagggaatcaggcaggatactgaggccgcattgcagtgcctgcgagaggccgctgagaggggaaacgtgtatgcccagggcaacctggtcgagtactattacaaaatgaagtttttcacaaaatgcgtcgcctttagcaagcggatagccgactatgatgaggtccacgatatccccatgattgcgcaagttactgactgcttgcccgagtttattggtaggggcatggcaatggcatccttctaccatgcccgttgcctacagctgggactgggcatcactcgagatgagaccaccgccaagcactactatagcaaggcctgtagattaaaccctgcactggcagatgaactccactctctcctgatcagacagagaatttag

SEQ ID NO: 28098 - DNA, 3525 bp, synthetic construct
  source 1..3525: mol_type = other DNA; note = Synthetic coding sequence
atgccactgcctttcggtctgaagctgaagaggacacggaggtacaccgtgagctccaagagttgcttggtcgctaggattcaactgttgaacaacgagttcgtggaattcacactcagcgtggagtccactgggcaagaaagcctggaggcggtcgcgcagaggctggaactgcgcgaagtgacttacttctctttatggtattacaataagcagaaccagcgcagatgggtcgacctggaaaagcctctcaagaaacagctggacaagtatgctctcgagccaactgtgtatttcggagtggtgttctacgtgccatctgttagtcaactgcagcaggagatcacccgctatcagtattacctccagctcaaaaaagacatcctggaagggtccatcccatgtacattagagcaagctattcaacttgcagggttagctgtgcaggccgatttcggagattttgaccagtatgaaagccaggattttctgcagaaatttgcgctgttccccgtcggttggctccaggatgaaaaagtcctggaagaggcaacgcagaaagtagccctgctgcaccagaaataccggggacttacagcgcctgacgcagagatgctttacatgcaggaagtcgaacgcatggacggatatggcgaagagtcctatcccgcaaaggacagccaggggtcagacataagcataggggcatgcctggaggggatcttcgtaaaacacaaaaatggcaggcatcccgtggtgttccgctggcatgatattgcaaatatgtcccacaacaagagctttttcgcactggagcttgccaacaaggaggaaacaattcagttccaaaccgaagacatggagacggccaaatacatttggagactgtgtgtagcccgtcacaagttttatcggcttaaccagtgtaatcttcagactcagacagttactgtgaacccaatcaggagacggagtagctcccgtatgagcctgcccaagccacagccctacgtcatgccccctccccctcaactgcattataatggacactataccgaaccgtacgcctcgtcacaggacaacctgttcgtgcccaatcagaatggctactactgccatagccagacttctctcgaccgagcgcagattgacttgaacgggaggattagaaacggcagcgtctactccgcgcactcaaccaatagcctcaacaatccccaaccttatttgcagccctctcctatgagctcaaatccgtcaattacagggtccgacgtcatgcggccagattacctgcccagccacaggcattctgccgtcatcccccctagctaccgcccaacaccagactacgaaacagtgatgaaacaactgaaccgtggtcttgttcacgctgaacgacagtcacactctcttcggaatctcaatatcgggtcatcctatgcgtactctaggcctgcagcactcgtgtacagccagcctgagatccgcgagcatgcgcagttgccttcgcccgctgccgctcattgcccttttagccttagctattcgttccactctccttccccgtacccttatcccgctgaacgcagacccgttgttggggctgtttcagtgccggagcttacgaacgctcagctgcaggcgcaggattatccctccccgaatatcatgcggactcaggtttatcgtcctccaccaccgtatcccccaccacggcctgctaattccacccctgacctttcacgccatctctacatcagttcgtcgaaccctgatcttataacccgcagagtccaccactccgtgcagacgtttcaggaggattctctcccggtcgcacacagcctccaggaagtgtctgagccgttgacggcggctcggcacgcccaacttcacaagcggaacagcattgaagtagctggtctgagccacggcctagaaggcctacgtcttaaggaaagaacccttagcgcatctgccgcagaggtggctcccagagccgtgagtgtcgggagccagccctcagtattcacggaaaggacccaacgtgaaggaccagaggaagccgagggactccgctatggccacaagaagtctttatccgacgctacaatgctgatccacagctctgaagaggaggaagatgaggactttgaggaggagagcggggcacgcgcacctcctgccagagcgagggaacctaggccaggtctggctcaagacccccctggctgcccacgggttttgctcgctggcccattacacatcctggaacccaaggctcacgttcccgacgcggaaaagcggatgatggacagttctccagtgaggacaacggctgaggcccaacgtccgtggcgtgacggcctccttatgccttccatgagcgaatccgacctcacaacatccggcaggtaccgagctaggcgcgatagcttaaagaagcgccctgttagcgatctgctgtcagggaagaaaaacatcgtggagggactaccgccactcgggggaatgaagaaaacccgggttgatgcaaaaaagattggcccacttaaactggccgctttgaatgggttatctctttctagggtgccattacccgatgaaggaaaggaggtggcaacccgcgctacaaatgatgagcgctgtaagattttagagcagcgtctggaacaaggcatggtgtttaccgagtacgagcgcatattaaaaaaacgactggttgacggcgaatgctctacagcgagactccccgaaaacgcagagcgcaaccgcttccaggatgttctgccatatgatgacgtgcgtgtcgagctggttccgactaaggagaataataccggttacatcaacgctagtcacatcaaggtgagcgtatcaggcatcgagtgggactacatcgccactcaagggccattgcagaacacatgtcaagatttttggcaaatggtttgggagcaaggcatcgccattattgccatggtgaccgctgaagaagagggtggtcgggagaagtccttccgatattggcctcgcctgggttctcggcataacactgtcacttatggaaggtttaagatcacaactcggttccggaccgacagtggctgttacgctaccacaggtcttaaaatgaaacatctgctgacggggcaagagcgcacagtctggcatctgcaatatacggattggccagaacacggatgtccagaggatctcaaggggttcctctcctacctggaggagatccagagtgtgagaagacataccaattccacatcagatcctcaatcacccaaccctccccttctcgtgcattgtagcgccggagtcggcaggaccggggtggttatcctgagcgagattatgatagcctgcctggagcacaacgaggtgttggatatcccacgcgttctcgatatgttacgacagcaacggatgatgttagttcagaccctgtgtcagtatactttcgtatatcgagtcctcattcagttccttaaatcgtctcggctcatttag

SEQ ID NO: 28099 - DNA, 2235 bp, synthetic construct
  source 1..2235: mol_type = other DNA; note = Synthetic coding sequence
atggctgccgacaaaccggcagatcagggcgctgagaagcatgaaggaacaggacagagctcggggattaccgatcaagaaaaagagctcagtactaatgccttccaggctttcacctccggcaactacgatgcttgtctacagcacctcgcctgtttgcaggacatcaataaagatgactataaaatcatactgaatacggctgtcgcagaattctttaagtctaaccagaccaccaccgacaatttgcggcagacccttaatcagctgaagaatcaggtgcattccgcggtcgaggaaatggatggccttgacgacgtggaaaactccatgctgtactacaaccaggctgtgattctataccatctgagacaatacaccgaagccatttccgtcggcgagaagctataccaattcatcgaaccctttgaagagaagttcgcccaggccgtgtgttttcttctggttgatctttacatcctcacgtaccaagcagagaaagcactgcacctgctcgccgttctggagaagatgattagccagggcaacaacaataaaaacgggaagaatgagacaggcaacaacaacaataaggacggctcgaatcacaaggctgaaagtggggctcttatcgaagctgcgaagtccaaaatccatcagtacaaggtgagggcgtacatccaaatgaaaagcctgaaggcctgcaaaagagagattaaaagcgtcatgaacaccgctggcaactccgcaccatcgcttttcttgaagtccaacttcgagtacctgcggggaaattaccggaaagctgtcaagctgctgaattcaagcaacatcgctgagcatcccggattcatgaaaactggtgaatgccttaggtgtatgttctggaataacctgggatgcatccacttcgcaatgtcaaaacataacctggggattttctattttaaaaaagcccttcaagagaacgacaatgtctgtgcccaactttccgccggttcaacagaccctgggaagaaattctcgggacgacctatgtgcacactactgactaacaaacgatacgagcttctatataattgtggaatccaactgctgcacataggaagacctctggccgcatttgagtgtctcattgaggccgttcaggtgtatcacgccaacccacgcttgtggctgagattggccgaatgctgtatcgccgctaataagggaacatctgaacaggaaactaaaggcctcccgagcaagaagggtattgtccagtccattgtcgggcaagggtatcaccgtaagattgtgcttgccagtcagtctatccaaaacaccgtatataatgacggacagagttccgccattccggttgcctccatggagtttgctgcaatttgtttgcgcaatgccctgttgctactcccagaggagcagcaggacccaaagcaagaaaacggagcaaagaattctaaccagctgggcggaaataccgagagtagcgaaagttcagaaacctgcagcagtaagtctcatgatggagacaagtttattccggcacccccaagcagtcccctgaggaagcaggaactcgagaacctaaagtgtagtatcctcgcttgttctgcctacgtagctctcgccctcggggacaatctcatggcactcaatcacgcggacaaattgttacagcaacctaagctgagcggcagcctcaagtttttgggacatctttacgccgctgaagccttaatctccttggatcggattagcgatgccatcactcacctgaatcctgagaacgtgacagatgtgtccctgggaatctccagcaatgaacaggaccaggggtctgataagggagagaatgaagctatggaatctagcggtaaaagggccccacagtgctacccatctagtgtgaattccgcgaggactgttatgctttttaacctcggcagcgcttactgccttagatctgaatatgataaggctaggaaatgcctgcatcaagcagccagcatgattcatcctaaggaagtaccgcctgaagctattttgctcgctgtctacctggagctgcaaaatggaaacactcagctggccctgcagattataaagcgcaatcaattactgccggcagtaaagactcattccgaggtgagaaaaaaaccagtgtttcagccagtccaccccattcagcccattcagatgcccgcttttacaacggtgcaacgcaagtag

SEQ ID NO: 28100 - DNA, 363 bp, synthetic construct
  source 1..363: mol_type = other DNA; note = Synthetic coding sequence
atgcacccacccccacccgctgcagccatggacttcagccagaactctctcttcggctacatggaagacctccaggagcttaccatcatcgagaggcccgtgaggcgttctcttaagacccccgaagagatagagaggcttaccgttgatgaggacctcagtgacattgagcgcgctgtctacttgctgagcgcgggacaggatgtccagggcacaagtgtcatagctaatctcccattcttaatgagacagaatccaacagagactttgcgtagagtactgcctaaggtgcgcgtgcacgaggacgcccaccttttcatccagcgggtgtggatttcacatatgtttgtgcagcgggtatag

SEQ ID NO: 28101 - DNA, 1335 bp, synthetic construct
  source 1..1335: mol_type = other DNA; note = Synthetic coding sequence
atgcgcgaaattgttctcacacaaattggccaatgtgggaatcagattggcgctaagttctgggaggtaatcagtgatgagcacgccattgattccgccggaacctaccatggagactcccacctccaattagaaaggatcaacgtgtattacaacgaggcatccggcggacgttatgtgcccagagcagtcttggtggacctggagccagggactatggatagcgtgagatctggcccattcggccaagtgtttcggccagacaattttattttcggccagtgcggcgcaggcaacaactgggccaagggtcactacaccgagggggctgagctgatggaatccgtgatggatgtggtcaggaaagaggccgagagttgcgactgcctccagggctttcaactgacacatagcctcggaggtggaaccgggagcgggatgggtacgctgctcctctcaaaaataagagaagagtatccggataggattattaacactttttctatcttgcccagtcccaaagtgagcgacactgtggtcgaaccgtataacgccacgctgagtgtgcatcaactgatcgagaatgcagatgagaccttctgcatcgataacgaggcactgtatgacatttgtagcaagacgttgaaactccctacacctacgtacggcgatctgaatcatctcgtgtcagctacaatgagtggcgtgaccacgtgccttcgcttccctgggcaactgaacgccgacctgcgaaaactggctgtcaacatggtcccgttccccagactccatttcttcatgccagggtttgcacctctgactagccgaggatctcagcagtatcgcgcacttacagttgcagagttgacccagcagatgtttgatgccaaaaacatgatggctgcttgtgaccccaggcacggacggtatcttaccgccgctgcaattttccgagggaggatgcccatgcgtgaggtcgatgaacagatgttcaacatccaggacaagaactccagttacttcgcagactggttgcctaataatgtgaaaactgcagtttgtgatattccccctcggggactcaaaatgagcgcaacatttattggtaataacaccgccatccaggaacttttcaagagggttagcgaacagttcaccgcaatgttcagaagaaaagcttttctccactggtataccggggagggcatggacgagatggagtttactgaagccgaatcaaacatgaacgatcttgtttccgaataccagcagtaccaggacgctacagccgaagaggaagaggacgaggagtacgctgaggaggaggtggcctag

SEQ ID NO: 28102 - DNA, 915 bp, synthetic construct
  source 1..915: mol_type = other DNA; note = Synthetic coding sequence
atggccaagattgagaaaaacgccccaaccatggagaaaaaacctgaactctttaacatcatggaggtggacggtgtgcccacgctgattctctcaaaagaatggtgggagaaggtttgtaactttcaagcaaagccagatgacctcatcttagccacctatcccaagagtggaacaacctggatgcacgaaattctggacatgattctgaatgatggcgatgtcgaaaaatgcaaacgagcacagactctggaccgtcacgcttttctggagctaaaatttccccacaaagaaaagccagatctggaattcgtgctggagatgtcatcccctcagcttatcaagacacatctgcccagtcatttgatcccaccatcaatctggaaggagaactgtaaaatcgtgtatgtggctcgtaacccaaaagattgtctggtgtcctactaccactttcataggatggcatctttcatgcctgaccctcagaacctagaagagttttacgaaaaattcatgagcggtaaggtggtgggagggtcatggttcgatcatgttaagggatggtgggccgctaaagacatgcataggattctgtatttgttctatgaggatattaaaaaagatccgaagagggaaatcgagaagattctgaaatttttagaaaaggacatttctgaggaaatcttgaataagattatttatcatacctctttcgacgtaatgaagcagaaccctatgactaactacactacactgcctacttccattatggatcactccatttcgccattcatgagaaagggtatgccgggagattggaagaactacttcactgtggcgcaaaatgaagagtttgataaagattatcaaaagaaaatggccggtagtaccctcaccttccgcaccgaaatctag

SEQ ID NO: 28103 - DNA, 216 bp, synthetic construct
  source 1..216: mol_type = other DNA; note = Synthetic coding sequence
atgtgtggttcctattacggcaactattacggtaccccaggctatggattctgtggctacggcggtcttgggtatggatacggtggattgggatgcggctacggctcatgctgcggatgtggattcaggcggctgggctgcggatacggttacgggtcccgcagtctgtgcggatacggttacggatgtggcagtggcagcggatactattattag

SEQ ID NO: 28104 - DNA, 2094 bp, synthetic construct
  source 1..2094: mol_type = other DNA; note = Synthetic coding sequence
atggacaaaaagtcaaccgccgagaaactgggtaaagagctgggcctacaggctaaggagctctcggccgtccacagcagtcatcatgagatcggagtgaatgatagtaacttgttttctctagaaatgcgcgaacctctggagtctagcaacactaaatcctttcacagtgcagtggagatcaagaatcgttctcaacatgagctgccgtgctttcaacatcatgggatcgatacccccacttctcttcagaagcggagcgcgtgctgtcccccatctctgctgcggctggaggagactgcttcaagctctcaggatggcgatccccagatttgggacgatttaccattctctgagagcttgaacaagttcctggccgtactggagtccgagattgctgtgactcaggcagacgtcagcagcaggaaacaccatgtggacaatgacatcgataagtttcatgcagatcattcaaggctgtctgtgacaccccagcgaaccactggagcactgcataccccaccaattgccttacggagttcccaggtgattgtgaaggcgaactgctccaaggacgactttcttttcaactgcaaggggaacctgtcgccctcagtggagaaggagagccagcccgataacaaagttgaggccgtgagtgtcaaccacaacgggcgtgacatgagtgaatactttctgcctaatccgtatctcagtgctctttcgtcttctagtaaggacctggagaccatcgtcaccctcaaaaagaccatccgaatctctcctcatcgggagtctgatcactcctcgcttaacaacaagtaccttaatggatgcggtgagattagcgtatccgaaatgaatgaaaagttgaccaccctctgctataggaaatataacgacgtgtccgacctctgcaaactggaaaataagcagtattgtaggtggagcaagaatcaggatgactccttcacaatttgtcgcaagcttacctaccccttggagaccttgtgtaattcgccaaacaggtctaccaatacgttaaaggagatgccgtgggggcatataaacaataatgtcacccagagttactccatcggatatgagggcagctacgatgctagtgccgacctgttcgacgatatagccaaagaaatggatatcgcaacggaaattaccaaaaagtcccaagacatcttgctgaagtggggtacctccttagcggaatcgcacccatccgaaagcgatttttctttgcggagcctgtctgaagattttattcagcctagtcagaaactttctctgcagagtctgtccgactcaagacacagccgtacttgcagtccaacacctcacttccagagtgactccgagtacaacttcgaaaattcccaggatttcgtgccatgcagtcaatcaacacccatcagcggttttcaccagacccgcattcacggaattaatcgggctttcaaaaaacctgtcttttatagtgacctcgacggaaactacgaaaagattagaatctttcctgagaatgataagcagcaagcctccccttcctgtccaaagaatattaagacccctagtcagaagattcggtctcctatcgtgagcggggtttcccaaccagatgtgtttaaccactacccgtttgccgagtgtcacgagacggactcagacgaatgggtgccacccacgactcagaaaatttttccctctgatatgttgggctttcaggggatagggcttggcaaatgtttggctgcctaccacttcccggatcagcaagagctcccaagaaaaaagcttaagcacatccggcagggcaccaacaaaggtttgattaaaaaaaaattgaagaatatgttggccgcagtcgtgaccaagaagaaaacccacaagtacaactgcaagtcgtctgggtggatcagtaagtgcccagacatccaggtgcttgcagctcctcaactgcatcccattctcgggccagattcctgcagcgaagtgaaatgctgtctgcccttcagcgaaaaaggacccccatctgtttgcgagactcgcagcgcttggtcacctgagcttttctcctag

SEQ ID NO: 28105 - DNA, 306 bp, synthetic construct
  source 1..306: mol_type = other DNA; note = Synthetic coding sequence
atgtccaacacacaggctgaacgctctataatcggaatgattgacatgttccataagtacactggtagagatggcaagatcgagaagccatctctgctgactatgatgaaagagaattttccaaactttctgtccgcctgcgacaaaaaagggatccactatctcgctaccgttttcgagaaaaaggacaagaatgaggacaaaaagatcgatttcagcgagtttctgtcccttcttggcgacattgccgcagactaccacaagcagtctcacggggcagccccatgctcagggggatcccaatag

SEQ ID NO: 28106 - DNA, 678 bp, synthetic construct
  source 1..678: mol_type = other DNA; note = Synthetic coding sequence
atggccgtacgcagtttgtgggcagggcgattgcgcgtgcagcggctgctggcatggtccgcggcatgggagtcaaagggatggcctctgcctttttcaactgcaacccagcggactgctggggaggactgcaggagcgaagaccccccagacgaactggggccacccttggcagaaagagccctgcgcgtgaaggcagttaagttggaaaaagaagtgcaagacctgacggtcaggtaccagcgtgcaattgcagactgtgaaaacattcgacgccgaactcagcgatgcgtcgaggacgcaaagatcttcggcattcaatctttctgcaaggacctcgtagaggtcgcagacatcctcgagaagacaacagaatgcatatcagaggagtcagaaccagaggaccagaagctgacattagagaaggtgttcagggggctacttcttctggaggctaaattgaaatccgtcttcgcaaagcacggacttgaaaagctgacgccgatcggtgataaatacgatcctcacgaacacgaattaatctgtcacgtgcctgccggtgttggagtccaacctgggaccgtcgctctggttagacaagatggatacaagttgcacggcaggacgattaggttggcacgagtggaagttgcggtggagtcacagcggagattgtag

SEQ ID NO: 28107 - DNA, 1203 bp, synthetic construct
  source 1..1203: mol_type = other DNA; note = Synthetic coding sequence
atgacaactaaaaatctagaaacaaaagttacagtaacaagtagccccatccgtggagccggagatggtatggaaactgaagagccacccaagtctgttgaggtgaccagcggagtgcagtcaaggaagcaccacagtcttcagtccccttggaagaaggccgtcccttccgaatcccccggagtgctgcaactgggtaagatgcttactgaaaaagccatggaggtcaaggcggtgcgtattctcgtgccgaaagcagcaattacacacgacattcccaacaaaaacacaaaggttaagtctttaggccatcacaagggtgaatttctcggtcaatccgaaggtgtgattgagcctaacaaagaattgtccgaggttaagaatgtgctcgaaaaactgaaaaattcagaacggcgtcttctgcaagataaggaaggcctgtctaatcagctgagagtgcagacggaagtcaacagagaactgaaaaagctactggtggcctcagttggagacgacctgcagtaccactttgagcgccttgctcgggagaagaaccagctgatcctcgagaatgaggcgctaggtcgaaacactgcacagttatcagagcagctggagcggatgtcaattcaatgtgacgtctggagaagcaagttcctggctagtagggtcatggcggacgaactgaccaacagcagggccgctctccagcgacagaaccgcgacgctcatggagctatccaagatctcttgtcagagagggagcagttcaggcaggagatgattgctacccagaagctccttgaagaactgcttgtgtccctacagtggggcagggagcagacctatagccccagcgttcagccccactccaccgcggagctcgccctcacaaatcacaagctagcaaaggctgttaactctcatttactcggaaatgtgggcatcaataaccagaaaaagatcccatctaccgtggagttttgttcaacacccgctgagaagatggcagaaacggtgctgagaatcttggatcccgttacctgtaaagagtcctctccagataatccttttttcgagtctagtccaaccactctcctcgctactaaaaagaacattggacgattccacccatacactagatacgaaaacatcacatttaattgttgtaaccactgccggggagagcttatagcgttatag

SEQ ID NO: 28108 - DNA, 735 bp, synthetic construct
  source 1..735: mol_type = other DNA; note = Synthetic coding sequence
atggatcccggtgcagccttgcaaagaagggcaggcggaggtggcggactgggagccggttcacctgcactatctggtgggcagggcagacggaggaagcagccaccccgaccagccgacttcaagctacaggtcattattatcggcagtcgcggtgtcggaaagaccagcctgatggagcggtttacggacgacacattctgtgaagcctgcaagtcaactgtgggggtagatttcaaaataaaaacagtggagctgagaggcaaaaagattcgcctgcagatttgggacacggccggtcaagagagattcaactctataacatctgcctattaccgttctgcgaaagggattattttagtttacgacatcacaaagaaggagacctttgatgatctccccaaatggatgaagatgattgataagtacgcttcagaagacgcggagttgcttctggtgggcaataagctggactgtgagacggatagagaaataactagacagcagggggagaagtttgctcagcaaataacagggatgcggttttgcgaagcctcagccaaggacaatttcaacgtggatgagatttttttaaaattagtcgacgatattctgaaaaagatgcctttagacattctgcgtaacgaactgtccaatagcatcctatcgttgcagcccgaaccagaaattcccccagaactgcctccgccacggccacacgtgcggtgctgctag

SEQ ID NO: 28109 - DNA, 1158 bp, synthetic construct
  source 1..1158: mol_type = other DNA; note = Synthetic coding sequence
atggctctgccacatgacagcaatgaaactagttatctgttaccacctaacaacgaggactgggggaggcaaacaattcccgacttcgtttatggacagaaggacctgatggctgaaggaatccagtggccccgtaatgccccaggcattcctgatgctttaccacaatccccttttgatgcagccctgtgctcggcatggaagcagcgcgtggaactgggactgttccggtacagactcagagagctccaaacccagatcctgcctggagcggttggcttcgtggctcagctgaacgtggaacgcggtgtgcaaagaaggcctcctcagacaataaaaagcgttaggcaggcttttgatcccgtgcagtttaatttcaacaaaattcggccaggcgaggttttgtttcgcctacaccgggaacccgacctcccaggcaccctgttacaggaagatatcctggttgttatcaatgtgtcccccttagagtgggggcatgtgttactggtccccgagcccgctcgccagcttccacagagactcctccctggtgctctaagagcaggtatcgaggcggtactcctttccctgcatccaggcttcagagtgggtttcaactcgctcggcggattggcgtcagtgaaccacctgcatctgcatgggtactatctggcccaccggcttccggtagagcaggcccctagtgaaccattagatccaggaggtcacttgcacctgctgcaggacctccccgctcccggattcctgttttacacccgtggcccaggtccagaccttgaatcattgatctctcgggtgtgccgcgcaaccgactatcttaccgaccatgaaattgcccacaatctgttcgtgacaagaggtgctccacccggtaagacctctccatctagtgccctgaccggagttcgagtgatattgtgggccagaaaaagctcatttggcatcaaggatggggaggcttttaatgtcgccctctgcgagctcgcaggacaccttcctgtaaagacgtcacaggacttctccagtctgacagaggccgcagctgtggcgctgattcaagactgtcgactccctcccagtcaagctgaggatgttcaggccgctctcgtggctttgatgagtcaggaagagcagtag

SEQ ID NO: 28110 - DNA, 192 bp, synthetic construct
  source 1..192: mol_type = other DNA; note = Synthetic coding sequence
atgctctgcgacaacttccccggtgccgtctttccaggctgttattggggtagctacgggtatccccttggttattcggtgggatgcggatatggttccacatacagcccagttggttatggatttgggtatggatataatgggtgcggtgctttcggataccggaggtattctcctttcgccctctactag

SEQ ID NO: 28111 - DNA, 1083 bp, synthetic construct
  source 1..1083: mol_type = other DNA; note = Synthetic coding sequence
atgttaggttcaggattcaaggcagaacgcctgcgagtgaacctgagactggttattaataggctgaaactgcttgagaagaaaaagacggaactcgcccagaaagccagaaaggaaattgctgactacctggccgctgggaaagacgaacgagccagaatcagagtggaacacatcattagagaggattacctggtggaggctatggaaattcttgaattatactgcgacctcctgttggccagatttggcctgatacagtccatgaaagaattagattctggactcgctgagagtgtatccacgcttatctgggcagcacctaggctccaatctgaggtagccgaactcaaaatagttgcagaccagctgtgtgccaagtactccaaagagtacgggaaattgtgtaggacaaaccagatcggtacagttaatgaccgtctgatgcataagctgtccgtcgaggcccctcccaagattcttgtcgagaggtatctgattgagatcgcgaagaactacaacgtcccttacgagccagacagtgtcgtaatggcagaggcaccaccgggagtggagactgatttgatcgacgttggatttaccgacgacgttaagaaggggggaccgggtcggggaggttctggagggttcacggccccagtgggcggacccgacggtaccgtgcccatgcctatgccgatgcctatgcccatgccatcagccaacactccattctcgtatccacttccaaagggtccgagtgacttcaatggcctcccaatgggaacttatcaagcctttcccaacatacatccacctcagatccccgctacccccccaagttatgagtcaatgacacttatgcttattagaattagtctgttgcatcgcctcctggtcctagatccttcccagaaaccactacaatctttcctgcccgacctgcagataaccatgaccacactgagctaccagtcttgccacctctgccaaacccactaccagctccatcttctggtccctgcaccccagcatctaaaaacacttactctaatgatcttccccggaggattgaaatcatag

SEQ ID NO: 28112 - DNA, 528 bp, synthetic construct
  source 1..528: mol_type = other DNA; note = Synthetic coding sequence
atgcctaagcggtcctgcccatttgccgatgtggcaccgctgcagctgaaggttcgcgtttcgcaacgggaactaagccggggtgtctgtgcagaaaggtactctcaggaggtgttcgagaagaccaagcgcctgctattcctgggcgcacaagcctacttagatcacgtatgggatgaggggtgtgccgtggtccatcttccggagagcccaaagccaggcccaaccggagcccctcgagccgcacggggtcagatgctgattgggcctgatggcaggcttataaggtccctagggcaagcctccgaagcagacccctctggggttgcaagtatagcatgcagctcatgcgtccgcgcagtagacggaaaagccgtgtgcggacagtgcgagagagcgctatgtggacagtgcgttaggacatgctgggggtgcggtagcgtcgcgtgcaccttgtgtgggcttgtggattgcagcgatatgtatgagaaggttttgtgcacatcctgtgccatgttcgagacttag

SEQ ID NO: 28113 - DNA, 366 bp, synthetic construct
  source 1..366: mol_type = other DNA; note = Synthetic coding sequence
atggaagctgaggtggataaattggagctcatgttccagaaggcagaatctgatctggattatattcaatatcgacttgagtacgagatcaagactaaccacccagatagtgctagtgaaaaaaaccccgtgaccctacttaaagagctgagcgtgatcaagtccagataccaaacactgtacgcacggtttaagcccgtagctgtggagcaaaaagagagtaagtcacgaatctgcgccactgtgaaaaagactatgaatatgatccagaagctgcagaaacagaccgacctcgagctttcccctttgactaaagaagagaaaaccgctgctgagcagttcaagtttcacatgccagatctctag

SEQ ID NO: 28114 - DNA, 1968 bp, synthetic construct
  source 1..1968: mol_type = other DNA; note = Synthetic coding sequence
atggtgaccactttggggcctaaaatggccgctgaatggggcggaggtgtgggttactcaggctccggccctgggcgaagccggtggcgatggtcagggagcgtatgggttaggtccgtcctcctgcttttggggggacttagggcttcagcaacctccacgcccgtatccctgggatcatccccaccatgtagacaccacgtgcctagcgataccgaggttatcaataaggtgcacttgaaggctaaccacgtggttaagcgggacgtggatgagcacctccggataaagacagtctacgataagtccgttgaggaactactgcccgaaaaaaaaaatttggttaagaataagttatttccccaggccattagctacctcgaaaaaacttttcaggtgaggaggccagccggtaccattcttctcagtagacagtgtgccacaaatcaataccttcggaaagaaaacgacccgcaccggtactgcactggtgaatgtgccgcacacaccaagtgtggacccgtaatagtccccgaggagcacctgcagcagtgtcgggtgtacagggggggaaaatggccccatggcgctgtcggagtgcccgatcaggagggcatcagcgatgccgatttcgtgctctacgtgggcgcactggcaacggagcgctgtagtcacgaaaatatcatttcttatgccgcttattgtcaacaggaggctaatatggatagacctatcgcaggatatgcaaatctctgtccgaatatgatatctactcagccacaagaatttgttggaatgctctccaccgtcaaacatgaggtgatccatgccttgggcttctctgccggtctttttgcattctatcacgacaaggacgggaaccctctgacttcgcggttcgccgacggactgcccccttttaattatagcctaggcctgtatcagtggagtgacaaagtggtaaggaaggtggagcggctctgggatgtccgcgacaacaaaatagtgcggcacacagtatatctgctcgtgactcctagggttgtagaggaagctcgtaaacattttgattgccccgtcctggaaggtatggaactcgagaaccagggcggagtagggaccgagcttaatcactgggagaagcggctgctggagaacgaagcgatgacagggtcacacacccagaaccgagtactgtctaggatcaccctggccttgatggaggatacgggacggcagatgctgagcccctactgcgataccttgaggagtaaccccctccagcttacttgcagacaggaccagagggccgtcgctgtctgtaatctccagaaatttccaaagcctttacctcaggagtatcagtacttcgacgaactgagtggcatccctgcagaagatctgccctactacgggggtagtgtagagatagctgattattgtccgttctcccaggagtttagctggcatttaagtggggagtatcagcgatctagcgattgccggatcctcgaaaaccagccggagattttcaagaattacggcgctgaaaagtacggaccccactccgtttgtctcatccagaagtccgcgttcgtgatggaaaaatgcgaacgcaagttgtcataccccgactggggctccggttgttatcaggttagctgctctcctcaaggtttgaaagtatgggttcaggatacatcatatctgtgcagccgtgccggacaggttctgcctgtgagcattcagatgaacggttggatccatgatgggaacctcctgtgccccagctgttgggacttctgcgagctttgtcctcctgagaccgaccctcccgctaccaatctaaccagagcactgcccctggacctgtgctcctgctctagctcgcttgtggtgactttatggctccttctgggaaatttgtttcctctgctggccggttttctactgtgcatctggcactag

SEQ ID NO: 28115 - DNA, 408 bp, synthetic construct
  source 1..408: mol_type = other DNA; note = Synthetic coding sequence
atgggaagagtgcgaactaaaactgtcaaaaaagcagcccgagttatcatagaaaaatactacacacgcttaggtaacgactttcataccaacaaaagagtttgcgaagaaatcgcgatcattccatcaaagaagctcaggaacaaaatcgccggatacgtgacccacctgatgaagcgtatacagagaggaccagtccgcggaatcagcataaaattgcaggaagaagagagagagaggagagataattacgttcccgaggtttccgcgctagatcaagagatcatcgaggtcgaccccgataccaaagaaatgttaaagctgctcgatttcggcagcctgagtaacttgcaagtcactcagccaacagttgggatgaatttcaagacccctcgaggacccgtatag

SEQ ID NO: 28116 - DNA, 1119 bp, synthetic construct
  source 1..1119: mol_type = other DNA; note = Synthetic coding sequence
atgaaccactgccagttgccagtcgtgattgataatgggtctggcatgatcaaggccggagtagcaggctgtagggagcctcaatttatataccccaacattattggcagagcaaagggacagagtcgtgcagcccagggaggcttggagctgtgcgtcggcgaccaggcgcaggactggcgaagctccctgtttataagctatcctgttgagcgcggactgattacttcatgggaggacatggaaatcatgtggaaacatatttatgactacaacttgaaactgaagccttgtgacggcccagtgttaatcactgagccagcactgaatcccctcgctaaccgccagcagatcaccgagatgtttttcgaacatctgggagtgccggctttctacatgtccatccaggccgtattggccctatttgccgcaggattcaccaccgggctggtattgaatagcggggctggggtcactcagtcagtgcctattttcgaggggtattgcttgccacatggggtgcagcagctagatctcgccggactggatctcaccaactatttaatggtcctgatgaagaatcacgggataatgctcctgagtgctagcgatcggaagattgtcgaggacatcaaagaaagtttttgctacgtggccatgaactacgaagaagagatggctaaaaagcccgactgccttgaaaaagtgtatcagctgcccgatggcaaggtgattcagctgcacgaccaacttttctcatgccctgaggcactgttttctccttgtcacatgaacctcgaggcacctggtatcgacaaaatttgcttctcctccattatgaagtgtgacactgggttgcgcaactctttcttctctaatatcattcttgccggtggttctacgtcctttccgggactggacaaaaggctcgtgaaggacattgctaaagtggctcccgctaatacagctgtccaagtgattgctcctccggagagaaagattagtgtatggatgggtggctccatactggcctctctgtcagcattccaggacatgtggatcaccgctgctgaattcaaggaagttggacccaacatcgttcaccagaggtgtttctag

SEQ ID NO: 28117 - DNA, 3072 bp, synthetic construct
  source 1..3072: mol_type = other DNA; note = Synthetic coding sequence
atggatgccaatagcaaggacaaacccccagaaactaaggagtccgcaatgaacaacgcaggaaacgccagctttattctaggcaccggcaagatcgtgacacctcagaagcacgccgagctgccaccgaatccatgtacgcctgacacctttaagtctcccttaaactttagcacggtgacggtggagcaattggggattaccccagaatccttcgtgaggaactcagccggtaagtcatcctcctacctgaagaagtgtcgtcgtcgttcagcagtcggcgctcggggatcccctgaaaccaaccatctaatccgtttcattgcacggcagcaaaatattaagaacgctaggaagagtcctctggcccaggacagcccatctcaggggagccccgctctttaccgtaatgtgaatactcttcgcgagcgcattagcgccttccagtccgcatttcattcaattaaggaaaacgaaaagatgaccgggtgcctggaattctctgaagccggtaaggaaagtgaaatgactgatctgactaggaaggagggcttaagtgcttgccagcagtcaggctttcctgccgtgctgtcttccaaaagaagaaggatctcatatcaacgggatagtgacgaaaacctgactgacgccgaaggcaaggtgattggcttgcagatctttaacatagacaccgatcgagcctgtgccgtggagacttctgtggatctcagcgagatcagctccaaactggggtcaactcagtcaggctttctggtggaggagtctctgccactttcagaattgaccgaaacgtcgaacgctctcaaggtggccgactgcgtggtcggaaagggtagttccgacgccgtgtcacctgataccttcaccgccgaggtgagttcagacgccgtgccggatgtgaggtctcctgcaactcccgcatgtcggagggacttacccactcccaagacctttgtgctgcgcagtgtgctgaaaaagccaagcgtcaagatgtgcctcgagagtctgcaggaacactgcaataacctgtacgacgatgatggcacacacccatctctgatctcaaatcttccaaactgttgtaaagagaaggaagccgaggacgaagaaaattttgaagcccctgccttcctgaatatgaggaaacgaaaacgcgtaacatttggcgaggacctgtctcccgaggtcttcgatgagagcctcccagcgaacacccctctgaggaaaggtggtacacccgtgtgcaaaaaagacttctcgggactgtcgtcactccttctggagcagagtcctgtgcctgaaccgttgccccagccagacttcgacgacaagggggagaaccttgagaatatcgagcccctccaagtcagtttcgctgtgctttcgagtcccaataagtccagcatcagcgagacactgagcggcactgatactttttctagcagcaacaatcacgagaaaatctcctccccaaaagttggccgtatcacacgtacatcgaaccgcagaaaccagttggtgtccgtcgtcgaggagtcggtgtgtaaccttttaaacactgaagtgcagccttgtaaagaaaaaaagatcaatcggcgaaaaagccaggaaaccaagtgtacgaaacgggctttgcccaagaaaagccaggtgttgaaaagttgtcgaaaaaaaaaaggaaaaggtaagaagagcgtgcagaagtcactgtatggagagcgagatatcgcatctaaaaaaccactgttgtcccctatccccgagctcccagaggtgccagaaatgaccccatccatcccatctattaggcggctgggttccggatatttctcttctaacggaaagcttgaagaagtgaaaacgcctaagaatccggtgaagagaaaagacttgcttcgccacgaccccgacttgcacatgcatcagggctatgacaaatatgatgtctccgaattttgctcctatattaagtcgtctagctctcttgggaacgcaacaagcgacgaggaccccaatactaatatcatgaacatcaacgagaataagaacatccctaaagctaaaaacaagtctgaatccgagaacgagcctaaggccggaacagattctcccgtgtcgtgcgcttctgtaactgaggagcgggtggccagcgattctccgaagccagcgctaactttacagcaggggcaggagttcagtgccggtggtcagaacgctgagaatctttgccagtttttcaaaatttctcctgaccttaacatcaagtgcgagcgcaaggatgattttctcggcgctgccgaaggaaagcttcaatgcaaccgactaatgcccaatagccagaaagactgccactgcttgggcgacgtgctgatagagaacaccaaggagtctaaaagccagtccgaggacttaggcaggaagccgatggagtcgtcgtccgtggtgagttgccgtgatcgcaaggaccgccgtcgcagcatgtgctattccgatgggcgtagtctacacttagagaaaaatggtaaccacactccgtcctcatccgtcggatcctccgtcgaaatcagtctggagaactcggagctttttaaggacctcagcgatgcaatcgaacagacgttccagcggaggaattccgagacaaaggtccgcaggtccactcgccttcagaaggatcttgagaacgagggcctggtttggatttctctgcccttgccttctacatcacagaaggcaaagcggagaaccatatgcactttcgatagctcgggcttcgaatccatgtcaccgatcaaagaaacagtctcatcccgccagaaaccccagatggcgccacccgtctccgatccagaaaactcgcaaggacccgcagcgggatcatctgatgagcctggaaagcgccgaaagagcttttgcatctccacactggctaacaccaaggccactagccaatttaagggctaccgacggaggtcctcactcaatgggaagggcgagagttcgctcaccgccttggagcgaattgagcataacggcgaaaggaaacaatag

SEQ ID NO: 28118 - DNA, 963 bp, synthetic construct
  source 1..963: mol_type = other DNA; note = Synthetic coding sequence
atgtctaagagcgaatccccaaaagaaccggaacagcttaggaaactgtttataggtggcctatcgtttgagactacagacgaatcactgcgatcccactttgaacaatggggaaccctcacagactgcgtggttatgcgcgaccccaacactaagcgttctagaggcttcggttttgttacctatgcaaccgtggaagaggtggacgccgcaatgaacgccaggccccataaggtggacggaagagtcgtagagcccaagagagcagtctccagggaggattcccaacggccaggagcgcatttaaccgtcaagaaaatttttgtggggggaatcaaagaagacacagaggaacaccacctgagggactacttcgaacagtacggaaaaatcgaggtgattgaaatcatgaccgatcgcggatcaggcaagaaacgcggttttgctttcgtgacttttgatgaccacgactccgtagataaaatcgtgatccaaaagtaccacactgtgaacggacacaattgtgaagtgaggaaagcattatctaagcaagagatggcaagtgcctcctcctcacagcgagggagatcagggtccggtaactttggaggtggacggggaggaggattcggcggaaatgacaattttgggaggggcggtaacttttctggtcggggagggtttggcggttccagaggaggcggtggctacggcggaagcggtgacggctataacgggtttggaaacgacgggaacaacttcggtggcggtggaagctataatgatttcgggaactataataaccagagctctaacttcgggccaatgaagggcggtaactttggcggacgctcctcaggcccttacgggggtgggggtcagtacttcgcgaaaccacgcaaccagggaggctatggcggatcctcaagttcctcttcgtacggatccggtagacggttttag

SEQ ID NO: 28119 - DNA, 141 bp, synthetic construct
  source 1..141: mol_type = other DNA; note = Synthetic coding sequence
atgtgcagtctcgccagtggggctacaggatacagccatctgctcaagaaacattttcacacggtttctctgtccatctctcttatcctcacagcctggttcatcaacatggacctgaacttcatggacaccctctcttag

SEQ ID NO: 28120 - DNA, 198 bp, synthetic construct
  source 1..198: mol_type = other DNA; note = Synthetic coding sequence
atgtgctactatagcaattactacgggggtctgaggtacggatatggagtactcggaggcggatacggttgtggttgtgggtatggacacggctacggcggtctcggctgcggttatggacgcggatatggcggttatggttatggctgctgtagacccagttgttatggtcgctactggagttgtggcttttactag

SEQ ID NO: 28121 - DNA, 7058 bp, synthetic construct
  source 1..7058: mol_type = other DNA; note = Synthetic coding sequence
atggagaaggccaccgttcctgtcgctgcagcaactgccgcagagggcgaggggagcccccctgccgttgctgctgttgctggaccccctgccgctgcagaggtgggaggtggtgtaggtggatcttctcgggcacgctcggcatcctctccacgtgggatggtaagagtgtgcgacctgctgctcaaaaaaaaaccgccacagcagcagcatcacaaggctaaacgtaataggacctgtaggcctccctcctcttctgagtcgtctagcgactcggacaactccgggggtggaggcggaggcggtggcggaggaggcggaggaggtgggaccagcagcaacaactctgaagaggaggaagatgatgacgatgaggaggaagaggtttccgaggtggagagctttattttagaccaagatgatcttgaaaatcccatgctggagactgcctccaaactgttgctttctggaaccgctgacggcgctgaccttcggaccgtggatcccgagacccaagcacgactagaggctttgttggaagcggctggcattggcaaattatcaaccgctgacggcaaggccttcgcggatcccgaggtcctcaggcgtttgaccagttccgtaagttgtgccctggacgaagcagccgctgctcttacaagaatgcgggctgaaagtacggcaaacgcgggacagtcagacaataggagccttgccgaagcttgcagcgagggtgatgtcaacgccgtccgaaaattactgatagaggggagatctgttaacgagcacactgaggagggcgagtcccttctatgtcttgcctgtagtgccggttactatgagctggcccaggttctcttggccatgcacgcaaatgtagaggatagagggataaaaggcgatatcactccactgatggccgcagccaatggcggacatgtcaaaatcgttaagctgttactagcacataaggcagatgtgaacgctcagtccagcaccggcaataccgctctcacttatgcatgcgccggaggctacgtggacgtggtaaaagtgctgctggagtccggcgcttcgatcgaagaccataatgaaaacgggcatacccctctgatggaagctggctcggcgggacacgtggaggtggcacgtcttcttttggaaaatggcgcaggcattaatactcactcaaatgaattcaaggagtccgctttgacactcgcatgttataagggacatctcgagatggtcaggttcttacttgaggccggagctgatcaggaacacaaaaccgatgagatgcataccgcgctgatggaggcttgcatggatggtcatgtggaggtggctcgactcttacttgactctggggctcaggttaacatgcccgctgactcatttgagagccctctcacccttgccgcttgtgggggtcatgttgagttggcggctctacttatagaacgcggtgcgtctctggaagaagtcaatgacgaaggatacacacctttgatggaggctgcacgagaggggcatgaggaaatggtcgctctgctactgggtcaaggggcaaacattaatgcccagacagaggagacacaggagacggccctgacactcgcatgctgcggtggcttcctggaggtcgccgattttctcatcaaagctggagccgatattgagcttgggtgtagcactccactgatggaggccgcacaggaaggacatctggagttagttaagtacctactggcggcaggagctaacgtacatgctacgacggccactggggacaccgccctgacctacgcctgcgaaaacggacacaccgatgtcgccgacgtactgctccaggctggggctgatttggagcacgaaagcgagggaggcagaactccactaatgaaagctgctagggccggtcacgtgtgcacagtccagtttcttatttctaagggtgctaacgtgaatagaaccaccgctaataatgatcacactgtcttgtccctggcctgtgccggaggccatctagccgtagtcgagcttctgctggcacacggcgctgacccgacacatcggctgaaggatggctccacaatgcttatcgaggctgcaaaaggaggacataccagcgtggtttgttacctgttagattaccccaataatctgctgtcagcccctcccccagatgtgacccagctgactccacctagccacgacctgaacagagcccctcgcgtacccgttcaggctctccctatggtggtacccccacaggagcctgataagcctcctgccaacgtggcaacgacactgcccatccgaaacaaggcagtgtccggaagagcttctgcgatgagcaatacccctacgcattcgatagctgcttcgatctcccagccacagacacctacgccatcacccattatcagcccctccgccatgttgccaatttaccccgctatagacatcgacgcacagaccgagagcaaccatgataccgcactgacgctggcttgcgcaggtggacacgaggaattagtgcagactctactcgaacgaggagcatccatagaacaccgcgataagaagggatttactccgctcattctggcagccacagccggacacgtcggcgtggttgaaattttgcttgataatggggctgacatagaagcccaatcggagcgaactaaggatacacccctcagcttggcttgctctgggggacgccaggaagtggtagagctgctcttagcaagaggtgctaacaaggagcaccggaatgtaagcgactacactcctctatctctggctgctagtggcggttacgtgaatataattaaaattctgctcaatgcaggagcggagatcaactcccggacaggatcaaagttagggatcagtcctctaatgctcgcagccatgaacgggcacactgctgccgtcaaattactgctcgacatgggatccgacattaatgcacagatcgagactaaccgcaacaccgcccttacgctcgcttgtttccaggggaggactgaggttgtctctttgctgcttgaccgaaaggctaatgtagaacacagggcaaagaccggtctcactccgctcatggaagctgcctctggcggatatgccgaagtcggaagagtgctgctggacaagggagccgatgtgaacgctcctcccgtgccatcctcccgagacactgcgctgaccattgctgccgacaagggtcattataaattttgcgagttgcttattggccgaggagctcatatcgacgttagaaacaagaaagggaacacaccactttggctggccgcaaacggcggtcacctcgacgtggtacagttgttggtgcaggcaggcgcagatgtggatgcagctgacaaccggaagatcacgccgcttatggcagccttcaggaagggccacgtcaaggtggtgcgttacctagttaaggaggtgaaccaattccccagcgacagcgaatgcatgagatatattgcaaccatcacggataaggaaatgctgaagaagtgtcacctgtgcatggaaagcatcgtgcaagcgaaagatcgccaggccgctgaggcgaataagaacgcgtctatcttattggaggagctcgacctggaaaagttacgggaggaatcgcggagactggctcttgccgcaaaaagagagaaaagaaaagaaaagaggagaaagaaaaaggaagagcaacgtcggaagttggaggagattgaagcgaagaacaaagaaaactttgagctacaggccgcacaggaaaaggaaaagttgaaggtggaagacgaacctgaggtcttaacggagcctccgtccgcaaccacaactaccactattgggatatctgccacatggacgacactggcaggatcccatggcaagagaaacaacacaattactacgacgtcatctaaacggaagaatagaaaaaacaagatcacaccagagaacgttcagataatatttgacgacccattgcctatctcctattcgcagcctgaaaaggtgaacggcgaaagcaagtcatctagcacctcagaatccggggattcagacaatatgcgcatatcctcctgctctgatgagtcaagcaattccaattcttccaggaaatcagataaccattctccagccgtggtgactactacagtgtcttcaaaaaagcagccctccgtgcttgtaacatttccgaaagaagaaaggaagtcggtctccggcaaagcaagcataaagctgtccgaaacaataagcgaaggcacaagtaactctctgtccacgtgtacaaaatccgggccatcccctctgtcttccccaaatgggaagctcacagtggcctcacccaagcgcggacagaaacgggaggagggttggaaggaggtggtgcgcaggagcaaaaaggtgagcgttcccagcaccgtgattagcagagttatcggcagaggcggttgtaacatcaacgccatccgggaattcactggggctcatattgacatcgacaagcagaaagataagaccggagacagaataattacgatccgcggaggcactgaatccacgaggcaggctacacagctcatcaatgctttgattaaggatcctgacaaagaaattgatgagttgattcccaaaaatcgattgaagtcaagctccgctaactctaaaattggcagcagcgcgccaacgacgaccgctgccaatacgtccttgatgggcattaaaatgactaccgtcgccctctccagcacctcccagaccgctactgcccttactgtgccagcaatttcaagcgcgagcacacataagacaatcaaaaatccagtgaataacgtgaggcccggttttccagtctcccttccactggcctatcctcccccacagttcgcccatgccctgcttgctgctcagaccttccaacagatccgcccacctcggctgcctatgacccattttggtggaacgtttccccctgcccagtctacatggggccctttcccagtgcgtccactaagcccagcaagagcaacaaactcacccaagccccacatggtgccaagacacagcaatcagaactcatcggggtcccaggttaactccgccggttccctgacgtcctcgcctaccaccacgacctcatcttccgcttcaacagtcccgggaacatctactaatgggtcaccgtcttcaccctcagtccgcaggcaactgtttgtgaccgtggtaaaaacaagcaacgctacaactaccacagttacgactactgcctcaaacaacaatactgcacctacaaacgctacataccccatgccgaccgcgaaagagcattatccagtgagttcccctagttcaccttctcccccagcgcagccgggaggagtcagtagaaacagccctttggactgcggcagcgcatctccaaacaaggtagccagctccagcgagcaggaggccggaagtcctccggttgtggagacaaccaacactcgccctccaaactctagctcatcgtccggtagctcatctgcgcacagcaaccagcagcagcctcccggttccgttagccaagagccccgacctcccctgcagcagagtcaggtacctccccctgaggttcgtatgaccgtgccaccactggccacatctagcgcccctgtcgccgtgccaagcaccgcacctgtgacatatcccatgcctcaaacaccaatgggctgtcctcagccgactccgaagatggagacacccgctatccggccaccacctcatggaaccaccgctccccataagaattcagcatcagtgcagaattcttcggtggccgtcctcagcgtgaatcacataaaaagaccccattcagtcccaagcagtgttcagctccctagcacactgagcacgcagagcgcctgccagaactccgtgcatccagccaataagcctatcgcccctaactttagtgcccctttaccattcggtccatttagtacacttttcgaaaatagtccaacgagtgcccatgctttctggggcggaagtgttgtcagcagtcagtcaactcccgagtccatgcttagcggcaaaagttcctacttgccgaatagcgaccctcttcaccagtctgataccagtaaggctccaggctttcggcctccgctgcagcgacctgccccaagccctagcggcattgtcaatatggactctccctatggaagtgtcacgcctagcagcactcatcttggaaatttcgccagtaacatttccggcggacaaatgtacggaccaggcgcacccctcggtggcgcaccggctgctgccaacttcaatagacagcatttctctcccctgtctctgttaactccctgctcgagcgcttctaacgatagttctgctcagtctgtcagctcaggtgtgcgagcccctagccctgctccaagctccgttcctttgggttctgaaaaacccagcaatgtgagtcaggaccgcaaggtaccagtgccgatcgggaccgaacgcagtgccaggatccggcaaactggaacgtctgctccttccgttattggctcaaatttatccaccagcgtggggcacagcggcatctggagcttcgaagggataggcggtaatcaggataaggtggattggtgtaacccaggcatggggaacccaatgatccataggcccatgagcgaccctggcgttttttctcagcaccaggcaatggagcgagacagtactggtatcgtcacaccctctgggacgttccaccaacatgtccccgcaggctacatggacttcccaaaggtggggggtatgccctttagcgtgtacggtaacgccatgattcctcctgtcgcacccatccccgatggtgccggaggcccaatcttcaatggtcctcatgccgcagacccttcatggaactcactcattaagatggtatcttcctccactgaaaataacggccctcagacagtctggactggaccctgggctcctcacatgaactctgtgcacatgaaccaattgggcta

SEQ ID NO: 28122 - DNA, 1374 bp, synthetic construct
  source 1..1374: mol_type = other DNA; note = Synthetic coding sequence
atgtccggaactcgggctagcaatgatagacctcccggagctggcggtgtgaaacggggaagactgcagcaggaagcagcggcaactggaagccgagtcacggtggtgctgggggctcagtggggcgatgagggcaagggcaaggtcgttgacctgcttgctaccgacgccgacatcatttcaaggtgtcaaggaggtaacaatgccggtcacactgttgtggtggacgggaaagagtatgatttccatttgctgccatccggtatcatcaacactaaagcggtttcgtttattggaaatggggtggtcattcatttacccggacttttcgaggaggcagagaagaacgagaaaaaggggttaaaggactgggagaagcgattaattattagtgatcgggcacacctggtcttcgattttcaccaggcagttgacggcctccaagaggtacaacgacaggcacaggaagggaagaacatcggcaccaccaaaaaggggattgggcctacttacagcagtaaggccgctcggacaggactcaggatttgcgatcttctatctgatttcgacgagttctcgtcccggtttaagaatctagcccaccagcaccaatcgatgttccccactctcgagatcgatatcgaagggcaactgaagcgacttaaaggatttgcggagaggatccgaccaatggtgcgggatggcgtatacttcatgtatgaagccttgcacgggccacccaagaaaatattagtggaaggtgccaatgctgccctgttagacattgacttcggcacataccccttcgtcacatcctcaaattgcaccgtaggcggagtgtgcactggtctgggcatccccccacaaaacattggtgacgtgtatggggtggtaaaagcctatacaactagggttggcattggggcatttccaacagagcagattaacgagattgggggtctgctgcagacacgcggacacgaatggggggtgactacaggccgaaaacgcaggtgcgggtggcttgatttgatgatccttaggtacgcccatatggtcaatggatttaccgctttggctcttactaagctggatattctagacgtgttaggggaagtgaaagtgggggtgtcctacaagctgaatggtaaaaggatcccgtactttcccgcaaatcaggagatgctgcaaaaggtggaagtcgaatacgagaccctccctggttggaaggccgacacgacaggcgcacgaaggtgggaggatctgccgccacaagcccagaactacatcaggtttgtggaaaaccacgtgggagtggctgttaagtgggtcggagtcgggaagtcccgcgagtcaatgatacagctgttctag

SEQ ID NO: 28123 - DNA, 1596 bp, synthetic construct
  source 1..1596: mol_type = other DNA; note = Synthetic coding sequence
atgtgtagtctggcgagtggcgcaactggcggacggggtgccgtggagaacgaggaggacctgcctgagctgtctgactcaggcgatgaagccgcatgggaggatgaggacgatgcggacttacctcacggcaagcaacagaccccatgcttgttttgcaatagactttttacgagcgccgaggaaacattttcccattgcaaatccgagcatcagttcaacatcgacagtatggtccataaacacggcctcgaattttatggctacatcaaactaatcaacttcattcggttaaaaaatcctactgtcgagtatatgaattccatttataatcctgtgccctgggagaaggaagaatacctcaaacccgtgttggaggacgatctgctgctgcagttcgacgtagaagacctgtacgaacctgttagtgtcccattttcataccctaatggcctgagcgaaaatacatccgtcgtggaaaaactcaagcatatggaagcacgagccctgtccgccgaggcagctctggcgagggcccgagaggatttgcagaagatgaaacaatttgctcaggattttgtcatgcataccgatgtccgcacctgtagctctagcacctctgtcatagcagacttgcaggaagatgaagatggcgtttacttttcttcctacgggcactatggcattcacgaggagatgttgaaggataagatccgcactgagtcatatagagatttcatttaccagaaccctcatatcttcaaagataaggtagtgttagatgtgggatgcgggacaggtattttaagtatgttcgcggcaaaggcaggtgccaaaaaagtcctgggagtggaccagtctgaaattctgtatcaggccatggatatcatccgattgaacaagctggaggacacaatcacgctgataaaggggaagatcgaagaagttcacctgccggttgaaaaggtggacgtcatcataagcgagtggatgggttactttcttctcttcgagagcatgctcgattctgtgctgtacgccaagaataaatacttggccaaaggtgggagtgtctatccggacatttgtactatatcactagtagccgtcagcgatgtcaacaaacacgcagatcgcatagccttttgggacgatgtgtatggattcaagatgtcatgcatgaaaaaggctgtcatcccagaggccgtcgtggaggtgttagacccgaagacacttattagcgaaccatgtgggatcaaacatattgattgccataccacatccatcagcgacctcgagtttagtagcgacttcactttgaaaatcaccagaacttcaatgtgtactgccattgcgggatattttgatatttacttcgagaaaaattgtcacaacagagttgtgttcagcacaggaccacagagtactaaaacacattggaaacagacagtgtttctgctggaaaaacccttctctgtgaaggcaggagaagccctcaagggtaaggtgaccgtacacaagagtaaaaaagatcctcgttccctgaccgtcacgctgacactgaacaattctactcagacctacggcttgcaatag

SEQ ID NO: 28124 - DNA, 1659 bp, synthetic construct
  source 1..1659: mol_type = other DNA; note = Synthetic coding sequence
atgtctgtgctctcacccggagacctcaagccaaagaggggatcacctcatcgtggaagcctagatagaactgatgcttccaccgacctcgccatgcgtagctggccaagcgagcttggttcccgtacatgttcaacaagtgcgacgacaacagccccttcgaatagcacaccaatcgcccgacaccctggcaggaccaaaggttataactccgacgacaacttgtgtgaaccctcactggagttcgaagtgccgaaccacagacagtatgtgtccagacccagctctctagagtccagtagaaacacctctagcaacagctcgccgctcaacctgaaaggcagctccgagcaattgcatggacgtagcgagtctttttcttcagaagacctcatcccctcaagagacctcgcaacactccccagggaggcttccacaccaggcagaaatgccctcggcagacatgagtaccccctccccaggaacgggccattaccccaagagggcgctcagaagagaggcaccgctcctccttatgtgggcgtccgcccatgttccgcctcacctagtagcgagatggtcacgctcgaggagttcctggaagaaagcaaccgtagctcccctacacacgacacaccttcctgcagggatgatttgctttccgattatttcagaaaagcctctgaccctcccgcaattggaggccaaccgggaccgccagcaaaaaaagaaggggctaagatgcctaccaactttgtggcccctacagtgaagatggcagctcctacgagcgaaggcaggcctttgaagccaggtcagtacgttaagcctaatttcaggctaacagaagcagaggcacctccttctgtggctcctagacaggctcagcctccccagagcctcagcctcgggaggcctcgtcaggctccagtaccccctgcctcacatgctcctgcctctaggagcgcctcattgtcacgcgcattttctctcgcgagtgccgacttgctccgcgcaagcggccctgaggcttgtaagcaagagagtccccagaaattaggcgctccagaggctcttggaggacgcgaaaccggttcccataccctacaaagccccgcacctccgtcaagccactctctggctcgggagcggaccccccttgtcggcaaagcagggagctcctgtcagggccctggcccacgctccagacctctcgatacaagacgcttctctctggcgccacctaaagaagagcgcctcgcccctttgcaccaatccgctacagcccctgcgatcgccacagcgggagcgggtgcggctgccgctgggtccggatctaattctcagctgctccacttctcccccgcagcagctccagccgcacgcacaaaacccaaagctcccccacgctcaggtgaggtggctacaatcactcctgttcgagcaggcctttctctgtccgaaggggacggggtgccaggccagggctgctccgaggggctgccagcaaagagtcccggacggagccctgatctggcccctcatctaggcagggccctggaagattgttccagagggtcagtgagcaaaagcagtccagcctctcctgagcccggaggggatccccagactgtgtggtacgaatatggctgcgtttag

SEQ ID NO: 28125 - DNA, 774 bp, synthetic construct
  source 1..774: mol_type = other DNA; note = Synthetic coding sequence
atggcggacaaaatggacatgtcgctggatgatatcattaaacttaacaggtcacagcggggtgggagaggcggtggacggggtagaggcagggctgggagtcagggcggtagggggggaggcgcacaggctgctgcccgtgtgaacagaggagggggtccaattcggaacagaccagcgatcgctcgaggggcagcaggcggtggcggaaggaataggccggctccttacagcagacctaaacagctgcccgataagtggcagcatgacctgtttgattcgggattcggtgggggagccggtgtcgaaacaggcggaaagctgttggtgtctaacctagactttggtgtgtcagacgccgatatccaggagctttttgctgagttcggtactctaaaaaaggctgcggtgcactacgacagatctgggagaagcctgggtacggccgacgtgcacttcgaacgaaaagccgacgcgctgaaagccatgaaacaatataacggcgtgccacttgatggtagacctatgaatatacagctggtcacaagccagatcgatgcacaaagacggccagcacagagtgttaaccgagggggaatgactcgcaatcgcggagccggaggatttggcggaggaggtggaaccaggcggggaacccgcggaggagccagaggacggggtagaggggcaggtcgcaattctaaacaacagctgtcagccgaggaacttgatgcacagctcgatgcttacaatgcccgaatggataccagctag

SEQ ID NO: 28126 - DNA, 876 bp, synthetic construct
  source 1..876: mol_type = other DNA; note = Synthetic coding sequence
atgggcgttgcagctaggccccctgcactccgccactggtttagccactcaattcccctcgcaatcttcgccttattgctgctgtatctgtcagtccgttctctgggagccagatctggttgcgggccaagagcccagccttgtgtccccggagaaactgcaccttttcaggtgagacaggagagcgggacattagaggcccctgagagaaaacagcccccttgtctgggacccagggggatgctggggagaatgatgagaaggtttcacgcatcactcaagccagagggtgacgtcggcctgtctccctacctggctggctggcgagcactcgtagagttcctaacccctttgggctcagtgtttgcgtttgccacacgagaagccttcacaaaggttacggacctggaagcgcgagtccatggcccagacgctgaacactactggagcctcgtggccatggccgcttgggagagaagggccggtctcttggaacaaccaggtgcagcccctcgcgacccgacgaggtcgtccggaagtaggaccctgctcctgttgcatagagccctcagatggagccaactgtgcttgcaccgggtcgctacgggtgccttaggaggcccagacgccggtgttcagtgttccgatgcgtatcgggcagctctcggccctcatcacccctggctcgttcgccagactgcacgcctggcattcctggccttccctggaagaaggcgtttgcttgaactggcctgcccaggcgcaaccgaggcagaagctagggcagctttggtccgcgctgccggaactctcgaggatgtgtacaatagaacccagagcctgcttgcagagcgcggactgctgcaactagcttag

SEQ ID NO: 28127 - DNA, 3303 bp, synthetic construct
  source 1..3303: mol_type = other DNA; note = Synthetic coding sequence
atgggtaacgcagcgggaagtgcagagcagcccgcaggccctgccgctcctccacccaagcagcctgcgccaccgaaacagccaatgcctgccgcaggcgagctggaggagcggttcaaccgcgctttgaactgcatgaatctgccgccagataaagtccaacttctgagtcagtacgataatgaaaagaaatgggagctgatctgcgatcaggaacggttccaagttaagaatcctccagcggcatatattcagaagttaaagtcttacgttgacactgggggagtatcccggaaggttgcagctgattggatgagcaatctcggttttaagcgacgggtccaggagtccactcaggtgctgagggagctggagacaagcttgaggactaaccacattgggtgggtgcaggaatttctgaacgaggaaaataggggtctggatgtcctgctagagtatctggccttcgcccagtgctctgttacctatgatatggagagcaccgataacggcgctagtaacagtgagaagaacaaacccctagaacagtccgtggaagaccttagcaagggacccccttcctctgtcccaaaaagccggcacctcactatcaagctgacacccgctcatagccgaaaggcactgaggaactctcggattgtgtcccaaaaggacgacgtccacgtgtgtattatgtgccttcgggctataatgaactaccagtccggtttcagccttgttatgaaccatcctgcttgcgtcaacgaaatcgctctaagcctcaataataaaaaccctagaacaaaagctctggtcctggaattgttggccgctgtgtgtctggtccgcggagggcacgacatcatcttggctgcttttgacaactttaaagaagtgtgcggagagcaacataggttcgaaaaactgatggagtatttcaggaatgaggactctaatatagacttcatggtcgcatgcatgcaattcatcaacattgtggtccactctgtcgagaacatgaatttcagggtttttcttcagtacgaatttacacatcttggattggacctctatctggagcgcttgaggctcaccgagagtgataaactccaagttcagatccaggcttacctcgacaacatttttgacgtgggggcactgttggaggacacagagacgaaaaacgccgttctagaacacatggaggagctgcaggagcaggttgcactgctgactgaaagactgcgagatgccgaaaatgaatctatggccaaaatcgccgagctagaaaagcagctgtcgcaggctagaaaggaactggagacacttagagagaggttctcagaaagcacagcaatgggacctagcaggcgacctcccgagcctgagaaggcgccacccgcagccccaacacgaccctccgctctcgagcttaaagttgaagaactggaggagaaaggactcatacgcattctgcgcggtccgggtgatgccgtgtccattgaaatcctgcctgtggcggtagcgaccccctccggcggagatgcacccaccccaggcgttcccaccggttccccctctcccgacctcgcgcctgccgcagagcctgctccgggtgccgcacccccaccaccgcctcccctcccaggactgccgtccccgcaagaagcccctcccagcgcccctccccaggctcccccattgcctggcagccctgaacccccaccagccccacccctaccaggggatctgccccctcccccacccccacctcctccacctcccggaaccgacggaccagtaccccctcccccacctcccccaccgccacctccaggcggaccacccgacgctctcggaagaagagattccgagctcgggcctggggtaaaagccaaaaagccaattcaaaccaagtttcgcatgcctctgctgaattgggtagccctcaagcccagccaaataaccggcaccgtattcactgagctcaacgacgagaaggtgctccaggaattggacatgagcgatttcgaggaacaatttaagaccaaatcccaggggcctagtctcgacctttctgcccttaaatctaaggcggctcagaaagcaccttctaaggctaccctgattgaagctaaccgggctaaaaacttggcgataactttgaggaaaggtaacctgggagccgagcgaatttgtcaggcaatagaagcttatgacctacaggcgctgggcctggacttcctcgagctgctgatgcggtttctgcctaccgaatatgagcgttccttgattacacgctttgaacgcgagcagcgccctatggaagaactcagtgaggaggacagatttatgctgtgtttctccagaattcctagactccccgagagaatgaccacgttaacttttctgggcaactttcctgacactgcacaactgctgatgcctcagcttaacgccataatcgcggcaagtatgtctatcaagtccagcgacaaactgagacaaatactggagattgtcctggctttcggcaattacatgaacagcagcaagcgcggagcagcttatgggttccgcttgcaaagtttggatgcactgctagaaatgaagagcacagacagaaaacagacactgttgcattacctcgtgaaggtgattgcggaaaagtacccacagctgacgggtttccattctgacctccattttctagacaaagcgggatctgtaagcctggactctgtcctagcggatgtgagaagcttgcaacgagggctggagctgacccagagggaatttgtgagacaagatgattgtatggtgctgaaagagtttctgagagccaacagccctaccatggataaacttctggcagacagtaaaacggcccaggaggcctttgaaagtgttgttgagtactttggcgagaacccgaaaacaacatcacccggattgttcttctcacttttttcccgcttcatcaaggcatataagaaggcggaacaggaggtcgagcaatggaagaaagaggcagcagcccaggaggctggcgctgacactcctggcaagggggagcctccagccccaaaaagtccccctaaggctaggaggccccaaatggacctcatttcagagctgaagagacggcagcaaaaagagcccctcatctatgaatctgaccgggacggtgccattgaggacatcatcaccgtgatcaagactgtgccatttactgccaggaccgggaagcgaacatctaggctactctgtgaggctagccttggcgaagagatgcccctctag

SEQ ID NO: 28128 - DNA, 1839 bp, synthetic construct
  source 1..1839: mol_type = other DNA; note = Synthetic coding sequence
atggaaaaccagttggccaagagtactgaggagcgcaccttccagtaccaggatagcctgcccagtctcccagttccatcccttgaggaatctcttaaaaaatacttggagagcgtcaagccctttgccaaccaagaggaatataagaagacagaggagatcgtacaaaagtttcaaagcggaataggcgagaaactgcaccagaaattgctggagagggctaagggcaagagaaactggctcgaggaatggtggctcaacgttgcctacttggacgtgcggattccctcccaattgaacgtgaacttcgcgggtcctgcagcacatttcgagcactattggccacctaaggagggcacgcaactcgaacgaggatctattactctgtggcataatttaaattactggcagctgctcagaaaagagaaagttccagtgcataaggtggggaatactccgctcgatatgaatcagttccgcatgcttttctcgacttgcaaagtcccaggaattacacgggattcaatcatgaattacttccggacagagagcgagggtcgtagccccaaccacatagtggtcctgtgtcggggacgggctttcgtgttcgacgtcatacacgaaggctgtctcgtgacaccccctgagctcctgcggcaactcacctatatacacaaaaagtgccactctgagccagacggccctggcattgccgcattaacctctgaggaaagaactcgatgggctaaggcccgagaatacctgataggattggacccagagaacctcgccctactggagaagatccagagctctttgctggtgtactccatggaggactcctctcctcacgtcactcccgaggactatagcgagattatagcagcaattctaatcggggatccaacagtcaggtggggtgacaaatcgtacaacctcattagcttctcgaatggtgtctttggctgcaattgtgaccacgctccatttgatgctatgatcatggtgaatatttcttattatgtggacgagaagatattccagaatgagggacggtggaaggggagtgaaaaggtgcgggatatccccctacctgaggaattaatttttatcgtggatgagaaagtattaaacgacattaatcaggccaaagcacagtatctgcgggaagcatcggatcttcagatagcagcctatgcctttacttcttttggtaaaaagctcaccaagaacaagatgctccacccagacacatttattcagctggccttacaacttgcctactatcgtcttcatggacaccccggttgttgttacgaaacagctatgacaaggcatttttaccacgggcgtaccgaaacaatgagatcatgtactgtcgaggccgtgcggtggtgtcagtcaatgcaggatccttccgtcaatcttagggagcgtcagcagaagatgcttcaggcattcgcaaaacacaacaaaatgatgaaggactgcagtgctggtaagggattcgataggcacctgctggggctcctgctcatcgcaaaggaggaaggcctccccgtcccagagctatttactgatcctctgtttagcaaaagcggcggtggcggtaattttgtccttagtacgtcacttgtggggtaccttcgcgtgcagggggtggtcgtccccatggtacacaatgggtatggcttcttctaccacattcgagatgacaggtttgtagtcgcgtgcagtgcttggaagtcatgtcctgaaacagatgcagagaaactggttcaactgactttctgcgcgtttcacgacatgattcagcttatgaatagtacgcacttatag

SEQ ID NO: 28129 - DNA, 1773 bp, synthetic construct
  source 1..1773: mol_type = other DNA; note = Synthetic coding sequence
atgtccgatagtcccgcagggagcaatccacggactcccgagagcagcgggtccggttctggcggaggaggtaagcggcctgccgttcccgctgccgtttccttgctgcctccagcggaccccctccgccaagccaataggctgcccatacgcgttctcaaaatgctgtccgctcacacaggccatcttctgcatccagagtacctacagccactgagttcaactccggtgtcccccatcgagctcgacgccaagaaaagccctctagctctcctggcccagacttgctcccagattggcaagcctgaccctcccccttctagtaaactgaattccgtagccgcagcggcaaatggcctgggggctgagaaggaccccggtcggagtgcaccaggcgctgccagtgcagccgctgctcttaaacaattgggggatagccccgctgaggacaaatcatcttttaaaccatattcaaaggggagtggcggaggggactctcggaaagactcaggctcaagttccgtgtcctcaacgtcgtcttccagctcttcatctccgggagataaagccggattccgagtgccaagcgcagcatgccctcctttcccacctcacggggctccggtgagtgcaagcagcagctcttcaagccctggcggtagcaggggcggtagtcctcaccactccgattgcaagaacggcggtggcgtgggcggtggcgagctggataagaaagatcaagagcccaaaccaagtccagagccagctgcggtctcccgcggaggaggcggtgagccaggcgctcatgggggtgccgagagtggcgcaagcgggagaaagtccgaaccgcctagcgctctagtaggcgctggtcatgtggcccctgtctcaccctataagcccggacacagcgtcttcccacttccaccgagctctatcggatatcatggctctatcgtgggagcatacgccggatatcccagccagttcgtgccgggactcgatcccagtaaatcagggctcgtgggaggtcagctctccggtggattggggttgccacctgggaagccccctagcagttcgcccctgaccggcgcttcgcctccatctttcctgcaagggttatgtcgcgacccctactgtctgggcggatatcatggtgccagtcatctgggtggatcaagctgttcaacgtgtagcgcacacgatcctgccggtcccagtctgaaggcgggtggctatcctctggtgtacccaggacacccactccagccagctgccctgagttcttccgccgctcaggcagctctgccgggacatcctttgtatacgtacgggtttatgctccagaacgagcctctgccccactcttgcaactgggtggcagccagtggcccatgcgataaacgcttcgccaccagcgaggaactcctgagtcacctgaggacccacacagccttgccgggtgccgagaaactgctggccgcatatcctggtgcatcaggactgggcagcgctgccgctgctgctgcagccgctgcttcctgtcacctgcacctgcccccacctgcagcacctggcagtccaggtagtctcagtctgagaaaccctcacacgctgggactctcgagataccatccctatggaaaaagccatctgagtacggccggaggtctggcagtgcctagcctgcccacagccggtccttactattcaccctacgccttgtatggacagagactcgcaagtgcgtctgccctcggctaccaatag

SEQ ID NO: 28130 - DNA, 1020 bp, synthetic construct
  source 1..1020: mol_type = other DNA; note = Synthetic coding sequence
atgtggacagcccgaggtccattcaggagggaccgctggtcctctgaggacgaggaggccgctggaccatctcaggctctatcaccgttgctgagtgacactcgcaagatcgtttcagaaggtgagttggatcagcttgcccagatacggcctctgatctttaacttccatgagcagactgctatcaaggactgtttgaagattctcgaagagaaaacggccgcttacgatatcatgcaagagttcatggcactcgagcttaaaaacctgccaggggagttcaactctggcaatcaacccagcaatagggaaaaaaatagatacagggacatactcccatatgatagcaccagggtgccactgggaaagtccaaggactacattaatgcgtcctacattcgcatcgtcaactgtggcgaagagtacttctacattgcaacccagggccctctcctatcaactatcgacgatttctggcagatggttctggaaaataactccaacgtcatcgcgatgattacaagggagattgaaggaggaatcatcaagtgctaccactattggccgattagtcttaaaaagcctctcgaactaaagcacttccgggtgttcttggagaactaccagattctgcagtatttcataattcgtatgtttcaggtggttgaaaaatccacaggtaccagccactccgtcaaacagctccaattcactaaatggccagatcacggcaccccagcgtcggctgatagctttataaagtacatcagatacgcacgcaagtcccacttgacgggacctatggtagttcattgcagcgctgggattggcaggacaggagtattcctgtgcgtggatgtggtcttctgtgccattgtgaaaaactgtagtttcaacatcatggacatcgttgcacagatgagagagcagcgctcaggaatggtgcaaacaaaggaacagtatcacttctgttacgatatagttctggaggtcctccgcaaactgttgaccttggattag

SEQ ID NO: 28131 - DNA, 1917 bp, synthetic construct
  source 1..1917: mol_type = other DNA; note = Synthetic coding sequence
atgtcagccctggccggtgaagacgtgtggcgttgcccaggatgcggcgatcacatcgcccctagccaaatatggtaccgaacagttaatgagacctggcacggaagctgttttcggtgtagcgaatgccaggactccttaacgaactggtattatgagaaggacgggaagctgtattgtccaaaggattattggggcaaattcggcgaattctgtcatggttgcagcctgctgatgactggtccatttatggtggctggtgagtttaagtatcatcctgaatgttttgcctgcatgtcctgtaaggtgatcatcgaggacggggatgcttatgcattggtgcaacatgccactctctattgtggcaagtgccataatgaggtcgtgctggccccaatgtttgagcggctgtctacagagtctgtgcaggagcaactgccctatagtgtcacactaatttcaatgcccgcaaccacggaagggaggagagggttttcggtcagtgtggagagcgcgtgcagcaactacgccacaaccgtccaagtgaaagaggtcaataggatgcacatcagccccaacaacaggaacgcaatccaccccggagaccgcattctcgagatcaacggcaccccagtcagaactctcagagtggaggaagtggaggacgcgatctcacaaacctcccaaaccttacagttgttaatagagcatgacccagtcagtcagcggcttgaccagcttaggctggaagctcggcttgcccctcacatgcaaaacgccggacacccacacgctctctcaactcttgatactaaagagaatctggaagggactttacgtagacgcagtctgcgacggtctaacagtatttcaaagagccccggtccaagttctcctaaggagcctctgctgttttctcgcgatatcagccggtccgaatccctgcggtgctccagtagctattcacagcagatcttcagaccatgtgacctgatccacggcgaggtgttgggaaaggggttcttcggacaagccatcaaagtcacccacaaggccaccggcaaagtgatggttatgaaagagttgattcgctgtgatgaggaaacgcagaagacctttctcactgaagtcaaggttatgcgctccctcgaccatcccaatgttttgaaatttatcggcgttctctataaggacaaaaagctaaatctcctcaccgaatacattgaggggggaaccctgaaggacttcctgcgctctatggatccatttccctggcaacagaaagtgaggttcgcgaagggcatagcttccggcatggcataccttcactccatgtgcatcatccaccgggatttaaactcccataactgcttgataaagcttgacaaaacggtggtggtggccgatttcggattgtcgaggctgattgtggaggagagaaagcgcgctccgatggagaaagcaactactaaaaagcgaacccttagaaagaatgaccggaaaaagcggtataccgttgtgggtaacccatactggatggcccctgagatgcttaacggcaagagctacgacgagacagtagacatcttcagcttcggcatcgtcctttgtgagattataggccaggtgtatgcggacccggactgccttcccaggacgcttgattttggcctcaatgtcaagctattttgggagaagtttgtccccacagattgcccacctgctttctttccgttggctgcgatatgttgtaggctggaaccggaaagtagacctgcttttagcaaactcgaggacagtttcgaggccctgtctctttatcttggcgaactcggcatcccccttccggcagagctagaagagctcgatcacacagtgtcaatgcagtatggcctaacccgggatagccctccttag

SEQ ID NO: 28132 - DNA, 606 bp, synthetic construct
  source 1..606: mol_type = other DNA; note = Synthetic coding sequence
atggccgctgccaaagatacacatgaagaccacgatacttccactgagaacactgacgaatcaaaccatgacccccagttcgagcccatagtttcactccctgagcaggagatcaagaccctggaggaggacgaggaagaactgttcaagatgcgcgctaagttatttcgtttcgccagtgagaatgatttgccagagtggaaggagagaggtactggcgatgtgaagttgctgaagcataaagagaagggggctatcaggctcctcatgcggagggacaagacactcaagatctgcgctaatcattacattacccccatgatggagctgaaaccaaacgccggttccgatcgggcatgggtgtggaacacccatgccgacttcgctgacgagtgccccaagccagagcttctcgctatccgtttcctgaacgcggaaaacgctcaaaagtttaaaaccaagtttgaggagtgtcgaaaagagatcgaggagcgcgagaagaaagcaggctctgggaaaaacgatcacgcagagaaggtggccgaaaagctggaggccctcagcgtgaaagaggaaacaaaggaggatgctgaggaaaaacagtag

SEQ ID NO: 28133 - DNA, 2154 bp, synthetic construct
  source 1..2154: mol_type = other DNA; note = Synthetic coding sequence
atggccgcagacaaaccagcagaccaaggcgcagagaagcacgaagggactggccagtcctctggaattactgaccaggagaaagaactgagcacaaatgcctttcaagcatttacttctggaaactacgatgcttgcctacaacaccttgcttgcctgcaggacatcaacaaggacgactataagattatcctcaacaccgccgtcgctgagttttttaaatctaaccagaccaccaccgacaatcttcgacagaccctgaatcagctgaagaaccaggttcattccgccgtggaagagatggatggacttgatgatgtcgaaaattctatgctttactataatcaagctgttatactgtatcacctgcggcaatatacggaagcaatcagtgtaggcgagaaactgtaccagttcattgagccattcgaagagaagtttgcgcaagcggtgtgcttcttacttgtggatctgtacatacttacttatcaggctgaaaaagccctgcacctgctggctgtcctcgaaaaaatgatttcccagggcaacaataataagaacggaaagaatgaaactggcaataataacaacaaagatggaagcaatcataaggccgagtctggcgcactgatcgaggcagctaagtccaaaatacatcagtacaaggtgagggcctatattcagatgaaatccctcaaagcctgtaagcgggaaattaaatccgttatgaacacggctggcaattctgccccatccttgttcctgaaaagcaatttcgaatatttacgcggtaattatcgtaaagccgtgaagttactgaattcgagcaacattgcagagcatccgggattcatgaaaactggagagtgcctcagatgtatgttttggaataatctggggtgtattcacttcgccatgtcgaagcacaacctggggatattctatttcaaaaaagcactacaggaaaacgataatgtctgcgcacagctaagtgctggttccaccgaccctggtaagaaattttctggaaggcccatgtgcacgctgctcacaaacaaacgctatgagctcctgtataattgtggtatccagctgttgcatatcgggagacctctcgccgcatttgagtgcttaatcgaggccgtacaagtgtaccacgccaatccgcgattatggctccgactggcagagtgctgcatcgccgcaaataaagggaccagtgagcaggaaacaaaaggcctcccttctaagaaagggattgttcagtctattgtcggccagggttaccaccgcaaaattgtgctcgcctctcaaagcatccagaacactgtctataatgacggccagtcctccgcaattcccgtggcatcaatggagtttgctgccatttgtttacggaacgccctgctccttctgcctgaggagcagcaggaccccaagcaggagaacggggctaaaaattctaaccagctggggggaaacaccgagtcctccgaatcatccgagacctgcaggtgctcaatattagcctgttcggcctacgttgccctcgccctgggggataaccttatggcactaaatcacgccgacaaacttcttcagcagccgaagctgtccgggagcctcaaatttctgggacacctctacgccgcagaagcattaattagcctcgatagaatctctgacgccatcactcatctcaaccctgagaatgtcactgacgtcagtctcggaatcagcagtaatgaacaggatcagggaagcgataagggagagaacgaggctatggagtccagcggcaagagagcacctcagtgctacccatccagtgtcaacagcgccagaacggttatgctttttaacctcggctcagcgtattgcctccgtagcgagtatgacaaggccaggaagtgtctgcaccaggccgcttctatgatacacccaaaagaggtgccccctgaggcgatcttgctcgccgtgtacctcgaattgcagaatgggaacacccagctggctctgcagatcattaagcggaatcagttgctgcccgcagtcaagacccattcagaagtgcgcaagaaacccgttttccagcccgtacatcccatccaacccattcagatgcccgcattcactacagtacagcgcaaatag

SEQ ID NO: 28134 - DNA, 1488 bp, synthetic construct
  source 1..1488: mol_type = other DNA; note = Synthetic coding sequence
atggaagccctcctggaaggcattcaaaaccgagggcatgggggaggttttctgacatcgtgtgaggcggagcttcaggagctgatgaagcaaattgacatcatggtggctcataaaaaatccgaatgggaaggaagaacccacgcacttgaaacttgcttgaagattagggagcaggaacttaagagccttcgttctcagctcgacgtcactcataaagaagttggaatgctacaccaacaggtggaggagcatgagaagattaaacaggagatgaccatggaatacaagcaggaactgaagaagctacacgaggaattgtgtatccttaaaagatcctacgaaaaactccagaagaaacagatgcgggagttccgcggaaacactaagaatcaccgggaggaccgttccgaaatagagcgcctgaccgcgaagattgaagaatttagacagaagagtttggattgggagaaacagcgcctgatttatcagcaacaggtgagctccctggaggcacaacgcaaagcactggcggagcaaagcgaaatcatacaggcccaacttgtgaaccgtaagcagaaacttgagagcgtagaactgagctcccagtcggaaattcagcatctgagcagcaagctggagcgggctaacgatacgatatgcgcgaacgagctggagattgagcggttaacaatgagagtcaacgatctagttgggacttcaatgacagtcctgcaagagcagcaacagaaggaggagaaacttcgcgaaagcgagaaacttctggaggcgctccaggaagaaaaacgagaactgaaggcagcactacaaagtcaggaaaatctaattcatgaagcacggattcagaaagaaaaactacaagaaaaggtgaaagctacaaacactcagcacgccgtcgaggcaatctcgcttgagtcagtgagcgcaacatgtaagcaactgagccaggagctgatggagaagtatgaggagcttaaacggatggaggcacacaacaacgaatataaagcggaaatcaaaaaactaaaagagcagattttacagggagagcaatcttatagcagtgctttagaggggatgaagatggagatatcccatctgacacaagagcttcatcaaagggacatcacaatcgcaagtacgaagggttccagctctgacatggaaaaacgcctccgggctgagatgcagaaagccgaggacaaggctgtggaacacaaagagattttggaccagctagaatctctaaaactggaaaataggcatctgtcggagatggtgatgaaactagagctgggactgcatgagtgtagcctgccggtgtcccctctgggcagcatcgccacccggttccttgaagaggaggagcttcgatcccatcacatccttgagagacttgatgctcatatcgaggaactcaagagggagagtgagaaaaccgtgagacaattcacggcactcaaatag

SEQ ID NO: 28135 - DNA, 1962 bp, synthetic construct
  source 1..1962: mol_type = other DNA; note = Synthetic coding sequence
atgattccaccgcaggaagcctctgcccgtcgcagagaaattgaggacaaactgaagcaggaagaagagaccctgtccttcatcagagatagcttagagaagagcgatcagctcacaaagaacatggtgagcatcctttcttcttttgagtcacgtctcatgaagctggaaaactccataatacctgtacacaaacagactgaaaaccttcaaaggctccaggaaaacgtggagaagaccctctcctgcttggaccacgtgatctcatactatcacgtggcatccgacacagagaagattataagggaaggacctacggggaggctagaagagtatctcggctctatggctaagatccagaaagcggtagagtactttcaggataactctccagactctccggagcttaataaggttaagcttctcttcgagcggggtaaggaggctctagaaagtgagtttagatcactgatgactaggcatagcaaagtggtcagccccgtcctgattctcgacctgatatctggagatgatgacctggaggcccaggaggatgtcacgctcgaacacctccccgagagcgtactgcaagacgttattagaatcagcaggtggctggtcgaatatggccgaaaccaggattttatgaatgtctactaccaaattcggtcgagtcagcttgataggagtatcaagggtttgaaggaacacttccacaaatcttcgtccagttcgggggtaccgtatagcccagccattccaaacaagaggaaggatacccccacgaagaaacccgtgaagcggcctggacgggacgatatgctggatgttgaaacagatgcctacatccattgcgtatccgcgtttgtcaagcttgctcaatcagaatatcagttgctggctgatatcatacccgaacaccatcagaaaaaaacattcgattccctcatccaagatgcgctggatggtttaatgctcgaaggtgagaacatcgtgtccgccgcacgcaaggccattgtccgccacgatttctctaccgtactaactgtatttccaatactgaggcacctcaagcagacaaagcccgagttcgaccaggttctccaaggaaccgctgctagtacaaagaacaaattgcctggcctgattacttcgatggaaacgattggagctaaggccctggaggatttcgctgacaatataaagaatgacccggataaggagtacaatatgccgaaagacggcacagtccatgaacttacctcaaatgctattttgtttctgcagcagctgctggattttcaggagacagctggagccatgctggcgtcacaagagaccagctcaagtgcaaccagctacagcagtgaattctccaagcgcctcttgagcacctacatctgcaaggtgcttggtaacctgcagcttaatctcctgtccaagagtaaggtctacgaagacccggcactttccgctatttttctgcacaacaactacaactacatcctgaaatctctcgaaaaatccgagctcatccaattagtggctgttactcagaagacagcagagaggtcttaccgcgagcatatcgagcaacagatccaaacctatcagaggagttggctcaaggtgacagactatatcgccgaaaagaacctcccagtgttccagccgggagttaagctgcgggataaggagcgtcagatcatcaaggaaaggttcaaagggttcaacgacggcctggaagagctgtgtaaaatccaaaaagcatgggcgattccagatacagagcagagagatagaatccgtcaggctcagaaaaccattgtcaaggaaacctatggggcatttctgcagaaatttggctccgtccccttcactaagaacccagagaaatatataaagtacggcgtcgaacaggtcggcgatatgatcgatagactctttgacacaagcgcttag

SEQ ID NO: 28136 - DNA, 735 bp, synthetic construct
  source 1..735: mol_type = other DNA; note = Synthetic coding sequence
atggaactgacaatctttatcctccggctggctatttatatcctcacattccctctttatctgctgaattttctaggcctttggagctggatatgcaagaaatggtttccctacttcctggtgcgcttcacagttatttataacgagcagatggcgtctaaaaaacgcgagttgttctccaaccttcaagagtttgcaggccctagcggtaagttatccctgctggaagtaggctgtggtaccggagctaatttcaaattctacccccctggatgtcgtgtcacttgcatcgatccgaatccaaattttgagaagtttctgatcaaatccatcgctgaaaacaggcacctccagtttgagcgatttgtggtggccgctggcgaaaacatgcatcaagtcgccgacggcagtgtagacgtggttgtgtgcactctggtgctgtgttccgtcaagaaccaagagcgtatcttgcgggaagtgtgccgtgtgctgaggccaggcggagctttttactttatggagcacgtagctgccgaatgcagtacctggaattatttttggcagcaggttctggaccccgcttggcacctgctttttgatgggtgtaatctcacccgtgagtcctggaaggccttagagagggcttcgtttagcaaactcaaactgcaacatatccaggctcctctcagctgggagcttgtgcgccctcacatctacggctacgctgtgaagtag

SEQ ID NO: 28137 - DNA, 3522 bp, synthetic construct
  source 1..3522: mol_type = other DNA; note = Synthetic coding sequence
atggccgtcgaaaccctgagcccggactgggagttcgaccgagtagacgacggtagtcaaaagatccacgcagaggttcagctcaagaactacggaaaatttttggaggaatacacctctcagctccgccgtatcgaggacgcgcttgacgatagtatcggagacgtttgggatttcaacctggaccctatcgctctgaaacttctcccctacgaacagtccagcctgttggagttgatcaagaccgagaacaaagtgcttaataaggtgataactgtgtatgccgctctatgttgtgaaataaaaaagctgaagtacgaagcagagacaaagttttacaatggactacttttttatggcgaaggtgccaccgatgccagtatggtagagggtgactgccaaatccagatgggccgattcatttcgtttctccaggaactttcatgcttcgtgacgaggtgttacgaggtggtcatgaacgtggtccatcagcttgctgctctgtacatttcgaataagatagccccaaagatcatagagacgaccggggtccatttccagacgatgtacgagcaccttggggagctgcttaccgtcctgcttactctggacgagatcattgataaccatataaccctgaaagaccactggaccatgtacaaacggctactgaaatctgtacatcacaacccatcaaagttcggtatccaggaagaaaagctaaaaccattcgagaaattcctgctgaagctggagggccaattgctggacgggatgatatttcaggcctgcatcgagcagcaattcgacagtcttaatggaggagtctcagtgagcaagaactccacctttgctgaggagttcgcccacagtattaggtctatcttcgctaacgtggaagccaaactgggcgaacccagcgagattgaccaaagagacaagtacgtggggatctgcggccttttcgtgctccactttcagatctttcggactatcgataaaaaattttataagtctcttctcgatatttgtaagaaagtgcccgcaattaccctgactgctaatatcatctggtttccagataattttctgatacaaaaaatccccgctgctgccaagctgctggatcgaaaaagcttgcaggccataaaaatccatagagatacattcctgcagcaaaaagcacagagcttgacgaaggacgttcaatcctattatgtgtttgtcagtagctggatgatgaagatggaatccatattgagcaaagaacagcgcatggataagttcgccgaggacttgaccaatcggtgtaacgtcttcatccagggattcctgtacgcttattcaatttcaactatcataaaaacaacaatgaatctctacatgagcatgcagaagcccatgacaaagacctcagtcaaggccctgtgcagactggtagagctgctaaaggctattgagcatatgttttatcggcgtagcatggtggtcgccgattctgtctcacacatcacccagcacctgcagcaccaggcattgcactctatatccgtggccaagaagcgggtcatcagtgacaaaaaatactccgaacagcgccttgatgttctgtcagctctggttctggcagagaacaccctcaacggcccttccacaaagcagagaagacttatcgtgtcattggctctttccgttgggacgcagatgaaaaccttcaaagatgaagagctgttcccactgcaggtggttatgaaaaagctggatcttatctcagaattgagggaacgtgtccagacacaatgcgattgctgttttctgtactggcatagagccgtttttcccatttacctggatgacgtgtacgagaacgcagttgatgctgctcgcctccattatatgttcagcgcactgagggattgcgtgcccgctatgatgcacgctagacacctggaaagctacgaaatcctactggactgttacgataaagagattatggagatcttaaatgaacacctgctcgataagttgtgtaaggaaattgaaaaagatctgcgtttgtctgtgcatactcacttaaagctcgatgatcggaatccttttaaggtgggcatgaaagatctcgccctgtttttctctttaaatcccataagattctttaataggttcatcgatatcagggcatacgtcacccattacctcgacaaaacattctacaaccttacgaccgtggctcttcacgattgggcaacatactcagaaatgcgaaacctagccacacagcgatatgggttggttatgaccgaagcccatctaccctcccaaacattggagcaaggactggatgtcctggagatcatgcgcaacatacacatcttcgtgtcacgatatttgtacaacctcaacaaccagatcttcatcgaaaggacaagcaataacaaacatctcaatacaatcaacattcggcacattgccaactcaatcaggacccacggcaccgggatcatgaataccacagtaaactttacctaccagtttttgaaaaaaaagttctatattttcagccaattcatgtacgacgaacatatcaagagcagattgattaaagatattaggttttttagagagatcaaagaccagaacgaccataagtacccctttgatcgtgccgaaaagtttaacagagggatccgcaagctaggcgtgacgcccgagggccagtcttacctggaccaattccgtcagcttatttcccagattggcaatgccatgggatatgtcaggatgatcagaagcggcggtctgcactgtagctccaatgccatcaggtttgtccctgatctggaggacatcgttaacttcgaagagcttgtgaaggaggaaggactggcggaggagacgctgaaagcggctcgccacctggactccgttctgtccgatcataccagaaactcagcagagggcacagagtatttcaagatgctggtagacgtatttgcaccagagttcagacgacctaagaacattcacctgaggaatttttacatcatagtacctcctttgacactcaacttcgtcgagcattcaataagttgcaaggaaaagctcaataaaaagaataagatcggtgccgctttcacagatgacgggtttgctatgggggttgcctatattctcaagctactcgatcagtaccgcgaattcgattcgctccactggttccaatctgtgagggagaagtaccttaaggagatacgggcagtggccaagcagcagaatgtacagagtgcgagccaagacgaaaagttgctgcagacaatgaatctgactcagaagcgcttggatgtgtacctccaggaatttgaactcctgtacttttcactgagtagcgctagaatattctttagagcagataagactgcagcagaagagaatcaagagaagaaggaaaaggaagaagagacaaaaacaagcaacggtgacctgagcgattctacagtaagtgctgatccagttgtgaaatag

SEQ ID NO: 28138 - DNA, 972 bp, synthetic construct
  source 1..972: mol_type = other DNA; note = Synthetic coding sequence
atgcttaggtggaccgtgcacctggagggcggacccaggcgcgtcaaccacgctgccgtggcagtggggcatagggtctattcgtttggaggatactgcagcggggaagactatgagaccctacgccagattgacgtgcatatctttaacgccgatacacacaaatggttcactcccagggtttcaggtaccgtgcccggagcacgggatggccacagcgcatgcgtgttgggaaagattatgtatatttttggtgggtatgaacaacaggccgactgcttctcaaacgacattcataaactcgacacatctacaatgacgtggaccttgatttgcactaagggaagtccagcccgttggagggatttccatagcgccacaatgctgggtagccacatgtacgtgttcggaggcagagcggatcgtttcggcccatttcactccaataatgagatctactgtaatcgaattcgtgtcttcgatacccggactgaagcctggctggattgcccaccaacccccgtcctgcctgaagggcgtaggagccactccgcatttggatacaatggagagctctatatatttggaggctacaacgctcggctgaatcgtcacttccacgatctttggaaatttaatcccgtgtcctttacatggaagaagatcgagccaaagggcaaggggccatgccctagaaggaggcaatgttgctgtatcgtcggtgataagatcgtgctcttcggtggaacttctccatcccctgaagaggggctcggcgacgaattcgacctgattgaccacagcgacttgcatatcctcgattttagtccaagcctcaaaaccctgtgcaaactggccgtgatccagtataacctggaccagagctgccttccccacgatattaggtgggagttgaacgccatgaccacaaacagcaatatatcacggccaattgtgagtagccatggctag

SEQ ID NO: 28139 - DNA, 2517 bp, synthetic construct
  source 1..2517: mol_type = other DNA; note = Synthetic coding sequence
atgaccggtgcggaaattgagccttcagctcaggcgaagccagagaagaaggcgggagaagaagtgattgccggaccggaaagagagaacgatgtcccactggttgtgagacccaaagtgaggacccaagcaaccaccggggctagacccaaaacagagactaagtccgtgccagcggcaaggccaaagaccgaggcacaggcgatgtcaggtgcacgcccaaaaactgaggtgcaggtgatgggaggggctaggccaaagaccgaggcgcaggggatcaccggcgctaggccaaaaaccgatgcaagagcggtggggggtgctcgctctaagactgacgccaaagccatcccgggtgcaaggccgaaggatgaggcccaagcttgggctcagtccgaatttggcaccgaagctgtaagccaggctgagggtgtcagtcaaaccaacgctgtcgcctggccattggcaactgcggagtccgggtcagtgactaagtccaagggactcagcatggatagggaacttgtgaacgttgacgcggaaacctttcctggtactcagggccaaaagggcatccaaccttggttcgggcctggcgaggagacgaacatgggtagttggtgctactctagaccacgagcgagagaagaagcctcaaatgagtccggcttttggagtgctgatgagacaagtaccgcctcgtcattctggacaggcgaagagaccagtgtacggtcttggcctcgagaggaatctaatactagatcacggcatagggccaagcatcagacaaatcccaggtctagaccacgcagcaagcaggaggcctacgtggattcctggagcgggtccgaagatgaggcaagcaaccctttttcgttctgggtcggcgagaatactaacaacttatttcgtcccagagtgcgcgaagaggcgaacatccgatccaaactacgcaccaatcgggaggactgtttcgagagcgaatccgaggacgagttctacaaacagtcctgggtcctacccggtgaagaggccaactcacgattcaggcaccgggataaggaagaccctaatactgcactcaaactgagagcccagaaggatgtcgactcagaccgggttaaacaagagccgaggtttgaggaggaagtgattattgggagctggttctgggcagaaaaagaggcttctctggagggcggagcttccgcaatttgtgagagcgaaccaggaaccgaggaaggggctattgggggtagcgcctattgggctgaggaaaagagctctctgggagcggtggccagggaggaggccaagccggagtctgaggaagaagcaatctttggaagctggttctgggacagggacgaggcgtgcttcgatcttaatccatgccctgtttacaaggtctccgaccggtttcgcgacgccgctgaggaactcaatgcttcttcaagacctcaaacatgggatgaggtgaccgtcgagttcaaacccggactttttcacggagttggcttcagatccaccagtccattcggcattcctgaggaagcatcagagatgctggaagccaaacctaaaaatttggaactgtcccctgaaggcgaagagcaagaatcacttctacaacctgatcagcctagcccagagtttacattccagtacgatccaagctacaggagcgtaagagagatccgcgaacatctcagggcacgcgaaagcgccgaaagtgagtcttggtcttgcagctgtatccagtgtgagcttaagatcggaagcgaagagtttgaagagtttctgctgctcatggataaaatcagagacccgtttatccacgaaatctcaaaaatcgctatgggcatgaggtccgcttcccagtttaccagagatttcattcgggattccggggtggtaagcttgatcgaaacgttactgaattacccctcttcacgcgtccgcacctctttcttggaaaacatgattcacatggcccctccatatccaaatctcaacatgattgagacctttatctgccaggtgtgcgaagaaaccctggctcacagcgtcgatagtttggaacagctaaccggtattaggatgctacgccacctcacaatgaccattgattatcacacactgattgcgaattacatgtcaggattcctttctctgttgaccacagcaaatgccaggactaagttccatgtcctcaagatgttactgaatttgtcggagaatccagccgttgctaaaaagcttttctctgccaaagcattgtcaatcttcgtggggctgttcaacatcgaggagacaaacgataacatccagatcgttattaagatgtttcagaacatctcaaatataatcaaatcaggcaagatgtcactgatagatgacgacttctcgctagaaccacttattagcgccttccgggagttcgaagaacttgctaaacagctacaggcccagattgataaccagaatgaccccgaggtgggacagcagtcctag

SEQ ID NO: 28140 - DNA, 2649 bp, synthetic construct
  source 1..2649: mol_type = other DNA; note = Synthetic coding sequence
atgccgggtcgggctcgcaccagggcacgcggtagggcgagacggagggagagttatcagcaggaagcacctggcggacctcgagccccaggatccgcaacaactcaagagcccccacagttgcagtccacccccaggcctctccaggaagaagtgccggtcgttagacctctgcagcctcgcgctgctagaggcggtgccggtggtggtgcgcagtcacaaggtgttaaggagcccggacctgaggccggtctgcatactgccccactgcaggagcgtcgtataggaggtgtctttcaggatctggtggtcaatacaagacaggacatgaaacacgtcaaagacagtaaaacaggctctgaaggcaccgttgtgcagctcttggccaaccattttcgtgtcattagccgtccccaatgggtagcctacaaatacaacgtcgactataagccagatatcgaggatggcaatctcaggaccatcctgttagatcagcaccgcaggaagtttggagagaggcatatttttgatggaaacagtttactgctctcccggccacttaaggagcggagagtggagtggctctctacaacaaaagataagaatatcgtcaaaatcacggtcgaatttagtaaggagctgacacccacatctcctgattgtctgagatactataacattctgttcaggaggacttttaaactgttagatttcgaacaggtgggacgcaactactacactaaaaaaaaggccatacagctgtaccgtcacgggacctctctggagatctggctcggatacgtgaccagcgtgctacagtatgaaaacagtataaccctgtgtgctgacgtgtcacataagctgctgcggatcgaaacagcctacgattttatcaagcggacttcggcccaagcacagaccggcaacatacgtgaggaggtgaccaacaaactgatcgggtcaattgttctgactaaatacaacaacaaaacctaccgggtcgatgacattgactggaagcagaacccagaggatactttcaataagtccgatgggagtaagataacttatatagactactatagacagcagcacaaggaaattgtcaccgtgaagaaacaacccttgctcgtgagccaggggcgatggaaaaagggcctgacgggaacccaacgggaacctattttgcttatccctcaactctgtcatatgactggcctgactgatgaaatctgcaaggactacagtatcgtaaaagagctcgcaaaacataccaggctctcaccaaggcggagacatcacaccctcaaagagttcatcaacacactgcaggataacaagaaagtgcgcgagctgttacagctctgggacttaaagttcgataccaactttttatccgtgcccggaagggtgcttaagaatgcaaatatagtccagggcaggcggatggtgaaagccaatagccagggagactggagccgagaaattagggagcttccgctgctgaacgcaatgccactgcattcttggcttatcctctattccaggtcatcacaccgcgaggcaatgagccttaagggacacttacagagtgtcaccgccccaatgggaattaccatgaaacccgcagagatgatcgaggttgacggcgacgccaactcctatatcgacacattgcgtaaatatacccgccctaccctgcagatgggcatgtcatgcttattggtttttaaagtgatctgtatcctaccaaacgatgataagcgccgatatgacagtatcaaaagatatttgtgcacaaaatgccctatcccctctcagtgcgtcgtgaagaagacattggaaaaagttcaagccagaactattgtcaccaagatcgcccagcagatgaattgcaagatgggtggcgctctctggaaggtggagacagacgttcaacgtacgatgtttgttggcatcgactgcttccatgatattgtgaatagacagaaatccatcgctgggttcgtggcttctacaaacgccgaacttacaaaatggtactcacagtgcgtgatccagaaaaccggagaggagctggtgaaagagctggagatatgcctgaaagcagccctggacgtgtggtgcaagaacgagtcatctatgccacattcagtgattgtatacagggatggtgtgggtgatggccagctccaggccttactggatcatgaggcaaaaaaaatgtcaacgtatttgaagaccattagtcctaataatttcacactggcatttattgtggtaaagaagagaatcaacactcggtttttcctcaagcacggaagcaactttcagaatcctccgcctgggactgtgatcgacgtggagctcacccgcaatgaatggtatgattttttcatcgtgtcacagtccgtgcaggatggtacagtcactcctacacactacaatgtcatctatgacactatcgggttgtccccagacacagtgcagcggctgacctattgcctctgccacatgtactacaacctccccggaatcattagagtgccagcaccctgccactacgcccataagttggcgtacttagtggggcagtccatccatcaagagcccaatcgctcgctctctacaagacttttttatttgtag

SEQ ID NO: 28141 - DNA, 1917 bp, synthetic construct
  source 1..1917: mol_type = other DNA; note = Synthetic coding sequence
atgaaccggcaagtttgcaagaaaagcttcagcggaagaagccagggattcagcgggagatcagccgtcgtgtcaggttcctcaaggatgtcttgcgtggctaggagcggaggtgcagggggtggtgcttgtggattccggtccggggctgggagttttggctccaggtctctatataatttggggtcgaacaagagcattagtatttctgtggcagccggttctagccgggctggcggtttcggagggggtcgttcttcatgcggctttgccggtggttatgggggaggattcgggggttcctacgggggaggttttgggggaggaagaggggtgggttctggattcggcggagccggagggttcgggggagccggaggattcggaggcccaggcgtgttcggaggcccagggtccttcggtggcccaggtggcttcggccctggaggcttccctgggggaatccaggaggttattgtgaaccagagcttactgcagcctttaaatgtcgagatcgacccccaaatagggcaggtaaaggcacaagaaagagaacagatcaaaacactaaacaataagttcgcctccttcattgacaaagtgcgctttctcgaacagcaaaataaggttctggaaaccaaatgggagttgttgcagcagcagaccacaggcagcggaccatctagcctggaaccatgctttgaaagttatatttccttcctctgcaagcagcttgatagcttgctgggcgagcgcggaaatctggaaggggagctcaagtcaatgcaggatcttgtagaggactttaagaagaagtatgaggacgaaatcaataaacgaacagctgctgagaacgagttcgtgggcctaaagaaggacgtggatgctgccttcatgaacaaagtggagcttcaggctaaggtggactctcttactgatgaagtgagctttctgagaactttatacgagatggaactatcacagatgcagagtcacgcatccgacacatcagtcgtgctaagtatggacaataaccgatgcctcgacctgggatctatcattgcagaagtgcgcgcacagtacgaagagatcgcccaacggagtaaaagcgaggccgaggcactctatcagacaaaacttggcgagctacagacaacagccggacgccacggagacgacctgcgtaacacgaagtctgagatcatggagctaaatcggatgatccagcggctgcgcgctgaaatcgagaacgtaaaaaagcagaacgccaatcttcagacagccattgccgaagcagaacaacgcggagaaatggcacttaaagacgctaatgcaaaactgcaagatttacagacagcgctacaaaaagctaaagatgatttggccaggctcctaagagattatcaggagctaatgaacgtgaaactagccttggacgtggagatcgctacctatcggaaacttctcgaaggcgaggagtgcagaatgagcggcgaatgccagagcgcagtgtgtatatcagtggtttccaacgttacttctaccagtggctcatccggttcctcacggggtgtgtttggcggtgtgagtggatccggcagcgggggttacaaggggggtagtagttcctctagcagttccggatacggcgtctcaggcggttcagggtccggttatggtggagtttcctcgggcagcaccggcggacggggatcaagcggcagctaccagagttcttcttcaggctcccggctggggggtgccggatcgatctctgtgagtcactccgggatgggaagttcctctggttcgatccagacaagtgggggaagcggttataaatctgggggaggagggagcacctctatacggttcagccaaacaacttctagttctcagcattcttctaccaaatag

SEQ ID NO: 28142 - DNA, 1080 bp, synthetic construct
  source 1..1080: mol_type = other DNA; note = Synthetic coding sequence
atggccgagccgtttctatcggagtaccagcaccagcctcagacatcaaattgcacaggggcagctgccgttcaggaagagctgaacccagagagacctccaggagcggaggagcgggttcctgaagaagactctcgatggcagagccgggcttttccacagctggggggaaggcccggaccagagggagaaggcagcctggaaagccagcccccacccctgcagacccaggcgtgccctgaatccagctgtctcagggaaggggagaaaggacaaaacggcgatgattcctccgctggtggagattttcctccccctgccgaggttgagccgacccccgaagcagaactgctggcacagccctgccacgatagtgaagcgagcaagctgggagcccctgccgctgggggagaggaggaatggggacaacagcagagacagctgggcaaaaagaagcaccgtaggcggcctagcaagaagaaacggcattggaagccatactacaaattgacgtgggaagaaaagaaaaagttcgatgaaaagcagtctctcagagcatctcgcatcagggccgaaatgtttgccaagggacagcctgtggctccatacaataccacacaattcctgatggacgatcatgaccaggaagagcccgacttaaaaaccggattgtactcaaaacgcgctgcagctaaatccgatgacacctccgacgatgattttatggaggaaggcggtgaagaggacgggggatccgacgggatgggcggagatggctccgagttcctacagagagatttcagcgaaacttacgaacgttaccataccgaatccttgcagaacatgagtaagcaggagctgatcaaggagtatctggaacttgaaaaatgcttaagccgtatggaggatgagaacaaccgcttgcgactggaaagcaagcggcttggcggtgacgatgcaagggtacgcgagctcgaactggagctcgatagactccgcgcagagaacctccagttgctcaccgaaaacgagctgcacaggcaacaggagcgggcacccctctccaaattcggtgactag

SEQ ID NO: 28143 - DNA, 2889 bp, synthetic construct
  source 1..2889: mol_type = other DNA; note = Synthetic coding sequence
atggatgaacaggcacttctaggtttgaatccaaacgcggattctgacttcaggcagcgggctctggcttacttcgaacaactgaaaatctctccagacgcctggcaggtttgtgcagaggctctggcccagcgcacttacagcgatgaccatgtgaagtttttctgctttcaagtacttgaacaccaggtcaaatacaagtacagcgagctgacgacagtgcagcagcagttaattagggaaacattaatctcgtggttgcaggcacagatgctcaaccctcagccagaaaagacttttatcaggaacaaagcggcacaagtgttcgccctcctattcgtcacagagtatttaaccaagtggcctaagtttttttttgacatcttatctgtcgtggatttgaaccccagaggggtcgacctgtacttaagaatcctcatggctatcgacagtgagctcgtagaccgggacgtcgtgcacacatcggaagaggccagacgaaacacgttaattaaggacactatgagagaacaatgtataccgaacctggtggaatcttggtatcagattctgcagaactaccaattcactaatagcgaagtgacatgccagtgtttagaggtggtcggtgcttacgtctcttggattgatctgtccctcatcgcaaacgatcggttcattaatatgctgctgggacacatgagcattgaagtcctgcgcgaagaggcttgcgattgcttatttgaggtcgtcaataaggggatggaccccgtggacaagatgaaactggtggaaagcctatgtcaagtacttcagtcggctgggtttttctcgattgaccaggaagaagatgtggattttctcgcacggtttagcaagctggttaatggcatggggcaatcactgatcgtgagttggtcgaagctgatcaaaaacggcgatatcaaaaacgcccaagaggccctgcaagccattgagaccaaggttgcgctaatgctgcagttactcatacacgaggatgacgatatttcatcaaacatcatcggtttttgctacgactacctgcatatcctgaaacaactgactgtgctctccgaccagcagaaagcaaacgtcgaagcaattatgctagctgtgatgaaaaagctcacctatgacgaagagtacaattttgagaacgaaggagaggatgaggcaatgtttgtggaataccgcaagcagctgaagttattgctcgaccgcttagcccaggtcagtcccgaacttctgcttgcgtctgtgcggcgtgtgtttagctctacccttcagaactggcagacgacaaggttcatggaggtagaggttgccattcggttgctatatatgctggccgaagcactccccgtatctcacggtgctcatttttccggcgacgtgagtaaggcctccgccttgcaggacatgatgcggaccttagtcactagtggagtgagctcctaccagcatacgtcggttacgctcgagttttttgagactgtggtccgttacgaaaaattctttactgtcgagcctcagcatatcccatgcgttctcatggccttcctggatcatagaggccttagacactcgtctgccaaagttcgctctcgcacggcctacttgttctctcggtttgtcaaatctttaaataaacagatgaatccttttatagaagatatcctgaaccgcattcaggatttactcgaactaagccctccggagaacgggcaccagtctcttctctcgtcggatgaccaactgtttatatacgagactgcaggtgttctgatcgtgaattctgagtaccccgcagaacggaagcaggcccttatgcggaatctgctgacacctttgatggagaagttcaagatccttttagagaagctcatgctggcgcaggatgaagagcgtcaggcgtccctggccgactgtctcaatcatgcagtcggattcgcttcccggacctccaaagccttcagcaacaagcagaccgtgaagcagtgcggttgttccgaagtgtaccttgattgcctccagactttccttccagctttgagttgcccactgcagaaggacatcctgcgatccggtgtccgaacctttttgcatcgaatgataatctgcctggaagaggaagttctgcccttcattccttctgcttccgagcatatgctaaaagattgtgaagccaaggacctgcaggaattcattcctctgataaaccaaatcacggccaagtttaaaatccaggtgtcaccattcctgcaacagatgttcatgccgctgctgcatgccattttcgaggtgctattgcgaccagcagaggagaacgatcagtccgcagctcttgaaaagcagatgttgcgtcggtcatactttgcgtttttgcagacagtgacagggagtggcatgagcgaggtgatagctaaccagggcgctgaaaatgtagagcgagtcctggtgacagtgattcagggagctgtggaatatcctgacccaatagcacagaaaacttgtttcatcatactcagtaagctcgtggaactgtgggggggaaaagacggtccggttggttttgctgatttcgtatataagcacattgtccctgcgtgctttctggcccctctcaagcagacatttgatttggccgacgcacagactgtcctcgcattatcagagtgcgcggttacacttaagaccattcatctcaagagagggccagaatgcgttcagtacctccagcaggaatacctgccttctctccaagttgctcctgagataatacaggagttttgccaggctctccagcagcccgacgcgaaggtattcaagaactatctcaaggttttctttcaacgtgccaagccttag

SEQ ID NO: 28144 - DNA, 2976 bp, synthetic construct
  source 1..2976: mol_type = other DNA; note = Synthetic coding sequence
atggccgaatccttcttttctgactttgggttgctgtggtatctcaaggagttaagaaaggaggagttctggaaattcaaagagctgttgaaacagcccctggaaaaatttgagctaaagccgattccttgggcggaactgaaaaaagcttccaaagaggacgttgctaaattgctggataaacactacccagggaagcaagcctgggaagtcaccctaaatctgtttctgcagattaacaggaaagacttgtggacgaaggcccaggaagaaatgcgtaacaagctcaacccatatcgtaaacatatgaaggagactttccaactgatttgggagaaagagacatgtttacacgtgccagaacacttttataaagagacgatgaaaaacgagtacaaggaactgaacgacgcctacactgctgccgctcgtaggcatacagtggttctagagggtcccgacggaatcggtaaaacaacgctcttgcgcaaggttatgctagattgggctgagggcaatctctggaaggaccgattcacattcgtgtttttccttaatgtctgtgagatgaatggcatagctgagacctccctgttggagctcctgtcacgagactggcccgaaagttccgaaaagatcgaagatatcttctcacagcccgaacgtatcctctttatcatggatggctttgagcagttgaaattcaaccttcagttgaaagctgacctgtctgatgactggcggcagaggcaaccgatgcccattatcctcagttcactgcttcagaagaagatgttgcctgaatccagcttactcatcgctctcggaaagctggcaatgcagaagcattatttcatgctccgccatcccaaactgattaagctgctcggattttcagagtccgagaaaaagtcctatttctcctacttcttcggggagaagtccaaggccctcaaggtcttcaactttgtaagagacaacgggcctctgttcattctctgtcataacccctttacttgttggctggtatgtacatgcgttaaacaacgcttagaacgcggtgaagacctggagattaacagccagaataccacctatctctacgctagcttcctgacaacggtatttaaggcaggcagccagagttttccacctaaagtcaatcgtgcaaggctgaagagcctgtgtgctctggcagccgaagggatatggacctatacattcgtcttctcacatggtgatttgaggcggaacggcctctcggagagtgaaggggtaatgtgggtgggaatgcgactcctccagaggaggggtgattgcttcgccttcatgcatctgtgcattcaagaattctgtgctgcgatgttttatctcctgaagcggcctaaggatgacccaaatccggctatcgggtcaatcacgcaactggtgagggcttccgtggtccagccccagactctattgactcaggtcgggattttcatgttcggcattagcaccgaggaaatcgtcagcatgctcgagacttctttcggttttcccctgtctaaggatctgaaacaggagattacacaatgcttagagtcgctgtctcagtgcgaagctgaccgcgaggcgatagcattccaagagctgtttatcggccttttcgagacccaggaaaaagagttcgttacgaaggtgatgaattttttcgaggaggtgttcatctacattggaaatatcgagcacctggtgatcgcctctttttgcttaaaacattgccagcatttaacaaccctccgcatgtgcgtggagaatattttccctgacgactcaggctgtatctccgactataacgaaaaacttgtttactggcgagagctgtgctccatgttcatcaccaacaaaaactttcagattcttgatatggaaaacacctcactcgatgacccatcactcgccattctgtgtaaggctctcgcccagcctgtttgtaagcttagaaaacttattttcacctccgtgtatttcgggcatgattccgagttgttcaaggctgtgttacacaaccctcaccttaagctgctgtctctctacggcacatcgctgagtcaaagtgacattcgtcatctttgtgaaactttgaaacaccctatgtgcaagatagaagagctaattctgggtaagtgcgacattagctccgaagtgtgtgaggacatcgcaagcgtactggcctgtaattccaagctgaaacatctgagtctcgtcgagaacccactccgggacgagggcatgacactgctctgtgaggctctaaagcactcacactgcgccctggagagactgatgcttatgtattgctgtctgacatccgtgtcttgtgattctatttcagaggtgttactatgctccaagtctctgtcactgcttgatctcggttctaatgccctggaggacaatggcgtcgcatccctctgcgccgctctgaagcatcccggatgcagtatccgggaactttggctgatgggctgcttcctcacatctgactcctgtaaggatatcgccgcagtgctgatctgcaacggcaagctgaaaacgctcaagctgggccacaatgagatcggagatacaggggtgaggcagctgtgtgctgctctgcaacaccctcactgtaagctagagtgtctaggtctgcaaacatgcccgattactagagcttgttgtgatgatattgcagcagccctgatcgcatgcaaaacccttcggtcactgaatctagactggatagctctggatgccgatgcagtggtggtgctgtgtgaggcactctcccatccggattgcgcattgcagatgctcgggttacataagtcagggtttgacgaagaaacacagaaaatactgatgtcagtggaggaaaagatcccgcaccttacaataagtcacggtccttggatagacgaagagtataagatccggggtgtccttctgtag

SEQ ID NO: 28145 - DNA, 534 bp, synthetic construct
  source 1..534: mol_type = other DNA; note = Synthetic coding sequence
atggctgcagtaaaagcatcaacgtcaaaagctacgaggccatggtactcacatcccgtgtatgctcgctattggcaacactatcaccaggctatggcctggatgcagtcccaccacaatgcttaccgaaaggctgtagagtcctgcttcaatctaccttggtacctaccttctgctcttttgcctcaaagctcatacgataacgaagcggcttatccccagagtttctacgatcaccacgtggcgtggcaggattacccatgtagctcctctcattttaggcgcagtggacagcacccacgctactcttctaggattcaggcttcgactaaagaagaccaggccctgtcaaaggaggaagaaatggagaccgagtccgatgcggaagtggaatgcgacttgtctaatatggagattactgaggagctgcggcagtacttcgcagagacagagcggcatcgcgaagagaggagacgccagcagcagcttgatgccgaacgcctggacagctatgtgaacgccgatcatgactag

SEQ ID NO: 28146 - DNA, 1503 bp, synthetic construct
  source 1..1503: mol_type = other DNA; note = Synthetic coding sequence
atggttggcaggagctgcggggtcgccacgcaaaggcaggggggtggacagaggcctaccaatctggctcttacactgagctcttccccagcgcactctaccgccctcccctggttgcccccacgctcactgcagctactgagcgggcacagtgtaccagcacagccaacacctcacctgcctagcgcctgtggcggtcctacaagggtgactttgggagaggagcgggcatggcggtctcacggatccaatgcgggagggcacacatgcctgcccagaaggaccgcaggagcgggaagcttgacgcctggcggtgagagaggaggcaacaacgccggtcacaccgtggttgtggatggcaaggaatacgacttccacctgctgccttctggtatcattaataccaaagccgtgtccttcatcggtaatggagtcgtgattcatctgcccggactctttgaggaggcggaaaagaatgaaaaaaaaggcttgaaagattgggagaaacggttgatcatctccgatcgggcacatctggtgtttgattttcaccaggcagtggatggactccaggaagtgcagagacaggcacaagaaggaaagaacattggcactaccaagaaaggtatagggccaacgtatagcagcaaggccgctcgaacaggcttgagaatttgtgacctgttgagcgatttcgatgagtttagctctcgattcaagaacctggcccaccagcaccagtctatgttcccaaccctggagatcgatattgagggtcagctgaagagactaaaagggttcgcagagaggatccggccaatggtgagggacggcgtgtattttatgtatgaagccctgcacggccctccaaagaaaatccttgtggagggagcgaacgcagctctgctggatattgacttcggaacataccctttcgtgacctccagtaactgcaccgtagggggagtatgtaccgggctaggcattccaccccaaaatattggtgatgtttacggtgttgtcaaggcatacacgacaagggttggcataggagcatttccaacggagcaaataaatgagattggagggctgctgcagaccagggggcacgagtggggggtgactaccggtagaaagagaaggtgtggttggctggacttgatgattctcaggtacgcgcacatggtcaacggcttcacggccctcgcgctgacgaagctggacattctcgatgtactaggcgaagtgaaggtgggcgtgagttacaagttaaatggaaaacggataccatactttccagcgaaccaggagatgcttcagaaagtagaagtggaatacgagactctccccggttggaaagcggacacaactggggctaggcgctgggaagatctgccgcctcaggcccagaattacatcagattcgtagagaaccacgtcggagtagccgtaaaatgggttggcgtggggaagtcccgcgaatcaatgatccagttgttttag

SEQ ID NO: 28147 - DNA, 468 bp, synthetic construct
  source 1..468: mol_type = other DNA; note = Synthetic coding sequence
atggtcaacagctgctgtggatccgtgtgcagtgatcagggctgtggccaggacctatgtcaagaaacatgttgctgtccttcatgctgtcagaccacctgctgcagaacaacttgttaccgcccatcttattcagtgagctgctgttgtcggccacagtgctgtcagtccgtatgttgtcagccgacgtgctgtcgacccagttgctgcgtgccaacctgttgccacccttcgtgttgcatttcaagctgttgccgacccagctgctgtgtgtctagctgttgtaaacctcagtgctgccagtctgtgtgctgccaacccaattgctgccggcctagttgctgtcgcccttgctgttgtcttcgccctgtatgcggccgagtctcatgtcatactacgtgttacaggccagcctgtgtaatttccacctgtcctagacccgtgtgttgtgctagctcctgttgctag

SEQ ID NO: 28148 - DNA, 2124 bp, synthetic construct
  source 1..2124: mol_type = other DNA; note = Synthetic coding sequence
atggccgctgaggcgttagccgcagaggctgtcgcgtcacgattggagcgccaggaagaggatatcagatggctgtggagtgaggtcgagaggctgcgagacgaacagctaaacgccccttacagctgccaagcagaagggccttgtttgacccgtgaagttgcccaactgagggcagaaaactgtgaccttaggcacaggctctgctcgttacggctctgtctcgcggaggaacgctctcggcaggccacactggaaagcgccgaactagaggcagcacaagaagcaggagcccagccccctccctcccagtctcaggataaagacatgaagaagaagaaaatgaaggagagcgaagctgattcggaagtgaagcatcagcctattttcatcaaggagcgcctgaagttgttcgagattctaaaaaaggaccaccagctgctcctcgctatctacggcaaaaagggagacacctcgaatatcattacagtaagggttgcagacggccaaaccgtgcaaggcgaagtatggaaaacaaccccctatcaagtggctgctgagatttctcaagagttagccgagagcactgtgatcgctaaggtaaacggagagctctgggatctagatcgacccctggagggggattccagcctggagcttctgaccttcgataacgagaaggttaacacggccaccacaacagtgtataggtgcgggcctctgatagatctctgcaagggaccacatgtccggcacactggcaaaatcaagactattaagatattcaagaatagctctacgtattgggaggggaatcctgaaatggaaactctgcaaaggatctatgggatttcatttccggacaacaagatgatgagagactgggaaaagttccaggaggaagctaagaatcgggatcaccgtaaaatcgggaaagagcaggaactgtttttttttcacgatctgtccccagggtcatgtttctttttacctcggggtgcatttatatacaatacacttacagattttatccgagaggagtaccataagcgcgactttacagaggttctgtcccccaatatgtataattctaagctgtgggaggctagcggccactggcagcactattccgagaatatgtttacgttcgagatcgaaaaagacacttttgctctcaagcctatgaattgtcccggacattgccttatgtttgcacataggcctcgcagctggagagagatgccaattcgcttcgccgactttggggtgctccaccgcaacgaactatccggaaccctgtccggattaacccgagtccgcagattccagcaggatgacgcgcacatattttgtacagtcgaacagattgaagaggagataaagggctgtctccagtttctgcagtcagtttactcaacattcggctttagctttcagctcaatcttagtacacggccagagaacttcctgggagaaatcgaaatgtggaatgaggcggaaaagcagttacagaattccctcatggattttggcgaaccctggaagatgaatccgggtgacggggctttttacggtcctaaaatagacatcaagattaaagatgccatcggaaggtaccatcagtgtgcgaccattcagctggattttcaactgcctatcaggttcaaccttacctacgtatccaaagatggcgatgataagaaacggccagtgatcattcaccgggctattttgggatccgttgagagaatgattgcaatcctgtcggagaattacggcggaaagtggccattctggctcagtcctcggcaggttatggttattcccgttgggccaacatgcgagaagtacgcactccaggtgagttccgaattctttgaggagggctttatggccgacgttgatctagaccacagctgcaccctgaacaaaaaaatcagaaacgcacaactggcacaatacaacttcatcttagtggttggggagaaggagaagatagataacgcggttaacgtcagaacccgagataacaagatacacggcgagatccttgtgacaagtgcgatcgacaaactgaagaatttgcgcaaaaccagaaccttgaatgctgaagaggccttttag

SEQ ID NO: 28149 - DNA, 816 bp, synthetic construct
  source 1..816: mol_type = other DNA; note = Synthetic coding sequence
atggctggtctggaagtgctgtttgcctcagcggcacccgctataacatgccgccaagatgctctcgtctgttttctgcactgggaagtggtaactcatggctacttcggcctcggggtgggtgaccagcccggtcccaacgacaaaaaaagcgagttgctccctgccggatggaataataataaagacctctacgtgctgcgatacgagtataaagacggttcccgaaaactgctggtcaaggcgataaccgttgagtcatcgatgatcctgaacgtgctggaatatggaagtcagcaggtagccgatctgaccctcaacctggatgactatatcgatgcagagcatctgggtgatttccacagaacctacaagaacagcgaggaactgcgaagccgaatcgtatccgggataatcacgccaatccacgaacagtgggagaaggccaacgtgtcaagcccccatcgagaattcccaccagctaccgcacgcgaggtggacccgctgagaattccccctcatcacccccacacgagccgccagcctccttggtgtgatccactgggacccttcgtagttggcggagaagatctggacccctttgggccaaggcgaggtggtatgatagtggaccctctgcggagcggtttccctagagcgctgatcgatccttcctctggccttcccaatcggctgccacctggcgcagtaccaccaggggctagattcgatccattcggccctattggcaccagtcccccaggtcctaaccctgaccacttacccccacccggatatgacgacatgtatctatag

SEQ ID NO: 28150 - DNA, 474 bp, synthetic construct
  source 1..474: mol_type = other DNA; note = Synthetic coding sequence
atggcaaccccgcctaaacggagggctgtcgaggcaacgggggaaaaggtactgaggtacgaaacctttatatcagacgtacttcagagggatcttcgcaaggtgctggaccatcgagacaaggtgtacgagcagctcgccaaatacctacagctgaggaatgtgatagagaggctccaggaagctaaacattctgaactgtatatgcaggttgatctgggttgcaacttttttgttgataccgtcgtcccggacaccagccgcatttacgtggccctgggatacggcttttttctcgagctcacccttgccgaagcccttaagtttattgatcggaagtcctcactgctgaccgagctgtctaactcacttactaaagattcaatgaatattaaggcccatattcacatgctgctggaaggtctaagagaacttcagggtctccagaatttccctgaaaaacctcatcactag

SEQ ID NO: 28151 - DNA, 543 bp, synthetic construct
  source 1..543: mol_type = other DNA; note = Synthetic coding sequence
atgcaggctgaaggtagaggaacggggggttcaacaggcgatgccgatggcccaggcggtccaggcatacctgatggacctggaggcaatgccggtgggcctggcgaggctggcgcaaccggcggacgtggacccaggggagcaggtgccgctagggctagcggccctggtggcggtgccccaagaggacctcatggcggtgcggcaagtgggcttaacggctgctgccgatgcggtgctagggggcctgagagccggctgcttgaattttacctggccatgccttttgccacccctatggaagccgagctagcgcgtcgctcactggcccaggatgctcccccattacccgttcccggagtactgctaaaagagttcacagttagcgggaacatcctgaccattcggctgactgccgctgaccacagacagttacaactttcaatctctagttgcttgcagcagctgagtttactgatgtggattacccagtgtttccttcccgtttttctggcccagcccccttccggtcagcgccgatag

SEQ ID NO: 28152 - DNA, 621 bp, synthetic construct
  source 1..621: mol_type = other DNA; note = Synthetic coding sequence
atgaccgccagcgtgctccgaagcatctccctggctctgaggcccacctcaggtcttttaggcacctggcagactcagttacgcgagacccatcagcgcgcttccttgctgtcattctgggagttgattcctatgcggtctgagccactaagaaaaaaaaaaaaagtggatccaaagaaggatcaagaagcgaaagaacgtctgaaacggaagattcggaagctggaaaaggccacccaggaactgattcctatcgaagacttcataactcccctcaagtttctcgataaagcgcgagaacgccctcaagtggagctcaccttcgaagagacggagcggcgagcactattgttaaaaaaatggtcactctacaaacagcaggagcgcaagatggaacgggacacaattcgagcaatgctggaagctcagcaggaagctcttgaggaactgcagctcgagtctcctaaattgcacgccgaggccattaaacgcgatcctaaccttttcccattcgagaaagaaggtccccactatacaccccctatccccaactaccagcctcccgaaggtcgctataacgatattacaaaggtctacacccaggtggaattcaagcgatag

SEQ ID NO: 28153 - DNA, 6962 bp, synthetic construct
  source 1..6962: mol_type = other DNA; note = Synthetic coding sequence
atggcggagccaagttcagcgagacggccagtgcctctgatcgaatccgaattgtactttctcatcgcccgatatctgagtgcaggcccttgccggagagccgcacaggtgctagtccaggagctcgagcagtaccagcttttgccaaaacgtctggactgggaaggcaacgaacataacagaagttacgaggaactggtcctctctaacaaacacgttgctcctgaccacttgttgcagatctgtcagcggattggccctatgcttgacaaggagatacccccatcgatttctcgcgttaccagcctccttggcgcaggtagacagagtctactgagaaccgccaaggattgccggcataccgtgtggaaggggtccgccttcgccgcactgcaccggggacgccctcctgagatgcccgttaactatggatctccacctaatcttgtcgaaattcatagggggaagcagctcacagggtgctcaaccttttccaccgcgttccctggcaccatgtatcaacacattaagatgcaccggaggatcctgggccacctgagcgcggtgtattgcgtggcctttgaccgcactggccaccggatcttcaccggatctgacgactgtctcgttaagatatggtctacccacaacgggcgtctgctttctactctgcgcggacattctgccgaaatatcggatatggccgtaaactatgaaaataccatgatcgccgctggaagttgtgataagatcattagggtgtggtgtttaaggacatgcgcccctgtcgcagtgctccaggggcacaccggttcaatcaccagcctgcaattttcgcccatggcaaaggggtcccagcggtacatggttagcacaggggctgacgggactgtctgtttttggcagtgggatctggaaagcctgaagttttctccgcgtcctctgaagttcaccgaaaagcctcgacccggagtgcagatgctgtgttcttctttctccgtcggcggaatgttcctcgccactggcagcaccgatcatgttattaggatgtacttcctcgggtttgaagcccctgagaaaattgccgagttggaatcccacactgataaggttgattcaatccagttctgtaataatggagatagattcctatccggatcacgcgacggaactgccagaatatggagattcgagcagctggagtggcgcagtatattgctggatatggccacaagaatatctggcgatctgtctagcgaggaagagcgctttatgaagcctaaagtgacaatgatcgcctggaatcagaatgattccattgtcgttacggctgttaacgatcatgtcctgaaggtgtggaactcatacacgggtcaactgctgcacaacttaatgggtcacgccgatgaggtgttcgtactggagactcatcctttcgattcccgcatcatgctttccgccggacatgatggcagcatctttatctgggatatcacgaaaggtactaagatgaagcattacttcaacatgattgaggggcagggccatggcgcagtgttcgactgcaagttctcacaggacgggcaacattttgcatgtactgactctcacggccatctgctcattttcggattcggttgcagcaaaccgtatgagaaaatccctgaccaaatgttctttcataccgattacagacctttgatacgggattccaataattatgtcctggacgaacagacccagcaagcaccacaccttatgccgccacctttcctcgtggatgtggacgggaacccccaccctaccaagtatcagcggctggtgcctggcagagagaacagtgcagatgaacaccttattcctcaattggggtacgttgcaacctcagatggggaagtgattgagcagattataagtcttcagacgaacgacaacgatgagagaagccccgagtcctcaattctcgacggtatgatccggcagcttcagcaacagcaggatcagcgcatgggtgccgaccaggatacaattccacggggtttaagcaacggggaggaaactcccagacggggattccggaggctgtctttggacatccagagtccccctaacattggactgaggaggtccggacaggttgagggcgtgcgccaaatgcatcagaatgccccacgaagccaaatcgcaaccgaacgcgatctgcaagcctggaagagacgggtggtggtgcccgaagttcccctgggaatatttaggaagctcgaggactttcgcctggagaaaggtgaagaagagaggaacctgtacatcatagggcgtaagcgaaagaccctccaactgagccataagtccgattctgtcgtcttggttagccagtcaaggcagagaacttgtcgtaggaagtaccccaactatggcagaaggaaccgtagctggcgcgagttaagcagcggcaatgagagctcctcaagcgtgaggcacgaaacctcttgcgatcaatccgagggctcaggttcgtcagaagaggacgagtggcgctctgacaggaaatcggaaagttattccgagagcagcagcgacagctcttctagatatagcgactggacagccgatgctggcatcaatcttcaaccaccattgcgtacatcttgccgcagaaggatcaccaggttttgttcatcctccgaagacgagatttcgacagaaaacctgtctccacccaagcggagaaggaagagaaaaaaggaaaacaagcccaagaaggagaacctgcgccgaatgacaccagccgaactggccaacatggagcatctgtatgaatttcatccacccgtctggattaccgatacaactctccggaagagccctttcgtgccacagatgggagacgaggtgatttactttaggcaagggcacgaagcttacatagaagccgtgagacgaaataacatctatgaactcaatcccaacaaagagccatggcggaaaatggatctcagggaccaagaactggtgaagattgttggaatccgatacgaagtgggacccccaacactctgctgtcttaaattggcctttatcgatcccgctaccgggaaactcatggacaaatcatttagcattcgctaccacgatatgccagatgtgatcgatttcttggttctccgccagttctacgatgaagcgagacagagaaactggcagtcttgtgataggtttaggtcaattattgacgatgcatggtggtttggaaccgttctgtcacaggagccctaccagccacagtaccctgactctcacttccagtgttacatagttaggtgggataatacagaaattgagaagctgagcccttgggacatggaacctataccagataacgtcgacccaccagaagaacttggggcttcaatctcggtgaccaccgatgagttggagaagctgctgtataagccgcaagccggagagtggggacagaaaagccgggacgaggaatgtgatcggatcatctctggaattgaccagttgctcaatctggatattgcagccgctttcgctggtcccgtggacctgtgtacatatcctaaatattgcacggtagttgcttatccaacagacctctacactattagaatgcggctagtaaaccggttctaccgcaggctctcagccctggtgtgggaggtgaggtatatcgagcacaacgctagaaccttcaatgagcccgaatcagttatcgccaggtctgcaaagaaaataacagaccaacttctgaaatttattaagaatcagcattgcactaacattagcgagctctctaatactagcgagaacgacgagcagaacgccgaggaccttgacgactctgatctccctaagacatcctcaggcagacgaagagtccacgacggaaagaagtcgattcgtgcaacaaattacgtcgaatccaactggaagaagcagtgtaaagaactggttaacctgatcttccagtgcgaggattctgagccttttaggcagcccgtggacttggtcgagtatccggattatcgagatatcatcgatacaccgatggattttggaaccgtccgggaaaccctggacgccggaaattatgactctccactggagttctgcaaagacattagactgattttttcaaacgcgaaggcttatactcccaacaagcgatccaagatttacagcatgactctccgcctatctgccctgtttgaagaaaaaatgaaaaagatatctagcgatttcaagattggtcagaagtttaacgaaaagttgcggaggtctcaaagattcaagcagcggcagaactgtaaaggcgactcacagcctaacaagtcaatcaggaacctgaagcctaaaagactgaagtcacagacaaagataatccctgagttagtcggcagcccaacccagagtacaagctcccgtaccgcctatctcggtacacacaaaacctccgccggaatcagcagtggagttactagtggagattcctcagattcagccgagagctcagagaggagaaagagaaataggcctatcacaaacggttcaacattgtctgaatctgaggttgaagattctttggcaactagcctgagctcatcagcctcttcttcctccgaggagagcaaagaaagttctagggctcgcgaatcctcatccaggtctggactgtcaagatcttccaacctaagagtgacccgaaccagagccgctcagcggaagacaggacccgtttcactcgctaacggatgcggtcgaaaggcaacacggaaaagagtgtacttgtccgactccgacaataattctttggagacgggtgagatcctgaaggccagggccggtaataatcgcaaggtgctcagaaagtgcgccgctgtcgccgctaacaagattaaactcatgtcagacgttgaggagaattcctcctctgagtctgtttgcagtggcagaaaactgccccataggaatgcatctgctgtggcacgtaaaaagctcttacacaactccgaggatgagcaaagcctcaagtctgagattgaggaagaggagttaaaggacgagaaccagcttctgcctgtgtcatcctcgcataccgcgcagtctaatgtggatgaatctgagaaccgagattccgagagcgagtccgacttgagggtagctaggaaaaattggcatgctaacggttacaagtctcatacccctgccccttctaagactaagtttctaaagattgagtcctccgaagaagatagcaagagtcacgactcagatcacgcctgcaacaggactgccggaccctcgacctctgtccagaaactaaaagccgagtctattagtgaggaggctgacagcgagcccggacggagcgggggtcgcaaatataacacgtttcacaagaacgcctccttcttcaaaaagaccaaaattctgtcggactcagaagacagcgagtcagaagaacaggatagagaagacgggaagtgccataagatggaaatgaaccccattagtgggaatttaaattgcgatcctattgccatgagtcagtgcagttccgatcatgggtgcgaaacagatctggactctgacgatgataagatcgagaagccaaacaattttatgaaggattccgcgtctcaagacaatgggctgtctcgtaagatttcaaggaaacgagtatgctccagcgactctgactcctctcttcaggtggtgaagaaaagcagcaaagctcgcactggcttactcagaatcacacgcagatgtgccgcaactgcagccaacaagattaagctgatgagtgacgtggaagacgtttcactggagaatgtgcacaccagatccaaaaatgggagaaagaagccattacacttggcctgcaccactgctaagaaaaaattgagtgattgcgagggcagcgttcactgcgaggtgcccagtgagcaatatgcctgcgaggggaaaccgccagaccccgattctgaaggctcaaccaaggtactcagtcaggcccttaacggcgacagcgattcagaggatatgcttaactcagaacataagcatagacacacaaacatccacaagatcgatgcacccagcaagagaaaatctagctccgttacaagttccggggaggacagcaagagtcatatccccggatcagaaacagatcgcacattcagttcagaaagcacgctggcacaaaaggctaccgctgaaaacaacttcgaggtcgaactaaactacggacttcgcaggtggaacgggagaagactgcggacctacgggaaggcccctttctctaaaacaaaggttatccatgactcccaggagacggctgaaaaggaggtaaagcgaaaacggtcccatccggagctggaaaacgtgaagatttccgagactacaggaaacagcaagtttcgcccagatacgagcagcaaatcctctgacttggggagtgttacggaaagtgatattgactgtacggataacactaagaccaaacggaggaaaacgaagggcaaagctaaggtggtgagaaaggagtttgtacctcgcgaccgcgaaccaaacactaaagtgaggacatgtatgcataaccagaaagacgcagtgcagatgccctctgaaaccctgaaagcaaaaatggttcccgaaaaagtgcccagacggtgtgccaccgtcgccgctaataagatcaagataatgagtaatttgaaggagaccatcagcggccctgaaaatgtgtggattagaaaaagcagcaggaagctcccacaccgcaatgcttctgccgcagccaagaagaaactccttaacgtgtataaagaggacgataccacaatcaacagcgaatcagagaaggagctcgaggacattaaccgcaagatgctctttctgagaggatttcgtagctggaaagagaatgctcagta

SEQ ID NO: 28154 - DNA, 2961 bp, synthetic construct
  source 1..2961: mol_type = other DNA; note = Synthetic coding sequence
atggccgagagtttcttttcggattttggccttctgtggtatctgaaagagttacggaaggaggagttctggaaattcaaggagctgctgaaacagcctttggaaaaattcgagttgaaacctatcccctgggcagagttgaagaaagccagtaaggaggatgtcgctaagctgttggataagcattacccgggtaagcaggcttgggaagtgaccctcaacctcttcctccagattaacagaaaggacctgtggacaaaagcacaagaggaaatgaggaataaattaaatccataccgcaaacacatgaaagagacgttccagcttatttgggaaaaggaaacctgcctccatgtgcccgagcatttttacaaagagaccatgaaaaacgaatataaagagctcaacgacgcatacactgcagccgctcggaggcataccgtggtgctggaggggccagatggcatcgggaaaactacccttcttagaaaagtgatgctggactgggctgaagggaatctttggaaggatagattcacttttgtgtttttccttaatgtctgcgagatgaacggaatagcagaaacaagcctgttggagcttctgagtcgagactggccagagagttctgaaaaaatcgaggatattttctcgcagccagaacgaatcttgttcattatggacggattcgaacagctgaagttcaacctgcagctgaaggctgatctgagcgacgattggcgacagcgccaacctatgcctatcatcctgagcagccttctacagaagaagatgttgccagagtcctccctgctgatagccctgggaaaactggccatgcagaagcattacttcatgttacggcaccccaagttgatcaagctgctgggattttcggaatctgaaaagaagagctatttctcttatttcttcggggagaaatctaaagcattaaaagtctttaacttcgttagggataacggccctctgtttatcctctgtcataaccctttcacatgttggctagtgtgtacttgcgttaagcagcgactagaaaggggggaagaccttgagattaacagccagaatactacctatttgtatgcgagcttcttaacgaccgtgtttaaggccggaagtcagtcgttcccacctaaagttaaccgggcacggcttaagagtctctgcgccctggctgcagaggggatttggacttatacctttgtgtttagccacggcgatcttaggcggaatggtctttccgaaagcgaaggcgtcatgtgggtgggcatgcgacttcttcagcgaaggggagactgctttgcctttatgcacctgtgcattcaggaattttgcgcggctatgttttacctgctcaagaggcccaaggacgaccccaatcccgcaatcggctctatcacccagttggtgcgcgctagcgttgtacagccacagactctgctgactcaggtagggatttttatgtttggcatatcaacggaagagatcgtgtccatgctcgagacaagttttggattccccttgtctaaagacctcaagcaagagattactcaatgcctggaaagtttgagccagtgcgaagctgaccgagaggcaattgcgttccaggaactgttcatcgggctgtttgagacccaagaaaaggagttcgttaccaaagtaatgaacttcttcgaagaggtgttcatctacatcggcaacatcgagcacctcgtgatcgcaagcttctgtcttaaacactgccagcacctcaccacgttgagaatgtgcgtggagaacatcttcccagacgatagcggttgcatctcggattacaatgagaaacttgtctactggcgggagttgtgttctatgtttatcacgaacaagaatttccaaatattggacatggagaacacctctcttgatgacccctctctggccatcctgtgcaaagctctggcacaacctgtatgcaagctgcgaaagctgatatttacctcagtttactttgggcatgactctgaactcttcaaagcggtactacacaatcctcacctgaagctgctgtctctgtatggcacgagcctatctcagtctgatatcaggcacctctgcgaaacgctcaaacacccaatgtgcaagattgaagagctgatactgggtaagtgcgacatctcttccgaagtttgtgaggatatcgcaagcgtgctggcatgcaattccaaactgaaacacctttcactggtggaaaaccccctgagggacgaaggaatgacactcctgtgcgaggcccttaaacattcccactgtgctcttgagagattgatgctaatgtattgctgcctgacttctgtgtcgtgcgacagcatctcagaagtactgctctgctcaaaatcactgagtcttttggatctgggatccaatgctttagaagataacggtgttgcgtcgctgtgtgctgccctgaagcatccaggatgcagtataagggagctctggttgatgggatgcttcctgactagcgattcatgcaaggacattgccgctgtgctgatttgtaacggaaagctgaagacccttaaactgggacacaacgaaataggtgacacaggagtgcggcagttgtgcgctgcattgcagcaccctcattgcaagttagaatgcctcggcctccagacttgccccatcacaagggcctgctgtgacgacatcgccgcagccctgattgcctgtaaaacgctcagaagcttgaacctagactggattgctctggacgccgacgcagttgtagttctgtgtgaagctctgtctcaccctgactgtgcccttcaaatgctgggaaactgtcaaaagtcactgggggataccgttgcccctggggaaaaccattgcagcatcaagcacctcctacttaccctgcctatcaacatgcagagacagctgaggctacagaagtag

SEQ ID NO: 28155 - DNA, 3039 bp, synthetic construct
  source 1..3039: mol_type = other DNA; note = Synthetic coding sequence
atggacgcattagatgctagcaagctactggacgaggaactctacagccgtcagctctacgtgctcgggtccccagccatgcaaagaattcagggtgctagggtgttagtctccggattgcagggacttggcgctgaagtcgcaaagaacctggttcttatgggggtaggttctttgaccctgcacgatccacacccgacatgttggagcgacctggccgcacagtttctactgtcagaacaggatctcgaacggtcacgcgcagaggcttctcaagagctcctcgctcagctgaaccgggcagtccaggttgttgtgcataccggagatatcacagaagacctgcttctcgatttccaggtcgttgttttgacagctgcaaagctggaagaacagttgaaagtcggcaccctgtgccataaacacggcgtgtgtttcctggccgctgacactagggggttggttggtcagctattttgtgactttggcgaggacttcaccgtgcaggatcccactgaagcagagcctctgaccgctgctattcagcatatttctcagggatctcccggaattctgacgcttagaaagggagcaaacacccattactttagagatggcgatctagtgacattttccggcatagaaggcatggtggagctcaacgattgtgatccaaggtcaatccatgtgagggaggacggtagcctggaaattggagacactacaacattttcacgataccttcgcggaggggcaatcaccgaagtgaaaaggcccaaaacagtacgccacaagagcctcgacacagccctcctgcaacctcacgtggtggcccagtcctctcaggaggtccatcacgcacactgtcttcatcaagcattttgtgcattgcacaagttccagcatcttcatgggcgtcctccgcagccttgggatcccgttgacgcagagacagtcgttgggcttgccagagacctcgaacctctgaaacgcaccgaagaagaaccacttgaggagccgttggacgaggctttagttagaacggtcgcactgtcctcagccggagtgttgagcccgatggtggccatgctcggggcagtggcagctcaagaggttctaaaggccatctcccgtaagttcatgccgctggatcagtggctttattttgatgctttggactgcctgcctgaggacggggagctgcttccatctccggaagactgtgcactccgtggtagccggtacgacggacagattgccgttttcggcgctggctttcaggagaaactaaggagacaacattacttactagtgggcgctggcgcaatcggctgtgagctgctcaaggtttttgccttagtcggtctcggtgctggcaactctgggggtcttaccgtcgtggatatggatcacatcgaacggagcaatttatcccgccagtttttatttaggtctcaggatgtgggaaggcctaaagccgaagtggccgctgccgcagcgagaggcctaaatcctgatcttcaggtaatcccacttacttaccccctagatccaacgactgagcatatatacggggataacttttttagtagggtcgatggggtcgccgctgccctagactcgttccaagctcgcaggtatgtggcagctcgatgtactcattacctgaaacccttgctcgaagcaggcacctcgggaacatggggttctgccacagtgttcatgcctcacgtgacagaagcttacagagccccagctagcgccgcagcctcagaggatgccccatatccggtctgcactgtgcggtatttcccaagtacagcagagcatacacttcagtgggctaggcatgagttcgaagagctcttccggctctcagccgaaactattaatcatcatcagcaggcacacacatcgcttgcggatatggatgaacctcagaccctgacattactgaaaccagtgttgggcgttcttcgcgtgagaccccagaactggcaggattgtgtcgcctgggctcttgggcattggaaactgtgttttcattacggcataaagcagctgttaaggcatttccccccaaataaagttctggaggacgggactcccttttggagcggacctaagcaatgcccgcagcctctggaattcgataccaatcaggacacacatttactgtacgtccttgccgctgccaatctttatgctcagatgcatggccttcccggatcccaggattggaccgccctgagagaactgctgaaactgttgcctcaacctgacccacaacagatggctcccatctttgcatccaatctagaattggcttctgcgtccgcagaatttgggcctgagcagcagaaggaactgaacaaggcactcgaagtgtggagcgtcgggcctccactgaagcctttgatgttcgaaaaagacgacgacagcaatttccatgtagatttcgttgtggctgcagcatcactgcggtgtcagaactatggcatccctcctgttaaccgcgctcagagtaagaggatagtgggccagatcattcccgcaatcgcgaccactacggccgcagtggcaggcctgctcggccttgaactctataaggtcgttagtgggcctcgtccaaggagcgccttccgccattcctacctgcacctggcagagaactacctgatcagatatatgccttttgcacccgctatccaaacatttcaccatttgaagtggacttcatgggatcggctcaaggtgccagcaggccagccggaaagaactctcgagagcctcctggcacacttacaggaacagcacggattacgggtgcgaattcttctccatgggagcgccctactgtacgccgcaggctggtctccggagaagcaggcccagcatctgcccctgcgtgtcacggaactggtccagcagctgacgggtcaggccccagcccctggccaacgtgtattggtgttggagctgagctgtgagggagacgatgaggatactgcattccctccactacactatgagctgtag

SEQ ID NO: 28156 - DNA, 360 bp, synthetic construct
  source 1..360: mol_type = other DNA; note = Synthetic coding sequence
atggttaggacaaaaacctggactttgaaaaagcatttcgtaggatatccaacaaattccgactttgagctaaagaccgccgaacttcccccacttaagaacggcgaagtgctcctagaggctctctttctgacagttgacccttacatgagggtggtggagagtaagaatgtcgctctgcccaaaggtaccatcgtactggccagtccgggatggacgacgcactccatctccgacggcaaggacctcgagaagctactgactgaatggcctgatacaattccgttgtccttagccctcggaaccgtgggaatgcctgggctgactgcctattttgggcttctcgagatctgcggatag

SEQ ID NO: 28157 - DNA, 1797 bp, synthetic construct
  source 1..1797: mol_type = other DNA; note = Synthetic coding sequence
atgggcggttgctttagcaagccaaaacccgttgagctgaagattgaggtcgttctacccgagaaagagcgcggaaaggaagagctctcagctagtggcaaggggagccccagagcgtatcagggcaatggaacagcaaggcatttccacacagaggagagattgtctaccccgcacccttaccccagtccccaggactgtgtcgaggcggctgtttgtcatgtaaaggaccttgaaaacggacagatgcgtgaagtggaattgggttgggggaaggtgttacttgttaaagataatggtgaatttcacgccctggggcacaaatgtcctcattatggggctccactggttaagggagtactgagtcgtgggcgtgtgcggtgcccttggcacggagcttgcttcaacattagcaccggagacctggaggatttccctggcctcgactctctgcataaatttcaagtgaagatagaaaaagagaaggtgtatgtgagagctagtaagcaggcccttcaactacagcgccgtaccaaagttatggcaaaatgtattagcccctcagcaggctactcttcctctaccaacgttcttattgtaggtgcgggagccgcagggctcgtgtgtgccgagacactcaggcaagagggatttagtgatcgaatcgtgctgtgcaccctggatagacatctgccttacgatcggcctaaactctctaaaagccttgatacacaacctgagcagctcgccttgcgtccgaaagagtttttccgggcttatgggatagaggtgctcactgaggcccaggtggtaaccgttgacgtgaggactaaaaaggtagtgtttaaagacggatttaagttggagtactcaaagcttctcctagctcccggttcatcaccaaaaacgctttcttgtaagggcaaagaggtggaaaatgtgtttacgatccggacacccgaagatgcaaatcgggtggtgcgactggccagaggtaggaatgtggtggtcgttggggctggttttctcggtatggaggtagccgcttacttgaccgagaaagcccattccgtgagcgtggtggaactggaggaaaccccctttagacgattcctgggagagagagtgggcagagctcttatgaaaatgtttgagaacaaccgtgtgaaattctatatgcagacagaggtttcagagctgcgcggacaagaaggcaaattaaaggaggtcgtcctcaagtcctccaaggtggttagggcggacgtgtgcgtggtgggaataggagcagtccctgcaaccggctttctgcggcagagtggcatcggcctggacagtagggggttcatacctgtgaataagatgatgcaaactaatgtgcccggtgtgtttgctgccggtgatgctgtgaccttccctctcgcttggaggaacaataggaaggtgaatatcccccattggcagatggctcacgctcagggcagagtcgcggcacagaacatgctcgcgcaggaggcagaaatgtctaccgtcccatacctgtggactgccatgttcgggaagtccctccgatacgccggttatggagagggatttgacgatgttatcattcagggcgatctggaagagctaaagtttgtggcattctataccaagggcgacgaagtaatcgcagtggcctccatgaattatgatccaatcgtatccaaggtcgctgaggtgctcgcgtccggacgcgctatacgcaaacgggaggtggaaacgggtgacatgagctggttaactggaaaaggtagctag

SEQ ID NO: 28158 - DNA, 1854 bp, synthetic construct
  source 1..1854: mol_type = other DNA; note = Synthetic coding sequence
atgggctcatacctgtccgtgcctgcctatttcacgtctcgagacctctttcgatgctccgaatgtcaagactcgttgacaaattggtactacgagaaggatggcaagctgtactgcccaaaagattattggggcaaattcggcgagttttgtcacgggtgtagtttgcttatgacaggcccatttatggtcgccggtgagttcaagtatcatccggaatgtttcgcctgcatgtcttgtaaggtcatcatcgaagacggcgatgcctacgctttagtacagcacgccaccctttactgtgggaaatgccataatgaggtagttctggcaccaatgtttgagaggctgtctaccgagtccgtgcaagaacaactaccttattctgtcacactgatatcgatgcccgctacaaccgagggaagacggggtttctccgtctcggtagaaagcgcctgctccaactacgccacaaccgttcaggtgaaagaagtgaaccgaatgcatatctctcccaataacaggaatgcaatccatcctggcgacagaatcttagagatcaatggaactcccgttcggacgctccgcgtcgaggaagtagaagatgccatctctcagactagtcagacactgcagctgctgatcgaacacgatccagtgtcacagcgcctggatcagctccgacttgaggccagactggctccacatatgcagaacgccggtcatcctcatgcccttagcacgctcgacaccaaggagaacctggagggcaccctccggcgtcgatctttacgacggtcgaactcgatttccaaatcccccggacccagttctcccaaagagccattactgttctctcgggacatttctaggagcgaatccctgcggtgttcctcttcttattcacagcagatcttccgcccttgcgatctcatccacggggaggtgcttgggaagggcttcttcggacaggctattaaggtgactcacaaggcaaccgggaaggttatggtaatgaaagaactcatacgatgcgatgaagagacccagaagaccttcctgaccgaggtgaaagtgatgagatccctggatcaccctaatgttctcaagtttatcggggtgctgtacaaagacaagaaactcaacttgctgaccgagtatatcgagggaggaaccctgaaggacttcctgagatctatggatccctttccatggcagcagaaagtgcggtttgctaaaggcattgcttctggtatggcatatttacacagcatgtgcatcatccaccgggaccttaattcccacaattgtcttattaaactcgacaaaacagtcgtagtcgctgacttcggtctgtctagacttattgtggaagaacgcaagcgggctcccatggaaaaggccacaacaaagaagcggacactccggaaaaacgatcggaaaaagcgatacaccgtggttggtaacccttattggatggctccagaaatgctcaacggcaaaagttatgacgagaccgtagatatcttctcctttggcatcgtgttatgtgagattattggccaggtgtatgcggatcctgactgcttacccaggacactggattttggattaaacgtaaagttgttctgggagaaatttgtgcccaccgactgcccccctgccttttttcctctcgccgctatatgctgtagactcgagccagagtccagaccagcattctctaaacttgaagactcattcgaagcactgagtctgtaccttggcgagctgggcattcctcttcctgccgaattggaagagctggaccatacggtttcaatgcaatatggcctgacccgcgatagtcccccttag

SEQ ID NO: 28159 - DNA, 1338 bp, synthetic construct
  source 1..1338: mol_type = other DNA; note = Synthetic coding sequence
atgcgggaaattgtgcatattcaggccggacagtgcggcaaccaaataggcgctaaattctgggaagtgattagcgacgagcacggcatagaccctacgggttcttaccatggtgattcagacctccagctggaaaggattaatgtctactacaacgaggcagctggcaataagtacgttccgagggcaatccttgtcgatctggaacccggaactatggactctgtgaggtcaggaccctttggacaaatatttcggccagataattttgtcttcggacaatccggagctgggaacaattgggccaaagggcactacaccgagggggcagagctcgtggactccgtccttgacgtcgtgcggaaagaaagtgaaagctgtgactgcctgcagggatttcagctgacccactcccttggcggaggaacggggagcggtatggggacactgctgattagcaaaatcagggaagaatatccagaccggatcatgaataccttctccgtgatgccttcccccaaagtgagcgataccgttgtggaaccttacaacgcaacactgagtgtccaccaactcgtggagaacactgatgagacctacagtatagataacgaggcactttacgatatctgttttaggaccttaaaactgacaacacccacgtatggcgacttgaatcatttggtttcagctacgatgagcggggtgacgacctgtttacgttttccagggcagttgaacgccgatctgagaaagctggctgtgaatatggtgcctttcccaaggctgcatttcttcatgccaggctttgctccactgacttccagagggtcacagcagtatagggcccttacagtacccgagctgactcagcagatgttcgactccaagaacatgatggctgcttgtgatcccagacatgggagatacctgactgtggccgcaatcttcagggggcgtatgagcatgaaggaagttgacgaacaaatgctgaatgtgcagaataagaactcctcctattttgtggaatggatacctaacaatgtgaagacggccgtctgtgatattccgccacggggactgaaaatgagcgcaacgtttattggcaactccaccgcaatccaggagctgttcaagaggatcagcgagcagttcactgctatgttcagaagaaaagccttcctgcattggtatactggcgaaggaatggatgaaatggaatttaccgaagcagaatcaaatatgaatgacctggtgtcggaatatcagcagtatcaggatgccacagccgatgaacaaggtgagtttgaggaagaagagggcgaggacgaagcatag

SEQ ID NO: 28160 - DNA, 2028 bp, synthetic construct
  source 1..2028: mol_type = other DNA; note = Synthetic coding sequence
atggccaaacatggggctgatgagcctagctcccgatccggctcccccgaccgcgagggcagagcctctgaagatcggtcattgcttcaccagcggctggcagttagggagctcatcgacacggaagtgtcctacctgcacatgctgcagctgtgcgccagcgacataaggagccgcctgcagcagctcccccagggcgacctcgacgtgcttttcagtaatatagacgacattatcaaggttaatagtcgcttccttcacgatttgcaggagacagcgtcgaaagaggaagagcaggttcagctcgtaggaaacattttcctcgagttccaggaggagctggagcaggtctataaagtgtattgtgccagttacgaccaggccctactgctggtggatacgtaccggaaggagccagagctgcagcgccatattcagggcatcgtagaagctgtagtgcctcaggcaggtagcagcggcctcagtttcctgctcgtgattcccttgcagcgaatcactaggtaccctttgttattacagaaaatactggagaacaccgtgcctgacgcttccgcatatcctgttctgcagcgggctgtgtctgccctccaagacgtgaacaccaatatcaatgagtacaaaatgaggaaggaagtcgcttccaagtatacaaaggttgagcaactcactttgagagagcggctggcaaggattaacacacacactcttagtaagaagactacgaggctctcgcagctgttgaagcaggaagctggcttgatccccaggactgaggataaggagttcgatgaccttgaggagcgctttcagtgggtgtctctgtgcgttaccgagctcaagaataacgtggcagcctacttggataatctacaggcctttctgtacttcaggcctcatgagtataacctagacatacctgaagggcctgctgtgcagtactgtaatctcgccagagatctccacttggaggcctttctgaagttcaaacagaggctggaagggctggtgtggcagcctttatgtagcttagcaaaggctttactggggccacagaatctcatcaaaaagagacttgacaaactgctcgactttgagcgggttgaagagaagctgctggaagtgggttctgtgacatatcaggaagaggccgcaagacatacataccaagccctaaattctcttctggttgccgagcttccacaattcaaccagttggtgatgcagtggcttggccagattatgtgtacattcgtcactttacagcgggatctggctaagcaagtgctccaaagagccgaaggatctatggcacagctacctcatcaccatgtgccagaacccgctttccggaagctcgtagaggacgcgttgggacgcacctctaaccagctgaggtccttccaggagacttttgaaaaggtccagccccctcccacgacacagccactcctgccaggaagcgagcgccaggtgcaagccttgctatccagatacggacccggaaaactgtaccaggtaactagtaacattagcggcacaggaaccttagacctgacgctccctcgaggacaaattgttgccatcctgcagaataaggatacaaaaggtaactcagggagatggctggtcgatacgggtggccataggggttacgtgcctgccggtaagctgcagttataccacgtagtgcccagtgctgaggaactaaggcggcaggcaggcctgaacaaagacccaagatgtcttactccagagccttctcctgccttagtgccctccatccctactatgaaccaggtcatcgccgcttatcctttcgttgctcgaagtagccatgaggtgagcttgcaggctggccagcctgtgaccatcctggaagcccaagataagaaagggaatccggagtggtccctcgtcgaagtcaatggtcaaagaggctacgtgccgtcaggcttcctggccagagcgagatctccagtgctgtggggctggagccttccttcgtag

SEQ ID NO: 28161 - DNA, 3399 bp, synthetic construct
  source 1..3399: mol_type = other DNA; note = Synthetic coding sequence
atggcttctgatggagcctctgctctgcccggtcctgatatgagcatgaaaccatccgccgcacctagcccctccccggctctgcccttccttccacctacgtctgatcctccagaccatccaccacgcgaacctcctccccagcccatcatgccatctgtgttttcccctgacaaccctctgatgctgtcggctttcccctcatctctcttggttacgggggacggcggaccctgcttgagcggagcaggcgcaggcaaggtcatagtgaaagttaagacagaaggtggcagcgctgaaccatcccagactcagaacttcatcctgacacagacagccctgaattccactgctccaggaactccgtgcggcggtttggaggggccagcccctccatttgttacggcttcgaatgttaaaaccatcctaccctccaaggctgtcggggtgagccaggaggggcctcccggactaccgcctcagcctccaccacctgtagcccaactagtgcctattgttccccttgagaaagcgtggcccggaccacacggcacaacgggtgaaggaggccctgtggccaccctgagcaagccaagtctcggcgaccggtccaaaatctccaaggacgtatacgagaacttccgccagtggcagaggtataaggctctggcacgccgacatcttagccagtcccccgatacagaagctctgtcttgctttcttatccccgtcctgcgaagccttgccagactgaaacctaccatgaccctcgaggaagggctgcccctggctgtgcaggagtgggagcacacctctaattttgataggatgatcttctacgagatggctgagagattcatggaattcgaagctgaggagatgcaaatccagaacacccagcttatgaatggatctcaggggctgtccccagccacccccctaaaactggatccactcggacccctagctagtgaggtgtgccaacagcccgtatacattcccaagaaagcagccagcaagaccagggcgcctcgtcggcgtcaacgcaaagctcaacgtccccctgccccagaggcccctaaagagattcctccggaggcagtcaaggagtacgtcgatatcatggagtggctggtaggaacccatctggccaccggcgagtccgacggaaagcaagaggaagagggtcagcaacaggaagaggaaggcatgtatcctgaccctggcctcttatcatatataaatgagttgtgctcccaaaaagtctttgtctccaaggtcgaggctgtgattcaccctcagtttttggcggatctgcttagtcccgagaagcagagagacccactggctctgatcgaagagttagagcaggaggaaggcttgactctggctcagctggtacagaagcggcttatggccttggaggaggaggaggacgctgaggctccacccagctttagtggcgctcagctcgacagcagcccttctggctccgtggaagacgaggacggtgacgggaggttaagaccttcccccggattgcagggagccggaggcgcagcctgcctgggtaaggtgtccagctccggaaaacgagccagggaagtccatggcggacaggagcaggcgctggactcccccagaggaatgcatcgcgatgggaatacgttgccaagcccaagctcatgggaccttcagcccgaactggcagctccccaggggacgcccggacccttgggcgtcgagcgccgtgggtctgggaaggttatcaaccaggtctctcttcaccaagacggacatttaggcggtgcagggccacctggacactgccttgtcgcagaccgcacatccgaggctctccccctgtgctggcagggagggttccagcctgagagcacgccttccttagatgctgggctagcagaactcgccccattgcagggtcaagggctcgagaagcaggtgctggggcttcagaaaggccagcagacgggaggcaggggagtcttgccgcaggggaaggagccactggcggtcccatgggagggttccagtggcgcaatgtggggtgacgatagaggtactcccatggcccagagttatgatcagaatcccagcccccgagccgcaggcgagcgggacgacgtgtgcctgagtccaggcgtctggctcagcagtgagatggacgccgttggtcttgagctgcctgtccaaatagaggaggtgatcgagtcttttcaggtcgaaaagtgcgtcactgagtatcaggagggatgtcaagggctggggagcagaggaaacatatctcttggtcctggcgagactttggtgcctggagacaccgagtcttcagtgataccatgtgggggtacagtggcagccgctgccctggagaaaagaaattattgctccttacctgggccactgcgggctaattctccacctctccgctcaaaggaaaatcaggagcagtcttgcgagactgtgggacatccttcagacctttgggctgagggctgttttcctctcttggagagcggagatagtacacttggtagttctaaggaaaccctgcccccaacctgtcagggcaatctgctaattatggggacggaggatgcttcttccctgccagaggcttcccaggaagctggaagccggggaaatagtttttcacctctgctggaaaccatcgaacccgtgaatattcttgacgtcaaggacgattgtgggttgcaactgagagtcagcgaggatacgtgtcctctcaacgtgcatagctacgatccccagggggagggacgggtagaccccgatctgagcaagcctaagaatctggcccctctccaagagtcacaggaatcatacacaacaggcacgcctaaggcaacaagttcacaccagggcctggggagtacgctgccgaggaggggcacacggaacgcaatcgtacctagagaaacttccgtctccaagactcacagaagtgctgatcgcgctaaaggcaaagagaagaagaagaaggaagcggaagaagaagacgaggaattgagtaatttcgcatacctgctggccagcaaactgtctctctcccccagagaacatccccttagtcctcaccacgccagcgggggacaaggcagtcagcgggcaagccacctcctacccgcaggtgctaagggcccaagtaaattgccctaccccgtagcaaagagcgggaaacgagccttagcgggtggtcccgcacctaccgaaaagactccacactccggagcgcagctaggcgtgcctagggagaagccactggccctcggggttgtccggccatctcaacctagaaaaaggagatgcgactccttcgtaactggcaggaggaaaaaacgcagacggagccagtag

SEQ ID NO: 28162 - DNA, 522 bp, synthetic construct
  source 1..522: mol_type = other DNA; note = Synthetic coding sequence
atggctgtagcagtcggcgttcgggctgctccagtgctgggcctcgcaagggccctagtacttggcctgcggggttctcaggccgctaggtggcgcggatggggaacggccgctccaggctctctgtgggcattatgtgagtgtcccgcaggctgtcgagagctctggtttagggggcgtgccgcatgggctgccaggagcgagagactgctgcacccagcccaggactccgatggagaacgtgaggattctgccgctgagagagcacggcagcagctcgaagccctactcaataagactatgcgtattaggatgaccgatggcaggacactggttggatgctttctgtgcacagacagggattgcaatgtcatattaggttccgcacaggaatttctgaagccctctgattcattcagcgcaggagaacctagagttcttggcctcgccatggtacccggtcatcacattgtctctatcgaggtgcaacgggaaagtctgaccggcccaccctatttgtag

SEQ ID NO: 28163 - DNA, 558 bp, synthetic construct
  source 1..558: mol_type = other DNA; note = Synthetic coding sequence
atggtgaactcctgctgtggttccgtctgctctgaccagggctgcggtcaggacctctgccaggaaacatgttgctgtccgagttgttgccaaaccacctgctgccgcaccacctgctaccgcccaagttattcggtcagttgttgttgcaggcctcaatgttgccagtctgtgtgctgtcagccaacttgctgtcgcccttcttgctgtgtcagttcttgttgtaaaccccaatgttgccagtccgtctgttgtcagccaacttgctgtcacccaagctgctgtatcagctcatgctgtcgcccttcttgctgtgtgtcctcatgctgcaaaccacagtgttgtcagtcggtgtgctgccaacccaattgttgccggccatcatgtagcatttcatcctgttgccggccatcttgttgcgagtctagttgttgcaggccgtgctgttgcttgaggcccgtttgtggacgggtctcatgccacacaacatgttacagacccgcatgcgtgatttccacgtgccctcgacccgtttgttgcgcctcctcatgttgctag

SEQ ID NO: 28164 - DNA, 252 bp, synthetic construct
  source 1..252: mol_type = other DNA; note = Synthetic coding sequence
atgtgttgcaattattacaggaactgttgtgggggttgtggctacggcagcgggtggtcaagtgggtgtggttatggatgtggatacggctgtggttacggttccgggtgcaggtacggctcaggctatggcaccgggtgtggatacggatgtggctatgggagcgggtgcggttacggctgtgggtatagtagttcctgttgtgggtaccgacctctgtgttaccggagatgctattcttcgtgctactag

SEQ ID NO: 28165 - DNA, 993 bp, synthetic construct
  source 1..993: mol_type = other DNA; note = Synthetic coding sequence
atgggttcaaggaaaaaggaaatcgcgctgcaggtgaacatatctacacaggagctgtgggaagagatgctgagcagcaaaggcttgacggtggttgatgtttaccagggctggtgtggaccctgcaagccggtagtctctctttttcagaagatgcggatagaggtggggttagacttgttacactttgcactagccgaggccgaccgcctcgacgttctggaaaagtatcgcggaaagtgtgaaccgacttttctgttttacgccggaggcgaactggtagcggtggttcggggtgcaaatgcacctttattgcaaaaaactattctggaccagttagaggccgaaaaaaaagtcttggctgaagggagggagaggaaggtaattaaagacgaggcactgtcagacgaagacgagtgtgtaagccacggcaagaacaacggcgaagacgaggacatggttagcagcgagcggacctgcacgctggctattatcaaacctgacgccgtggcccatggcaagacagacgaaattatcatgaagattcaagaggctgggtttgagatcctgaccaatgaggagaggaccatgactgaggcagaagtgagactattttatcaacataaggccggtgaagaggcctttgagaagcttgtccaccatatgtgctctggaccttcacacttattaatcctaacccggaccgagggcttcgaagacgtggtgacgacctggaggaccgtaatgggacctcgtgatcccaatgtagcacgcagagagcagcccgagagcctcagagcacagtatggcaccgaaatgcctttcaacgcagtccacggatctagagatcgagaagatgcagatcgggaacttgccttgcttttcccgagtctgaagttcagtgacaaagacacagaggctccccagggaggggaagccgaggccacagccggacctaccgaggcactgtgtttccccgaagacgtcgattag

SEQ ID NO: 28166 - DNA, 606 bp, synthetic construct
  source 1..606: mol_type = other DNA; note = Synthetic coding sequence
atggtgagctcttgctgcggatccgtttgctctgaccaggggtgtggacaagatctttgccaggagacatgttgtaggccatcttgttgcgaaaccacatgttgtcggaccacatgctgcagaccatcctgctgtgtgtcatcatgttgccgcccacagtgctgccagtccgtgtgctgccagcctacatgcagccggccttcgtgttgtcagactacttgttgtagaactacatgttacagacctagctgttgcgtgtcatcatgttgccggccacagtgctgtcagcctgcttgctgccagcccacctgttgtagaccaccacgctgctgcataagttcttgctgccgaccttcttgttgcgtttcatcctgctgcaaaccgcagtgttgccaatctgtctgctgccagccgaactgctgccgcccaagctgtagtatttcctcttgctgccgcccaagctgctgcgaaagtagttgctgtagaccctgctgctgtgtgcgcccagtgtgcggcagagtctcctgccatactacctgctacaggccaacttgcgtgatctcttcatgccccagaccattatgttgtgcaagctcgtgttgctag

SEQ ID NO: 28167 - DNA, 792 bp, synthetic construct
  source 1..792: mol_type = other DNA; note = Synthetic coding sequence
atgggggatattcctgctgtggggctgagctcatggaaggccagccctggcaaggtcacagaggccgtgaaggaggccatcgacgctgggtatcgtcacttcgattgcgcgtatttttatcataacgagcgagaagtgggggctggaattcggtgcaagatcaaggaaggagctgtgcggcgagaggacctctttatcgctaccaagctctggtgcacctgtcacaaaaaatcactggtggagactgcctgtagaaagagcctaaaggccctgaagcttaattatctggacttgtatctgatacactggcctatggggttcaaaccccctcaccccgagtggattatgagctgctccgaactcagtttttgtctctctcatccacgcgtgcaagaccttcccctggatgagtcaaacatggttattccttccgacactgatttccttgacacctgggaggcgatggaggatttagtcatcaccggactcgtgaagaatatcggcgtgtcaaactttaatcatgaacagctggaaaggctcctcaacaagcccggtttacggttcaaacccctgacgaaccaaattctgatccgctttcagattcagcgaaacgtcatagtaatccctgggtccatcaccccttcccatattaaggagaacatccaggtgtttgatttcgagctcacacagcacgatatggataacatcctcagccttaatagaaatcttagattggcaatgtttcctataactaaaaatcataaagattatccattccacattgaatactag

SEQ ID NO: 28168 - DNA, 177 bp, synthetic construct
  source 1..177: mol_type = other DNA; note = Synthetic coding sequence
atgaggtactacggatcttactaccgaggtctgggatatggttgtggtggatttggcggactgggttatgggtgcgggtgcggcggttaccggtacgggtctggctacgggggttatagatatgggtgctgcagacctagttgccgcgaaggctacggcttttcaggattctattag

SEQ ID NO: 28169 - DNA, 159 bp, synthetic construct
  source 1..159: mol_type = other DNA; note = Synthetic coding sequence
atgtgctatggatacgggtgtgggtgtggaagtttttgccgattgggctacggatgtggctacgaaggatgccgatacggttgtgggcaccgagggtgtggcgatgggtgctgttgcccatcctgttaccggagatatcgcttcaccggcttctactag

SEQ ID NO: 28170 - DNA, 255 bp, synthetic construct
  source 1..255: mol_type = other DNA; note = Synthetic coding sequence
atgagctattacggatcgtattataggggcctgggctatggatgtgggggatttgggggattgggctatggatatggttgtgggtgcgggtcattccgcaggctcggctacgggtgcgggtttgggggtaacggctatggctattgtcgcccttcatgttatggcggttatgggttctctatcctcttaaaaagctatcccgaagatacaatatcagaagtaatccgccgtagcttcaatctcactaagtactag

SEQ ID NO: 28171 - DNA, 246 bp, synthetic construct
  source 1..246: mol_type = other DNA; note = Synthetic coding sequence
atgtcttattatggcagctactatggaggattagggtatggctgcggaggcttcggaggcctcgggtacgggtatggctgcggctgtggaagctttagaaggttgggctcggggtgcggctatggagggtacggatacgggtccgggtttgggggttatgggtatggatcagggtttggaggctatgggtatgggtgctaccgcccttcttattacgggggatacggattctccggcttttactag

SEQ ID NO: 28172 - DNA, 414 bp, synthetic construct
  source 1..414: mol_type = other DNA; note = Synthetic coding sequence
atgagttacaactgtagcagcggaaactttagctcctgctgttttggcagctacctacgatacccggtttccacctataatcttttctatccctccaacgctatctattctcccaacacgtgccagttaggttcgtctctgtacaatggctgccaagagacttactgcgagccaacatcctgtcagacctcatgcactctggccagatcataccagacatcatgttactgccccaaaaattcaattttttgcagtccgcgacaaactaactatatcaggagtttgggatgcggcaacacgggcctcggcagcctgggctgcggcagtaccgggtttcagagcttggattgcggtagctccttctaccacccaactacattctcctcaaggaattttcaggctacatgctactag

SEQ ID NO: 28173 - DNA, 483 bp, synthetic construct
  source 1..483: mol_type = other DNA; note = Synthetic coding sequence
atgagctataactgctgtagtaggaacttcagcagccgctcattcgggggatatctgtattatcccggatcatacccaagtagtctggtgtattccaccgcattatgctccccctctacatgccagctcagaagcagcttgtaccgggattgtcagaaaacttgctgggaacccgcaagctgtcagaaatcctgctataggccgcgtacctctatcttgtgttgtccttgtcaaactacgtgtagtggcagcctgggtttcagaagctcgagctgccgctcgcaggggtacgggagtcggtgttgctatagccttggaaatggttcatcgggattcagattcctaaagtacgggggatgcgggttcccttccctgtcttacgggtcccgcttttgctaccccaattatcttgctagcggcgcatggcaaagctcttgctacagaccaatttgtggatccagattttaccagtttacctgctag

SEQ ID NO: 28174 - DNA, 684 bp, synthetic construct
  source 1..684: mol_type = other DNA; note = Synthetic coding sequence
atgctgaaccccgacggcgtgtatcttggcaattataggtgtagcctcatgggatttgacctgaacagacattggctcgacccgagtccctgggtgcaccctactctgcacggagtgaagcagctgatagttcagatgtacaatgaccccaaaacaagtctcgagttctacatcgacatccacgcgcactctacgatgatgaatggtttcatgtatggaaatatctttgaagacgaggagagatttcagagacaggccatttttccaaagctgctatgccaaaatgccgaagacttctcctactcgtcaacctctttcaatagagacgccgtgaaggctggcaccggaaggaggttcctgggaggactgctggatcatacatcttattgttacaccctggaagtgtcattttacagctatattatttcagggacaacagctgcagtcccctacactgaggaggcctatatgaaattgggtcggaacgtggccaggacattcctggactattatcggctaaacccagttgtggagaaggtggcaatccctatgccacgcttgcgcaaagaaaaatctccaccatataaacatccccttttgaggggacccgctagcaactatcctaactcaaaaggagataaaaaatcttctgttaatcacaaggacccttctaccccattttag

SEQ ID NO: 28175 - DNA, 465 bp, synthetic construct
  source 1..465: mol_type = other DNA; note = Synthetic coding sequence
atgacccattgctgttcgccatgctgccaacctacatgctgtcggaccacctgctgtcggacgacatgttggaagcccactacagtgaccacatgcagcagcactccttgttgccagccaagctgttgcgtgtcctcctgctgtcagccctgctgccgtcccacctgttgtcagaacacctgctgtcagcccacgtgcgtgaccagctgctgtcagccttcgtgctgctccacaccatgctgccagcctacctgttgtggcagtagttgtgaccagagctctagttgtgcgccagtgtactgccgccgaacatgctattatcccacaaccgtgtgccttccgggttgtttgaaccagagctgtggctccaattgttgtcaaccctgctgccggccagcctgctgcgagactacttgcttccagccgacctgtgtgtcctcctgttgtcagcctttctgctgttag

SEQ ID NO: 28176 - DNA, 7061 bp, synthetic construct
  source 1..7061: mol_type = other DNA; note = Synthetic coding sequence
atgaagcaacggaagggtcaaggaagcgggggaagccggggtagaaagaaaaggggtttgtcagatatttctccatccacttcgctgccaccactggtggagggccagctgagatgctttctcaagctgacagtgaatcgagtgatctggaaaatcgctaagcccccaacctgcgttttagtccgggttcggtggtggggcgagacgagcgacggcactctcttctgtccccgtgatgccctgcagaccgaaccgaaagcagtgagaacaacaaccagatatgccatacggtgtggacccaagcagtttaccagctacctcaccgatatggctgtgctggtgctcgaagtcataacaaagctggacggactccccattggacgggtccagataaatggtcttgcgcagctgagccctactcatcagattaacggcttcttcaccatagtgtcttcaacatctaaaaagttaggggagctacaggtgagtctcgcattagagcccctgagcgaaacctacgactcgtaccacccattaccgacaaccgacatgaccgaaaacgtgctactgtctaagcaaggttttcgtgaaaatactgagccttccagcacacagttccaggtgccaagtaggccccgagacatccacaccattaagatcgacggtaaagagctagccgctaatagctccaggagcaccacgcccaggggaaaggatcacgtatgcttcgctgagaaccccgatacaatcaaagacagctccttcgggctgcagcattcactgaactcggggcagtcccttgaaagcgtaaccttaaaaggaagggcgcctagaaaacagatgtccctgctcaacagctctgagtttcaaccccaaattagaacagtggccaagtctcattctgattcatgcatcctgtcatctaacaacctcccaaccaaagacctgctgagtgcactgctagaacagggtaataagctgagaaatgccatggtaatatctgcgatgaaaagtagcccagaaactagtatgctcctggaccaggtgcaccctcctatcaatgaagattcccttagggccagtactcaaatccgagccttcagcagaaatagattcaaagaccacatcgaagaccatctgctcccctcgactgaaaacacattttggcgccacgatacaaaggctgacacaagggccattcagctgctcctggggtcagcagaactctcacagggtaatttctgggacggccttggtagtcccccagattccccatctcccggttcagatgtctactgcatctctgagttaaacgatcctcagtatgaccagagtttattagagaatctattctacaccgcgcctaagtctgatacatccatatccgatttcctatccgaggaagacgacattgtcccaagcaagaagatctcacagtccaccgccctcgccaggtcctctaaggttctggagtcaagtgaccacaaactaaagaaacgctcggccggtaagaggaatcgaaatctcgtcgaacaacaaatgttatcagagacacccgaggatgcccagactatgaccttatccgtggatcggctcgccctgctcggcaggactcactctgttagaattatcatcgagaccatgggggtgccaccagattcgcctcagatgacgcctggtaagaagtcttacgcaggaccccctcctaaggtgactactgctaagaagagaacattcttcgtggaatatcatttcccagtggggttcagtgaatcaggccttggtaaaacagccttaataaccgaagtggtcaggctagccagctccaagatcactgatggcaaggtgaagtttcagcaacgttttgtgtttccagtccaattcgggggacccatgatagaacattggtggaattccaatttgacatttcagatttatgtaaagaagacaccacagaagaaaccagaggtgatcggatcagtgagcttgagtttgcgggctgttatccaatccgagctcctgagtttttccgatcagctgcctgttcagcaggagaatggacagtctcctttcgggcctctcaaagttaccatggaattgatcactgacaataaggattttacaggtattaacacaaagctgtccggcaacacccattataccccgttgtgcgcgccaacttccccaaacaaggctcttcccgagctgaaccaggatatgacatgcaccaagaatccccagaatttaaatcaaatccatgaggagacggccaagaaagctcagaatctggtcctgcctaataggaaatcgccatcaccagtggcgccacacccaagcacatttgtggctactcctgcctctcacaatctagtcaaccaaaccaacggcaccaccaaagaatcggccttactactccatgtgctactcatggtgcccgatggtaaagattttatttccggcgagtctgagaaacagagtccctgcaatgtgtacctgaactgtaaattattctccaccgaagaggtgactcgatccgtgatcgcctggggtacaacccaaccagtgttcaatttctcccaggtgatccccgtctcattgtcctctaaataccttgagcgcctcaaaaataatgtgatggttatagaaacgtggaacaaggtgcggagccccggtcaggacaaactgttgggcctggttaagctcccattgcaccagttttatatgtccttcaaggacgccaagatctctcggctgttgttggatgcacagtaccccgtggttgctgtggattcctacatgcctgttattgacgtctttagtggccatcagaacggttctctgagagtcttcttagccatggggagttccaatcagatcatggcactgcagcgacttaaaaacgaggaggggactctgccaccattttctccccgacctgctcattttctcgaccagcctacagctgcatccgtcgccatggcagaggatcgcggtaatggcttaatggagcactgttttgaaatccatatcgaaatggtgaaaggacttgcaccactgcaagctaccgtctggggagaagcagattgctatgttcagtactactttccagttcagcattctcagtcgagtgttctcaagggaccagagttcttggaaaacggaatcacgcttaagcccttcagaaccgccacaactctttgcgtcccagacccaatattcaattccgagcaccatcattccctcctgcttcccgcagaagttcctgtccagagactacttctttcggctttcagtgctcagggcctcgtccccggtggcggagtccagtttgagatatggtgtcgctattactacccaaatgtaagggaccagaaagtcgccaaagggaccctgcctctcagccgcatttgtgcaatggtcaccactcagcatagagaggacgtggggatccaaacatttaatttgcctctgaccccccgtatagagaatagaaaagagctgagaaaccagtcttcaggcctgttggatgtcgggttacggtaccgtagaagccctcgaacagcggagggcgtgcttgcagctcgcactgtctctatcagcgtccagattatccgggcatgcggtctgcaggctgccgcaaaagctctagctgagcgcgagccggcactgcagttctcagccactgtgggcgttaatgcgtccgttacaacacacctgtcgtttctcccacaaggcgagcagaggcgtactcatcccgtggcttgttctttttgccccgagttcagtcatcatgtagagtttacttgtaaccttgtcactcagcattgctcaggagaggcatgtttcctagcagaactattagagttcgcagaggtgatattcgctgtttatcacgaaaatacaaagtcagcctccgacatcattagtatcgaatcctgcaaagagtatctgctcggggtggtcaaggtgcctaccaaagaattactgataaaacggagcggcataacggggtggtatcctatcattctgcccgaggatgggggactgccacacggacttgaactcatgcagaagatcgtgggtggtttagaattaagtatcagcttcactcatcggggagatagggagagagtactcgaggctgcagagcacctgggctggagcttcgaaaatagcctcaaagatttcgtgcgcatggatgagggggagcccgctacagttacaatctctacgcctcggctttggctgcccatccactgtgtcctcctggcagggcataatcatatccataagaacacctattgttacctgagatacaagttttatgaccacgaggctttttggactccgttgaagaaacccaaagagtccgtgaataaaaagcaaatcatggtgacattcaaggcttcaaaaagagccgaagtgactcggggaccttccttgttatggtacttcagagaggaacgcttggagattcaggtatggagggcatacgggaatgattctgtggagcgaccccatcagactgacagttggataggatctgcttacgttgatttggcgagacttggggagagatccgcgcgtaccctcacggtgtcaggagtttatccgttgtttggtcgcaatgccagcaatttatcaggagcagccctgcgtgtgcacgttgttttgagcagtctatcctcgcatctggagcccacccacgagctcgattccatggattgctcatctcattccgagagtgaacagttacccaggcgtaatgatgaggtgcagctgtcgccaccagaggtgattagttgtcaccaaaaatcccctgccagcacccaggtcccatgttcctctacaaccgcagaggtgcgacttacacaggaaggaccggctgaccttgatggaacgtttgccgtcagcatcctggtggaaagggcaatgcatctaagtctcaagggttccccgctgacagagaggaaggtgtcaattcctagctgttgtgtgtctttcgccaccgctgacgaatcaagcccggtgtacacacaagtggtggagaatactgattctccaatttggaattttcaacagcagtctaggctctccaaagaactgctgttggatcctcaacagacattagtgttcaaggtctggcacaaaggcgatgaagagagagttataggcttcgctagcgtcgacctcagtcccctgctgtccggatttcagtttgtttgtggctggtacaacattactgatttttcgggagagtgtcaagggcaaatcaaagtggccgtgagccccctggagtctctgattcatttcaaagaagagaggcaggctagaagaggcgttgagaccagcaaatcactcataccaatttactcacccttctccttccccgcttctgacacatatgcagccttctccagtcacatggcaagacaaacactggatcagttagctcatgcttcaagcaaggagttggatttctcttcccctggacggagcgacaccacaaggagccaggcatcccgtcacgaagaacacgtccaaaatattaggcgttttcacgagtctctgcacctccagggcgaagcgccactcccgtgcgacgacaagcttactacatctccgctgagcagccagacgtccatactcacttcactgaggaaaaacttgagcgagctggatcaaattcaaaggtatttccggcagaaactaacgaagccctttttgccactcagcccacagacccagacggctatttcccagcaccaggagagttgtagggaccatctcggtcccggtgccagttctcttgaccccggtagccagtgtatcctggagaagtcctcgaatttagtactgcaagtttcctctttaatcacggacctccaaactatcacccgcgattctcaagcagccctgtcttctcaccgagcccgatcccgcagcaacaaagccacgactttgccagacgctcaagataccgaagcgttgcaggagcggtgcactatgccagacgagcccttggttagagccccagacaagggaacagatagtccaagtccccctccattggaggaaaccagcaacggcggtcggatgctccatgagtccctgcggcatgccgtgcccattacgaggatgcagtccagcgaggacacggaggccggtccagcctattcagacgaagactatgaagaggacattattgagccacggacattgaatgagattacgaccgtgacggataaaacctctccttggagttcggtcatttccgatacttctgaggtaatttctcctcagccggacgaagttcagagagaagggcctagctgcccctctccaggaccgttttgccgtgaggagctcatggttaaatcaagctttttgagttcacccgagcgcgctgtgaacccacatttgcccagacagggaagtccttcgcaatccctcgttgcctgcgagtgtgaagcatccaaggccagggtcggtggggagtctgcctcagccaacccacagcccataccttgcccaactctcagcggggctcagcagagctcgaccttcgtcggctggagcagtcctcagactgaccaaaataaggagccaaagtcagaggccccagcggaaaacgaagccgcaactagtgaacttggcgatagcgccgatagcttcaagaaactgccgctgaacctggccagccagtcgcgcagagaaaatcacaaggggcctcctatcgatagttccgatattaggcagcggcaagtcactactggttctgagaccagcaccaaacaaagcctgctgctcccaggcccaattgtggtcccaaatttctttcttcctccccagcaactggaggcaagcctgcggatgttgagtctgtctgccaccttgccacccgctgccacaaccgaccaggacaagtctgaagctactaggggcgctttgtcccaaagaccctgtagacccagaccaaactccctgcctctgaacttgccagaagaggagactctccggatagccaggatatttagctcccaatatagccagaaggacta

SEQ ID NO: 28177 - DNA, 219 bp, synthetic construct
  source 1..219: mol_type = other DNA; note = Synthetic coding sequence
atgaactactatggaaactactatggagggttggggtatgggtacggtggatttgacgacctgggctacggctatggctgtgggtgtggatcttttcggagactgggatatggaggcggatatggcggttacggttatgggagtgggttcggcggatatggttaccgcagctgcagaccctcctgttacggcggttacggcttcagtgggttctactag

SEQ ID NO: 28178 - DNA, 198 bp, synthetic construct
  source 1..198: mol_type = other DNA; note = Synthetic coding sequence
atgagctataattgctgctgcggtaatttttcatcccactcttgtgagggctatctttgctactctgggtattcaagaggcggtagcagttatccctctaatttggtgtactcaaccgaacctctgatctcacaacatctgcccgctggcttcctctcacttcaaggcctctctggcgacctgctgggcaatccatag

SEQ ID NO: 28179 - DNA, 384 bp, synthetic construct
  source 1..384: mol_type = other DNA; note = Synthetic coding sequence
atggtaaatagttgttgcggcagtgtgtgcagcgaccaagggtgtgaccagggcctgtgccaggagacctgctgtcgcccttcatgttgtcagacgacttgctgctgtccctcatgcgtcgtgtcatcttgttgtaggccctcttgttcacagactacatgttgccagacaacatgctgccgaccctcctgctgccacccggtgtgctgtcaaacaacctgccggccatcctgtggcgtatcgtcatgctgtcgccctctgtgttgccagacaacttgtcgtccctcttgtggagttagtagctgttgccggccactgtgttgtcagacaacctgttgcagagcaacatgttgcagaccttcttgctgcggttcttcctgctag

SEQ ID NO: 28180 - DNA, 318 bp, synthetic construct
  source 1..318: mol_type = other DNA; note = Synthetic coding sequence
atgggctgctgcccaggagattgttttacctgctgcactcaagagcagaattgctgtgaggagtgctgttgccagcccggatgctgtggttgctgcgggagctgctgtgggtgtggcggttctggttgtgggggtagcggctgcggcggttcctgctgcggcagctcatgctgcgggagcggctgcggaggctgcgggggatgtggcggatgcggtggtggttgctgcggatcttcgtgctgtggaagctcctgctgcggctcaggctgttgtggcccagtttgctgtcagcctacacccatctgcgacaccaaatag

SEQ ID NO: 28181 - DNA, 3915 bp, synthetic construct
  source 1..3915: mol_type = other DNA; note = Synthetic coding sequence
atggaggagatccctgtgaaggtggccgtaaggattcgtccactgctctgcaaggaagcattgcacaatcatcaagtatgtgttagagtgatacctaacagccaacaggtcattataggccgtgaccgcgtgttcaccttcgattttgtttttggtaagaatagcacccaggatgaggtttacaacacctgcatcaagcccttggtgctatcactgatcgaaggatacaacgcaactgtcttcgcttatggccagaccgggtctggcaagacttatacaatagggggtgggcacatagccagtgtggtggaaggacaaaaagggatcatcccaagggccattcaggagattttccagtcaatctccgaacacccatccattgactttaatgtaaaggtgagctatatcgaggtgtataaggaggatttacgggatctcctggagctggagacctcaatgaaagatctgcacatacgcgaagacgaaaaaggaaatacagtgatcgttggtgctaaagaatgtcatgttgaaagcgccggtgaggtgatgtctctactggagatgggtaacgctgcacggcatacaggcaccacacagatgaatgaacactcctcaaggtcacatgcaattttcaccatctcgatttgccaggttcacaaaaacatggaggctgccgaggacgggtcctggtatagccctcggcacattgtctccaaatttcactttgttgaccttgcaggatctgaacgggtcactaagactggaaacaccggagagcggttcaaggagtcgattcagataaattcagggcttttggcattggggaacgtgataagtgcccttggggatccacgtcgcaagtcttcccacattccataccgagatgcgaagataacccggttgctcaaagactccctgggcggttcagcgaagacggtgatgataacgtgtgtgtccccctcctctagcaatttcgacgaatctctgaacagtctgaagtacgctaaccgagcgcgtaatatcagaaataaacctacggtcaactttagtcctgagtcagataggattgacgaaatggagtttgaaattaaattgctgcgtgaggccctgcagtctcagcaggctggggtctctcagactacgcagataaacagagagggcagtccagatacaaatcggatacactccttggaagaacaggtggctcagctccagggcgagtgtctcggttatcagtgttgcgtcgaggaggcgtttaccttcctggtggatctgaaggacaccgtccggcttaatgaaaagcagcaacacaaactgcaagagtggttcaatatgatccaagaggtgcggaaggcagtgctgacttcatttcgaggaattgggggtaccgcctcgttagaagagggcccacagcacgtcaccgttctgcagcttaaacgggagttgaaaaaatgccagtgcgtgctggcagcagacgaggtggttttcaatcagaaggagttagaggtcaaagaacttaaaaaccaggtacaaatgatggtgcaggagaataaggggcacgccgttagcctcaaggaggctcagaaagtcaatagactgcagaacgagaagatcatcgaacagcagctacttgttgaccagctcagcgaggagctgacaaaacttaacctgtcagtgactagtagcgccaaggagaattgcggagatggccctgatgccaggattccagagaggcggccttacacggtgccttttgacacgcacctcggccattacatctacatcccctcaagacaggactcgcggaaggtccacacgagcccacctatgtactctctggatagaatctttgctggcttcaggactcgctcacagatgctgttaggccacattgaggaacaggacaaggttctgcactgtcagttcagtgacaacagtgacgatgaagaaagcgagggtcaggaaaaatcgggcaccaggtgcaggtctaggagttggattcaaaaacctgactcagtctgcagtctggtggagcttagcgacactcaggatgagacccaaaaaagcgatctcgagaatgaggatctcaagatagactgcctccaggaatcccaggagctgaacctgcagaaactcaagaacagcgaacgtatcttgactgaagctaaacagaaaatgcgagaactgacaatcaacattaagatgaaggaggatctgattaaagagctgattaaaaccgggaatgatgccaagtcggtgtccaagcagtacagcctgaaagtgaccaagctggaacacgatgctgagcaggcaaaagtggaactgatcgagactcagaaacagctccaggaactggaaaacaaagatctgtctgatgtggccatgaaggtgaaactccaaaaagagttccgaaagaaaatggacgctgcaaaactgagggtccaggtgcttcaaaaaaaacaacaggacagtaagaaattggcctctctctcgatacagaatgagaaacgcgcaaacgagttggaacagagtgtggatcacatgaagtaccaaaagatccagctgcagcgcaaactcagggaggaaaacgagaaacgcaagcaattggatgcggtgatcaagcgcgaccagcagaagattaaggctctgaatacagatagtcttaaaatctccacacgcctcaatctcctggaacaggaacttagcgaaaaaaatgtccaactgcaaacaagcacagctgaggaaaaaactaaaatcagcgagcaagtggaggtgctccagaaggaaaaagaccaactgcagaaaaggagacataatgtagatgaaaaactcaaaaatggcagggtactcagcccagaggaggagcacgtgctcttccaattagaggaagggatcgaagccctcgaggcggcaattgaatatagaaacgagagcattcaaaaccgtcagaagtcactgagagcttcttttcataacctctcgcgcggagaagccaacgtgttagagaaactcgcctgcttaagtcccgtcgaaatacgcactatcctgtttcgctacttcaataaagtggtgaacttgcgtgaagcagaacgcaaacagcagttgtacaacgaggagatgaagatgaaagtgctcgagcgcgacaacatggtcagagagctcgaatcggctttggaccatctgaaacttcagtgcgatagaagactgacactgcagcagaaagagcacgaacaaaagatgcaactcctgctgcaccattttaaggaacaggacggcgaaggaataatggaaaccttcaagacctacgaggataagattcagcagctggaaaaggatctgtatttttacaaaaagaccagtcgtgaccacaagaaaaagttaaaagagcttgtgggagaggcaattcgcaggcagctggccccttcagagtaccaagaggcaggcgatggagtgctgaagcccgaggggggaggcatgcttagcgaggaactgaaatgggcttcaaggccagagagtatgaaactgtctggcagggagcgcgaaatggactcaagtgcttcatctttacgtacccagccaaaccctcagaagctctgggaggacataccagagctaccccctatacactcgtccctcgccccacctagcggccatatgctgggcaacgagaataaaactgagacggacgacaatcagttcacaaagagtcacagcaggctgagttctcaaattcaagtcgtcgggaatgtcgggaggttgcacggtgtcactccagtgaagctctgtcgcaaggagcttcggcagatcagcgccttagagctatcattgcgcagaagctccctcggtgtgggcattggcagtatggctgctgactccatagaggtgtcccggaaacccagagacctgaagacctag

SEQ ID NO: 28182 - DNA, 903 bp, synthetic construct
  source 1..903: mol_type = other DNA; note = Synthetic coding sequence
atggaggaagaagccagttcacccggactgggatgctcaaaaccccatttggagaagctcacattgggtattaccaggatactcgagtcatcacctggggtcacagaagtgacgattatcgaaaagccacctgccgagaggcacatgatctcttcctgggagcaaaagaataactgcgtgatgcccgaagacgtaaagaacttctacttgatgaccaatggattccatatgacctggagtgtgaaactggatgagcatattattcccttgggatcgatggcaattaatagtatctctaaactgacacagcttacacagtcttccatgtattccctgcccaacgcacctacactagctgacctggaagatgacacccatgaggccagcgacgaccagcctgaaaagccccactttgactctcgttcagtcatcttcgagctggactcctgcaacggctccggtaaagtatgcctcgtgtataagtccggtaagccagcccttgcggaagacactgagatatggttcctagaccgcgctctgtactggcactttctgactgacacctttaccgcttactaccgcctgttgattacccacctaggtctcccacagtggcaatacgcctttacaagttacggtatttccccccaggcaaaacagtggttcagtatgtacaaacccattacctataacaccaacctcctgacagaagagaccgactcattcgtgaacaaactggacccatcaaaagtcttcaagtccaagaataagatagtgattcctaagaaaaaaggtcccgtgcagcccgctggcggacagaaaggccctagcggtccctccggaccatccacatctagcacctctaaaagctcaagcggatccggaaaccccacccgtaaatag

SEQ ID NO: 28183 - DNA, 390 bp, synthetic construct
  source 1..390: mol_type = other DNA; note = Synthetic coding sequence
atgatgacagatttgaagcagtctcacagtgtgcggctcaacgatgggccatttatgcccgtcttgggctttggcacttacgccccagaccacacccctaagagtcaagccgctgaagccaccaaagttgccatcgatgtggggtttagacacattgatagcgcttatctgtaccaaaatgaagaagaagtcggtcaggccatttgggaaaaaatcgcggacgggactgtgaagcgcgaagagattttttacaccatcaaattatgggcgacattcttccgagctgagctcgtgcatccggctctcgaaagatctctcaaaaagctgggcccagactatgtagacctgttcatcatacacgtgccattcgccatgaagggtagcagctag

SEQ ID NO: 28184 - DNA, 1257 bp, synthetic construct
  source 1..1257: mol_type = other DNA; note = Synthetic coding sequence
atgcatcccgaaccaagcgagcccgctaccggcggtgcggcagaattagattgcgcgcaagaaccgggagtagaggagagcgcaggagaccacggtagcgctggcaggggcggatgtaaagaggaaattaacgatcccaaggagatctgcgtgggaagtagtgacaccagttaccatagtcaacagaaacaaagtggggacaacgggagtggagggcacttcgcacatccgcgagaggacagggaggacagaggacctaggatgacgaagtcaagtttacaaaagctgtgcaagcagcacaaactttacatcacgcccgctctcaacgatactctctacctgcactttaaaggcttcgatcgtatcgagaatttggaagagtacacaggactcaggtgtctttggttacagtctaacgggatccagaaaatcgagaatctcgaggctcagacggagcttcggtgtctgttcctgcagatgaacctccttaggaagattgagaacctggagcctttacagaaactggacgcacttaacttaagtaataactatattaagacaatcgaaaacctgagctgcttgccagtgctgaacacactacagatggcccacaaccaccttgagacggtcgaagacatccaacacttgcaggagtgccttaggctttgcgtactagacctgtcccataataagctgtctgacccagaaattcttagcatactggagtcaatgccagacctgcgcgttctcaaccttatgggaaaccctgtgatcagacaaattcccaactaccgaagaactgtcaccgttcgcctcaaacatctcacatatttagacgatcggccagtgttccctaaagatcgggcatgcgcagaggcctgggcaaggggtggatacgctgccgagaaggaggagcggcagcagtgggagagtagagaaagaaagaagatcactgattctattgaggcgctcgctatgatcaagcagcgggcagaagagcgcaagcgccagcgagaatcgcaggaacgtggagagatgacaagctcagatgatggcgaaaatgtaccagcatctgctgagggcaaagaggagccgccaggtgacagggagaccaggcagaagatggagctgttcgtgaaggagtctttcgaggccaaagatgaactatgtccagaaaagccaagtggggaagagcctccggtcgaggcgaaaagggaggacggagatcccgcaactgtcacggcatgtgagggctag

SEQ ID NO: 28185 - DNA, 2472 bp, synthetic construct
  source 1..2472: mol_type = other DNA; note = Synthetic coding sequence
atgggcaagaagagaaccaaggggaagaccgttcctatcgacgacagcagtgagacccttgaacctgtgtgtagacacattcgcaaggggttggaacagggcaacttgaaaaaagccctggtaaatgttgaatggaacatatgtcaggactgtaagactgacaataaggtgaaagataaggcagaagaagaaaccgaggaaaaaccttctgtgtggttgtgcctgaaatgtggccaccagggatgtggcagaaatagccaagagcagcatgctttgaagcattacctgactcctaggtcagaaccacactgcttagttctgagcttggacaactggagcgtttggtgttatgtatgtgacaatgaagtacagtactgctcttcaaatcagctggggcaggttgtggactacgtgcgcaagcaagccagcatcacaacacccaaacccgctgagaaggacaacgggaatatcgaactcgaaaataaaaaactcgagaaggagtcgaaaaatgaacaggagagagagaaaaaggaaaacatggctaaggaaaatcctcctatgaactctccctgtcagattactgtgaagggcttgagcaacctcgggaacacatgctttttcaatgctgtgatgcagaatctttctcagactcctgtgctccgggagttgctgaaggaggtgaagatgagcggtacaatagttaagattgagccacctgacctggccttgaccgaaccactcgagatcaacctggagcccccaggacccttgacactcgcaatgtcacagtttttaaacgagatgcaggaaactaaaaaaggagtcgtgacaccaaaggagctgtttagccaggtctgcaagaaggcggtgcgtttcaaaggctatcaacagcaggattcccaggagctgttgagatacttgttggacgggatgcgcgcagaggagcaccagagagtgagcaaaggaatcctgaaggcctttggaaattctacggaaaagcttgatgaagagctgaagaataaagtgaaggattatgagaaaaagaagagtatgccatcattcgtggaccgaattttcggaggtgaactcacctctatgataatgtgcgaccagtgccgcacagtaagtctagtgcacgagagttttctcgatctctccctcccagtcctggacgaccagtccggcaaaaagtctgtgaacgataagaatctgaagaagactgttgaagacgaagatcaagattccgaggaagagaaggataatgattcctatattaaagagcgtagcgatattcccagcggaacttcaaaacacctccaaaagaaagccaaaaagcaggctaaaaagcaggcaaagaaccagcggagacagcagaaaattcaaggaaaggttcttcacctgaacgatatctgcaccattgaccaccctgaggactccgaatacgaggctgagatgagccttcagggggaagtaaacataaaaagcaatcacatctcgcaagaaggggtgatgcataaagaatattgtgtgaatcagaaagatttaaatgggcaggcaaagatgatcgaatcagtcaccgataaccagaagtccaccgaggaggttgatatgaagaacatcaatatggataatgatcttgaagtgctgaccagcagcccaaccaggaatctgaatggggcatacctgaccgaaggtagcaatggcgaagttgacatatccaacgggttcaagaacctgaacctaaacgccgctctccaccccgacgagataaatatcgagattctgaacgactcacatactcccggtaccaaggtttacgaagtcgttaatgaggatcccgaaacagccttctgtaccctggctaacagagaagttttcaacacagacgagtgttccatccaacactgcttataccaattcacaagaaatgagaagttaagagatgccaacaagctcttatgcgaagtgtgcacgcgcaggcaatgcaatggccctaaggcaaacataaagggggaacggaaacacgtatatacaaatgccaaaaaacaaatgcttatatcactggcgccacctgtgctaacgctgcacctgaagcggtttcagcaggcaggatttaaccttcgaaaagtgaacaagcacataaagttcccggaaatcctggacctggctcctttttgcacccttaaatgtaaaaatgtcgctgaggagaatactcgtgtgctctattcactttatggcgttgttgaacactccggaacaatgcgatccggacattacactgcgtacgctaaggctcgaactgcgaactcccacctatctaacctagtgttgcatggagatatcccgcaggacttcgaaatggaaagcaaaggccagtggtttcatatttctgacactcatgttcaggctgtacccaccactaaggttctgaactctcaggcatacctcctgttttatgagagaattctgtag

SEQ ID NO: 28186 - DNA, 3204 bp, synthetic construct
  source 1..3204: mol_type = other DNA; note = Synthetic coding sequence
atgaattccatggaccgacacattcaacaaacgaacgatcgcctgcagtgtataaaacaacacttacagaatcctgctaattttcacaacgctgcaacagagctgcttgactggtgtggtgaccccagggcctttcagagaccgtttgaacagagtctaatgggctgcctgactgtggtgagtcgcgtcgcagcccaacagggatttgacctcgatctgggatacagactgctcgcagtgtgtgccgctaatcgcgataagttcactccaaagagcgctgcgttactttctagctggtgtgaggagcttggcaggctcctgttgctcagacaccagaagagccggcagagcgatccaccaggaaaattgcccatgcaacccccactgtcaagcatgtcgagcatgaaacccacattgagccactcagatggttcttttccatacgatagcgtcccgtggcagcaaaataccaaccagccgccagggagtctcagcgtggtcacgactgtgtggggcgtgacgaacacctcgcaaagtcaggttctcgggaacccaatggcgaacgctaacaatcctatgaatcctggcggaaacccaatggctagcggtatgactacatccaaccccggattgaacagtccccagtttgctggccagcagcagcagttctccgctaaagcaggtccggcacagccttatatccagcagtctatgtatggaaggccaaattacccgggaagcggcggatttggtgcttcttatcccggagggccaaacgcacccgctggcatgggcatcccaccacacacccgccctcccgcagactttacacagccggcagccgcagccgcagcagctgccgtggcggcagcagctgcaacagccaccgctactgcaaccgctactgttgccgctctccaggagacccaaaataaggatatcaaccagtatgggccaatgggacctacccaggcatataactcccagttcatgaaccaacctggccctcgagggcctgcctccatgggaggcagtatgaaccccgcaagtatggccgctggcatgacgcccagcgggatgtcagggcctcctatgggcatgaaccagccacggcctcccggaatcagtccttttggaacacacggccagcgaatgccacagcaaacgtaccccggacctcgacctcagtccctgcctatccaaaacattaaaaggccatatcccggagagcccaattatgggaatcaacaatatggccctaattcccagtttcctacccagccagggcagtacccagctccaaatccacctcgcccacttacttccccaaactatcctggccagaggatgccctcccaaccttcctcaggccaataccctcctcctactgtgaatatgggccagtactacaaaccagaacagttcaacggccagaataacacattttccggttccagttacagtaactatagtcagggcaatgtgaatagaccccctcgccctgtgcccgtcgctaattacccccactctccagtgcccggtaacccaaccccccctatgactcccggtagcagcatccccccttacctttccccttcgcaagatgtgaaaccgcctttcccgccagatatcaaacccaatatgtccgccttgcctccacctcctgccaaccataacgatgagcttagactgactttcccagtgagggacggcgtggtcttggaaccctttcgcctggagcataatctggccgttagcaatcacgtgttccatctgagacctacagtgcaccagacgcttatgtggcggagcgatttggaactgcaattcaagtgctaccatcacgaagaccgacagatgaacactaattggcccgctagcgtgcaggtgtccgtgaatgccaccccgctcacaatcgaacgaggcgacaacaagacatcccacaaacccctgcatctaaagcatgtttgtcagcccggaaggaacaccatccagattactgtgaccgcatgctgctgctcccacctgttcgtactgcagctcgtgcacaggcccagtgtgaggagtgtccttcagggtttgcttaaaaagcgactgcttccggctgagcattgtatcaccaagatcaaaaggaatttctcaagtgtggcagcttcctctgggaacactaccctgaacggtgaggacggggttgagcaaaccgcgatcaaggtctcacttaagtgtcctataacctttcgcaggatacagctacctgccagaggacatgattgcaaacatgtccagtgtttcgatctggaatcctacctccagttgaattgcgaacgaggcacatggagatgtccagtgtgtaataagaccgccctgttagagggcctggaggtggatcagtacatgtggggaatcctgaacgctattcaacactccgagtttgaggaggtaaccatagaccctacatgcagttggcgcccagtaccaattaagagtgatctacacataaaggacgatccggacggtattccgagcaagcggtttaagacaatgtctccgtctcaaatgatcatgcctaatgttatggaaatgattgccgctctcggtcctggccctagcccataccctctcccccctcctccaggaggaacgaattccaatgactatagttcccagggcaacaattaccagggacacggaaacttcgatttcccacatggaaaccccggtggcacgagcatgaacgactttatgcatgggccaccccagctatcccatccccctgatatgccaaataacatggctgcccttgaaaagccactttctcacccaatgcaggaaacaatgccgcacgcagggtcgagcgaccaacctcatcctagcatccaacaggggctgcatgttccccacccttctagccaatctggccctcctctgcatcatagcggcgctccaccacccccacccagccagcctccaagacagccccctcaggctgcacccagcagtcacccacacagtgatctgacttttaaccctagctcggcactggaggggcaggcaggcgctcaaggtgcaagtgacatgcctgagcctagcttggatctcctgcctgagttaacaaaccccgatgaactcctgtcatacctggacccacccgatctgcctagcaatagtaacgatgacctcctgtctctgttcgagaataactag

SEQ ID NO: 28187 - DNA, 1038 bp, synthetic construct
  source 1..1038: mol_type = other DNA; note = Synthetic coding sequence
atggacggggaagatatcccggacttcagttcactcaaggaggaaaccgcttattggaaagaactgtccctgaaatacaaacaaagtttccaagaggctagagatgagctggtcgaatttcaggaagggagccgcgaactcgaagccgaactggaggctcagttggtccaggctgagcagaggaatcgggacctacaggcggacaatcagaggctgaagtatgaggttgaggcactgaaagagaagttggaacaccagtatgcccagagttacaaacaggtaagtgtgctggaagatgatctgtctcagacccgtgccattaaggaacagctgcacaaatacgtgagagagttggaacaggccaatgacgatcttgaaagggccaagcgcgcaactattgtgtcgctagaggacttcgagcagcgcctgaatcaagctattgagagaaacgccttccttgagtcagagctcgatgagaaggagtccttgttagtttccgtgcagcggctgaaagatgaagctcgcgacttaaggcaagaactggcagtgagagaaaggcaacaggaggtcacccgcaaatctgcacctagctctcccacacttgattgtgaaaaaatggatagtgcggtgcaggcatccctgtcattacctgctacccccgtaggcaaggggactgaaaataccttcccttctcccaaagccatccccaatgggtttggcacttccccgctgacaccgagtgcgaggatttcagccttgaatatcgttggcgacctgttgagaaaagtaggcgctcttgagtctaaactcgcagcctgtagaaatttcgccaaggaccaggcaagcaggaaaagctacatttccggcaacgtgaactgcggcgtcctgaatgggaatgggaccaagttcagtaggtccggacatacaagtttttttgataaaggtgcagtgaacgggtttgatcccgctcctccaccccctgggctaggcagctcccgtcccagctccgccccagggatgcttccgctctccgtctag

SEQ ID NO: 28188 - DNA, 588 bp, synthetic construct
  source 1..588: mol_type = other DNA; note = Synthetic coding sequence
atgggttcgcgagcgagtacactgctcagggatgaggaactcgaggagattaaaaaggagacgggtttcagtcacagccagatcacacgcttgtactcacgcttcactagccttgataaaggcgagaatggcactctatctagggaggacttccagcggattcccgaacttgctatcaaccccctgggagaccgcatcatcaatgcctttttccctgagggtgaggatcaagtgaactttcggggattcatgcgcactctggctcacttcaggcctatcgaggacaatgaaaagtcaaaggatgtaaatggtcctgagcccttgaattctaggtctaacaaactgcatttcgctttccgcctgtacgacctggacaaggatgagaagatctctagggatgaactgctgcaagttctgaggatgatggttggcgtgaatatttcagacgagcaattgggcagcatagctgaccgaactatacaggaggccgatcaggacggcgattcagcgataagtttcaccgagtttgtcaaggtgctagaaaaagtggacgtggagcagaagatgagcatcagatttctacattag

SEQ ID NO: 28189 - DNA, 780 bp, synthetic construct
  source 1..780: mol_type = other DNA; note = Synthetic coding sequence
atggccgacgcttgctgcacgaggacttatgttatcgccgcatccaccatgtccgtatgcagctctgatgtgggacacgtgtctcgcgtgtcctctccctcaacctgcactggctcatcttggcaggtggacaactgccaggaaagctgttgtgagccccgatcctgtgcctcaagctgttgcaccccttcctgctgcgccccagctccctgcttggcgctcgtgtgcgctcccgtttcatgcgaacccagcccgtgtcaatctgggtgtacggactcgtgcacgccctcgtgttgccagcaatccagttgccagccggcatgctgcacctcaagcccctgtcagcaagcctgttgtgttcccgtgtgctgtaagtcaaactgctgtaaacccgtatgttgtgtctctatctgctcaggagcgtccagcccttgttgtcagcagagttcctgtcagagcgcttgctgcaccttttctccttgccagcaagcctgttgcgtgccaatctgctgtaagcctatttgctgtgtgcccgtgtgctctggggcatcgtctctgtgctgccaaaagtcttcctgccagccagcgtgctgtaccacatcctgctgccgaccctctagcagcgtgagcctgctgtgccggcctgtctgccgacccgcatgttgtgtgccagttccctcctgctgcgtccctgcatcatcatgtcagccctcctgttgtcatccagcttcatgcctgagttttctctgccgcccagcctgctcccgcttggcttgctag

SEQ ID NO: 28190 - DNA, 171 bp, synthetic construct
  source 1..171: mol_type = other DNA; note = Synthetic coding sequence
atgatttattacagcaactactacggcggatacgggtacggtggactgggctgcgggtacggttgcggttatcgcggatatggatgcggctacggcggatatgggggttacggcaacggctactactgcccatcttgctatggtaggtactggagttacggattctactag

SEQ ID NO: 28191 - DNA, 897 bp, synthetic construct
  source 1..897: mol_type = other DNA; note = Synthetic coding sequence
atggcagcttctactatgagcgtttgctcttctgcatattctgatagctggcaggttgacgactgtccagagtcgtgttgcgagcccccttgttctgccccaagctgctgcgccccagcaccttccctatccctagtgtgtacacctgtgagctgcgtgtcaagcccttgctgccaggctgcgtgtgaaccttcggcatgtcagtctggatgtacttcttcctgtacaccaagctgctgccaacagtccagctgccaacccgcttgctgtacctctagcccttgccagcaggcatgctgcgtcccagtgtgttgtaagactgtgtgctgtaagcccgtctgttgtgttcccgtctgttgtggggcagcctctagttgctgtaggcagtctagctgccagccggcttgttgtgctagctccagctgtcaacctgcatgctgtgtgcctgtgtgttgcaaaccggtgtgttgtgttagcacatgctctgaggacagttccagctgctgccagcaatcttcatgtcagcctgcttgttgtacctcaagctcttaccagcaggcttgttgtgtgcctgtctgctgtaaaaccgtgtactgcaaacccatatgctgtgttccagtctgtagccgagccagctcaagcaggtgtcaacagccctcctgccagccagcatgttgtacgacatcgtgttgtaggcccagctctagcgtgtctcttctctgtcaccccgtctgccggtccacatgctgtgtgcccgtgagctcatgttgtgctccaacttcatcttgccagagttcctgctgtcgccctgcctcctgcgtgtccttgctgtgtaggccagcctcaagccggttggcatgttactcattgtgcagcgggaagaaatccagttgttag

SEQ ID NO: 28192 - DNA, 567 bp, synthetic construct
  source 1..567: mol_type = other DNA; note = Synthetic coding sequence
atgactgctccatcatgcgcgtttccagtgcagtttcggcagccatccgtgtctggtctttcacagatcaccaagtccttatatatttccaatggcgtcgctgccaacaacaagctgatgctgtccagcaatcagataacgatggtcattaatgtgtccgtggaagttgtgaacactctctacgaagacattcagtatatgcaggttcctgttgccgactcccctaattcgaggttgtgcgactttttcgaccctatcgcggatcatatccactcggtggaaatgaagcagggacgaaccttgctgcactgtgcagcaggtgtcagcagatccgccgctctctgtctcgcatacttgatgaagtaccatgccatgtccctgctggatgcacacacttggacaaaatcatgtcgaccaattatacgacctaactccggattctgggaacagctgatccactacgaatttcagcttttcggtaaaaacaccgtacatatggtctcttcccctgttggaatgatacctgatatatacgagaaggaagtccgcctaatgattcccctctag

SEQ ID NO: 28193 - DNA, 147 bp, synthetic construct
  source 1..147: mol_type = other DNA; note = Synthetic coding sequence
atgagcttcgacaacaactaccacgggggtcagggttacgctaagggcggattaggctgctcatacggatgcggccttagcggctatggctatgcgtgctattgcccctggtgctacgagcgatcctggttctccgggtgcttttag

SEQ ID NO: 28194 - DNA, 192 bp, synthetic construct
  source 1..192: mol_type = other DNA; note = Synthetic coding sequence
atgagctattctggatcatattacggtggcctggggtatgggtgcggaggattcggaggacttggttacggctactcctgtggttgtgggtccttcagaagactgggttacggctgcgggtacgggggttatcgctacagctgctgccatccatcatgctatggcggatattggtcttccgggttttattag

SEQ ID NO: 28195 - DNA, 189 bp, synthetic construct
  source 1..189: mol_type = other DNA; note = Synthetic coding sequence
atgtgtggaagctattatggtaactactacggagaccatggctacgggtgttgtggctacgaggggctcggatatggttacgggtccctcaggtgtggatattctagctgctgtggctacggccatggatacggctctaggtttttctgtggatgcggatacgggtgtggatcgggctattactactag

SEQ ID NO: 28196 - DNA, 4227 bp, synthetic construct
  source 1..4227: mol_type = other DNA; note = Synthetic coding sequence
atgtggtcccttaccgcctccgaaggggaaagcacaactgcgcacttttttctcggcgcaggcgatgaggggctcggaacgagggggatcggcatgcgcccagaggaatctgactcggagctgctcgaagatgaagaggacgaggtaccgcctgagcctcagataattgttggaatatgcgccatgacaaagaaatccaagtcaaagccgatgactcagatcttagagagactctgtcgcttcgactatcttacagttgtaatcctcggagaagacgtgatcttgaacgaacctgtcgagaattggccttcctgccattgtctcatttcttttcacagtaagggcttcccgttggataaagctgtcgcctacagtaaactgcgaaatccttttttgatcaacgacctggccatgcagtattatatccaggaccgcagagaagtttatcgtatcttacaagaggagggcatcgacctccctcggtatgccgtgttgaaccgcgacccagctagacccgaagagtgtaacctgatcgaaggcgaagaccaggtcgaggtgaatggggctgtgtttccaaagcccttcgtcgagaagcccgtgtcagctgaagaccataatgtctatatctactatccaagctcagctgggggaggctcccagagactgtttcggaagattggatccagatcaagcgtatatagtccagaatcatcagttaggaaaaccggaagttacatctatgaggagtttatgcctacagacggaactgacgtgaaggtgtacaccgtcggccctgactatgctcatgctgaagcgaggaagtcccctgctctggacggaaaggtggagcgcgatagtgagggcaaggagataagataccccgttatgttaactgcaatggaaaaacttgtcgcacgcaaagtgtgcgtagccttcaaacagacagtctgcggattcgacctgctccgtgctaacggtcactccttcgtgtgtgatgttaatggattctcctttgttaaaaacagcatgaagtactatgacgactgcgcgaaaatactcgggaatacaatcatgagggaactcgctccccaatttcagattccttggtctatccccactgaagccgaagatatccccattgtgccaacgacatctggtaccatgatggaactacgctgcgtaattgctataattcgccacggtgaccgcactcctaaacagaagatgaagatggaggttaaacatccgagattcttcgcactgtttgagaaacatggcggatataaaacaggcaagctgaaactgaaacgaccagaacaactccaggaggttttggatataacccgcctgcttcttgccgaactagaaaaggagcctggcggagaaatcgaagaaaagaccggcaagctcgagcaattgaaaagcgtgctggagatgtacgggcatttctccggaataaaccggaaggtgcagctcacctattatcctcacggtgtcaaggcctcaaatgaaggccaagacccacagagagagactttggccccttcactgctgctcgttctgaaatggggtggtgaactgaccccagctggccgagtgcaagctgaggaactgggccgagcatttaggtgtatgtatcccggagggcagggagactatgcaggatttcccggttgcggactcctgcggctgcatagcacattccggcacgatctcaagatttacgcgtcagatgaaggcagggttcagatgacagccgcagcctttgccaagggtttgctggctctggaaggggaattgacgccaattttggtccaaatggtgaagagcgcaaacatgaacggccttctggatagcgacggggatagcttgtcctcatgtcagcatcgggtgaaagcaagattgcatcatattttgcagcaggatgccccttttgggcctgaagattacgatcagctcgcccctactcggtccacttctctgctgaacagcatgacaatcatccagaatccagttaaggtttgcgaccaggtgtttgcactaattgagaatctgacccaccagatcagagaaaggatgcaggacccccgatctgtcgacctgcagctgtaccatagtgagaccctagagctgatgcttcagcgctggtctaagctggaaagggatttccggcagaaatccggaagatacgatatttctaaaatccccgatatctacgactgtgtcaagtatgatgtgcagcacaatgggagtttaggactccagggcacagctgagctgttacggttgtcaaaggccctggccgacgtcgttatcccacaggagtacggcattagtcgcgaggaaaaattagagatcgcggtggggttctgcctccccctgctacggaaaattctgttggatctgcaacggacacatgaagacgagtcagtcaacaaactccatcctctgtactctcggggagtgctctctccgggtaggcacgtgcggacccgcctttactttaccagtgaatcccacgtccattccctcctaagtgtctttagatacggaggcctgctggacgaaacacaggacgcacagtggcagcgggcactcgattacctttcagccatctcggaactgaattacatgacacagattgttatcatgctctacgaagacaatactcaggatccactgagtgaggagaggtttcatgtcgaactccattttagcccgggagtaaaaggtgtcgaggaagaaggcagtgcccctgccggttgcggattcaggccagcgtccagcgagaacgaggaaatgaagacaaaccagggatctatggagaacctctgccccggtaaagctagtgacgaacctgacagagccctccagacatctccgcagccacccgagggcccaggtttgcccagaagaagcccgctgatcaggaataggaaagccggatccatggaagttctgtcggagacatcatcttctaggcccggagggtatcgcctgttctcctcttccaggcccccaaccgaaatgaaacaatccgggctggggagccaatgcaccggcctcttttccacaactgtcttggggggatcatctagcgcgccaaacctgcaggattacgcgcgaagtcacgggaagaaactgccaccagccagccttaaacaccgcgacgggtttgagggctgttcaatggtcccaactatttatcctctggagacacttcataatgctctgagtctgcgtcaggtgagcgagttccttagcagagtctgccagcggcacaccgacgcccaggcccaggcgtctgcagctttgttcgactccatgcatagcagtcaagcttcagacaatccttttagcccaccacggaccctgcacagccctcctttacagttgcaacagcgcagtgagaagcccccatggtactctagcggtcctagcagtaccgtcagcagtgcaggtccatctagccccaccaccgtcgacggcaattcccagtttgggttctcagatcagccctctttgaactctcatgtggctgaggaacatcagggcctgggcctgcttcaggagacgcccggtagcggagcccaggagctctcaatcgagggggaacaggagttattcgagcccaaccagtcgccccaggtccccccaatggagacctcacagccctacgaggaagtgtcccaaccgtgccaggaagtacccgacatcagtcaaccatgccaggacatctcagaggcactgagccagccatgccaaaaggtgccagacatcagccagcagtgtcaggagaaccacgacaacgggaaccacacatgccaagaggtgccccatatctcccagccatgtcaaaaatcttctcagctgtgtcagaaggtttctgaagaagtgtgccagctgtgccttgagaactcggaagaggtgtcccaaccctgccagggggtctcagtagaggtcggaaagttggtgcacaagtttcacgtcggtgtcggctcattagtgcaagagactctcgtcgaggtgggatctccagcagaagaaatcccagaagaggtgatacagccctaccaggaattttcagttgaggtgggacggcttgcccaggagactagcgcaatcaaccttctgtcccaggggatacctgaaatcgataaaccttcccaagagttcccagaagaaatagatctgcaagcgcaggaggtgcccgaagaaattaactag

SEQ ID NO: 28197 - DNA, 705 bp, synthetic construct
  source 1..705: mol_type = other DNA; note = Synthetic coding sequence
atggagggcgcttcccgcaaccttgcttccactccacgggtgcacgccaaggtcatgatgtacagaaaggaacagtacttggacgtgctccacgccctgaaagtggtgagattcgtgtccgacgccactccccaggcggaagtttacctgagaatgtaccagctggagtccgggaagctgcctcgttctccttccttccccctcgagcctgacgacgaggtgttcctggccatcgcgaaggcgatggaggagatggttgaagattccgtggattgttactggatcacccgcaggtttgtcaaccagcttaacaccaagtaccgcgactccctgccacagttaccgaaggctttcgaacagtacctgaacctcgaggatgggagactccttacccatcttcgcatgtgttctgcagctccaaaattaccctatgatctgtggttcaaacgctgctttgccggttgcttacccgagtcatcactccaaagagtctgggacaaagtggtgtctggcagttgtaaaattttggttttcgtggctgttgagatcctactgacttttaagataaaggtgatggcactgaatagcgcagaaaagatcacgaaattcttggagaacattccccaagactctagcgatgccatagtgtcaaaggccattgatctctggcacaaacactgtggcactccagtccattcaagctag

SEQ ID NO: 28198 - DNA, 537 bp, synthetic construct
  source 1..537: mol_type = other DNA; note = Synthetic coding sequence
atgaccacactgcgcgctttcacgtgcgacgacctatttagatttaacaatattaatctcgatcccttaaccgagacatacggcattccattttatctgcaatatcttgcccattggcctgaatacttcatcgtcgcagaggcacccggtggggagctcatggggtacattatgggtaaggccgagggatctgtggctagagaggaatggcatggtcacgtaaccgctctatcagtggcccctgaatttcggcgactcggcctagctgctaagctgatggaactgctagaagagatcagtgagaggaaaggtgggttcttcgttgatctctttgttagggtgagcaatcaggtcgccgttaacatgtacaagcagctaggatactccgtctaccgtacagtcatcgagtactatagcgcctccaacggggaaccagacgaggacgcctatgatatgaggaaggccctctccagagataccgaaaagaaatcgatcatcccccttccacatcccgtgcggcctgaggatatcgagtag

SEQ ID NO: 28199 - DNA, 2373 bp, synthetic construct
  source 1..2373: mol_type = other DNA; note = Synthetic coding sequence
atgggaacgaggaaaaaggttcatgcatttgtgagggtgaagccaactgatgattttgcccatgaaatgattagatacggagatgataaaagatccattgacatccatctgaagaaggatattaggcgcggagtcgtgaacaatcagcagacggactggagctttaaattagacggtgttctgcatgacgccagccaagatctcgtgtacgagaccgtggctaaggacgttgtgtctcaagcgttggatggttacaacggaaccataatgtgttacggtcaaactggtgctggaaagacctatacaatgatgggcgcaacggagaattacaagcatcggggaattttgcctcgggctctccagcaggtgtttagaatgattgaggagagaccaacccacgcaattacggtgagagtgagttatctggagatctacaatgagagcttgttcgatttacttagcactctgccttacgttggtcctagtgtgaccccgatgaccatcgttgaaaatccacagggagttttcataaagggattatcagttcatttaaccagtcaggaagaagacgcattctccctgttattcgagggtgagaccaaccggattatcgcctcgcacacaatgaataagaatagcagccgatcacactgtatattcaccatatacttggaggcacattcgaggactctatctgaagagaagtatattacctctaagatcaacctcgtggatctggctggatcagagcggctcggcaagtccggctccgagggacaggtcctcaaagaggcgacctacatcaacaagtccctgagctttctggaacaggcgattatcgcattaggagaccagaaaagggatcatataccattcagacagtgcaagctaacacatgctttaaaggacagcctgggcggaaattgtaacatggtactggtaaccaacatttacggagaggctgcacagctcgaagagactctgtcttctttgaggttcgcctcaagaatgaaattggtgaccaccgaaccagctatcaacgaaaaatacgacgccgagcgcatggtgaagaaccttgaaaaggaactggctctcctcaaacaagaactggccatccatgattctcttaccaacagaacattcgtgacttacgatccaatggacgaaatccagatagctgagatcaactcgcaggtgcgaaggtatcttgaaggaacacttgacgaaatcgacattatttctctgaggcagattaaagaggtcttcaatcagtttagggtggtgctgagccagcaggagcaggaagttgagagcactctcaggcgcaaatatacactcattgatcgtaacgactttgcagctattagcgcaattcagaaggctggtctggtcgacgtggacggtcacctggtgggcgagcccgagggtcagaatttcgggcttggcgtggccccattcagcaccaagcctggaaagaaggccaagagcaaaaaaacgtttaaagagcctctgagctcactagcccgtaaggagggcgcaagtagcccagtgaacggaaaagatttagactatgtctccaccagcaaaactcagctggtgccttctagcaaggacggcgatgttaaagacatgctgtctcgtgaccgcgagaccagttcaatcgagccattgcccagcgatagtccaaaagaggagctccgcccaatccgcccagataccccccctagcaaacccgtggcctttgaggagtttaagaatgaacaaggttcagaaattaataggatcttcaaagagaacaagagcatactgaatgaacgccgtaagcgtgccagcgagactactcagcatataaatgcaatcaaacgagaaattgatgtgaccaaagaagccctgaacttccagaagagcctgagagagaaacaaggcaagtacgaaaacaaagggctgatgatcattgatgaagaagaattcctccttatcttaaagctgaaggacctgaagaagcaatatcggagcgagtatcaagacctcagagacctgcgcgcagagatccagtactgccagcaccttgtggaccagtgtagacaccgcttgctcatggagttcgacatttggtataacgagagcttcgttatcccagaggacatgcagatggcactgaagcccggaggatccatcagaccaggcatggtacccgtaaaccgtatcgtctctctcggggaagacgatcaggacaaatttagccagctgcaacaaagagtgttgccagagggtccagactcaatctcattctataacgctaaggtcaagattgagcagaagcacaattaccttaagaccatgatgggcctgcagcaggcacatcgaaagtag

SEQ ID NO: 28200 - DNA, 3588 bp, synthetic construct
  source 1..3588: mol_type = other DNA; note = Synthetic coding sequence
atgtggtccctgaccgccagtgaaggggagtcaactaccgctcacttctttctgggagcgggagacgagggtctggggacccggggtatagggatgcggcctgaagaaagtgactcggaacttctggaagacgaggaggacgaggtgccacctgagccacagatcatcgtgggaatttgtgctatgacgaagaagtcaaaaagtaagccaatgacgcagatcctagagcggttgtgtaggttcgactacctgaccgtggtaattcttggcgaagatgttatccttaacgagcccgttgagaactggccaagctgtcactgcctgatcagcttccacagcaaaggctttccattagacaaggctgtggcctactcaaaactgagaaatccctttctgataaatgacctggctatgcagtactacatacagggtgaccgccgtgaggtttaccggatattgcaagaggaaggcattgacctgcctcggtacgccgtgctgaatcgagatcccgcacgtccagaagaatgtaacctcatcgaaggggaagatcaggtggaggtgaatggagcggtattcccaaagccctttgtggaaaagcctgtcagcgccgaagaccataatgtgtacatttactatccctctagcgccggtggtggctcacagcgtctgtttcgaaagataggctcacgaagttcggtgtattcaccagaaagctccgtgagaaagaccggaagctacatttacgaggagttcatgccaactgacgggacagatgtgaaggtctacaccgtgggccctgactacgcccacgccgaggctcggaagtcgcctgcactcgacggaaaggttgagcgagatagtgaagggaaggaaatcagatatcccgtgatgctcactgccatggaaaaacttgtggccaggaaggtgtgcgtcgcattcaaacaaaccgtctgtggctttgaccttttgagggctaacggccattccttcgtatgtgacgtcaacggattctcttttgtgaaaaactccatgaaatattatgacgattgcgccaagattctcggcaacactattatgcgggagctggctccacaatttcaaattccttggtccatccccaccgaggcagaggacatccctattgtgcccacaacatctggaacaatgatggagcttagatgtgttatagcgatcatccgtcatggtgaccggaccccaaaacaaaaaatgaaaatggaagttaaacatcccagattcttcgccctttttgaaaagcacggcggttacaaaaccggtaaattaaaactgaaacggcctgaacagttgcaggaagtgctggacatcaccaggctgctgctggccgagctcgaaaaggagccaggtggagaaatcgaggagaagacagggaaattggaacagcttaaatctgtgctggaaatgtatggccacttttctggcatcaatcgcaaagtccagctcacctactacccacacggcgttaaggccagcaatgagggccaggatcctcagagagagacacttgcaccatcactactcctggtcttaaagtggggtggcgaactgacgcctgctgggagagtgcaggcggaagaactcggacgggctttccgatgtatgtatccaggaggccaaggagattatgccggattcccgggatgcggattactgcgcctccactcaaccttccgtcacgaccttaaaatttacgcaagcgatgaagggagagtgcaaatgaccgcagccgcatttgctaagggcctcctggccctggagggggaattgacacctatcctagtgcagatggtgaaaagcgcaaacatgaacgggctgcttgacagcgacggcgacagcttatcaagttgccagcaccgggtaaaggccaggttgcatcatatccttcagcaggatgccccattcgggccagaggactatgatcagctggccccaacacgctctacctcactactgaattctatgacaattatacagaacccagtcaaagtctgcgaccaggtgttcgccctgattgaaaacctgactcaccagattagagagaggatgcaggaccctagatctgtggatctgcagctgtaccattctgagacactggagctgatgcttcagaggtggagcaaactggagagagacttccgacagaaatcaggccgatatgatatcagcaagatccctgatatctatgactgcgtgaaatatgacgtgcagcacaacggcagcttgggattgcagggcacagccgaactgctcaggctgtccaaggctctagccgacgtcgtaataccacaggaatacggcatctcacgagaagagaagttagagattgcagtgggcttttgcctcccattgctacggaagattctgctcgaccttcagaggacccacgaagatgagtacagccggggagtcctctcccccggacgacatgtgcgcacgcgtctatactttaccagtgaatcccacgtgcactccctgttgtctgtctttcgctatgggggtctgttggatgaaacccaagatgccgaccgggcactgcagacctctcctcaaccccctgagggacctgggttgcctcggaggagcccattaatacgcaacagaaaggctggcagcatggaagtgttgagcgaaacgtcgtcatcccgacccggagggtatcggctcttttcctccagccgcccaccaacggagatgaaacaatcgggcctgggcagtcagtgcactggcctgttcagcactacggtgctagggggtagttcgagcgcacccaacctgcaggattatgcgcgttcgcatggcaagaagcttccgccagcctccctcaagcaccgggatgaacttttgttcgtgcccgctgtgaagagattctcggtgtcattcgcgaaacacccgacgaatggctttgaaggctgctcaatggttcctacaatttatccacttgaaaccttgcacaacgccctcagtctgcggcaggtgccccctatggaaacctcccagccctatgaggaggtgagtcagccatgtcaggaagtgcccgacatctctcagccttgtcaggatatctcagaggctctttctcagccgtgccagaaggtccctgatatttcacagcagtgtcaggaaaatcacgataatggtaaccatacctgtcaggaagtgccacacatttctcagccctgtcaaaaaagctcacaactgtgccagaaagtgagtgaggaagtctgccagctctgcctggagaactcagaagaagtttcccagccgtgtcagggagtcagcgtggaggtggggaaactggtacataaatttcacgtaggcgttgggagcctcgtgcaagagaccctggtagaagtgggaagtccagccgaagagatccccgaggaagttatccagccttatcaggagttttctgtcgaggttgggcgattggcacaagagacaagtgctatcaatcttctgtcccaaggtatacccgagatcgataagccaagccaggagtttccagaagaaatcgatctccaggctcaggaggtgccagaagaaattaactag

SEQ ID NO: 28201 - DNA, 240 bp, synthetic construct
  source 1..240: mol_type = other DNA; note = Synthetic coding sequence
atgtgctgtaactactacgggaatagctgcggatacgggagtggatgtgggtgcgggtatgggagtggtagcggttgcgggtgtggctatgggactggatacgggtgtggatatggttgtggattcggatcccattacggctgcggctatggaacaggttatgggtgtggctatgggtcaggaagcggttattgtgggtatcgtccattttgctttagacgctgttacagtagttgctag

SEQ ID NO: 28202 - DNA, 1767 bp, synthetic construct
  source 1..1767: mol_type = other DNA; note = Synthetic coding sequence
atgaagctcgagtttaccgagaaaaactacaattccttcgttttacagaacctcaaccgccagagaaaacggaaggagtactgggatatggcactgagtgtggataatcacgtctttttcgcccataggaacgtgctggccgcagtaagccccctggtacgatccttgatctcctctaatgacatgaagactgctgacgagttgttcataactatagacacgtcttatctgagccccgtgaccgttgatcaactgctagattacttttattccgggaaagtcgtgatctctgagcagaatgtcgaagagctgctgcgaggcgcacagtactttaacactcccaggctccgcgtccactgcaatgatttcctgattaaaagcatttgtagggccaattgtttgcgctatctctttctcgcagaactcttcgaactaaaggaagtctcagatgtggcctatagcggaatccgcgacaactttcattattgggctagtcctgagggatcaatgcatttcatgcggtgtcccccagtgatatttggccgactcctgagggatgagaatctgcacgtgcttaatgaggatcaagccctctccgcactgatcaactgggtgtactttcgaaaagaggacagagagaagtactttaaaaaattctttaattacataaacttgaacgctgtaagcaataagacgctggtgttcgcttcaaacaagctggtgggtatggagaatacctcatctcatacgacgcttatcgaatctgttctcatggatcgcaagcaggagcgaccgtgtagcctgctggtgtaccaaagaaaaggcgcactcctagattccgtggtgattctgggaggtcagaaggcacacggccaattcaatgacggagtcttcgcttatatcatccaagagaatctgtggatgaagctcagtgatatgccctaccgcgctgctgctctatccgccactagcgccggacggtacatttacatcagcggagggacaaccgagcagattagcgggcttaagaccgcgtggagatacgatatggatgacaactcatggactaagctgcctgacctcccgatcggtttggtgttccatacgatggtgacctgcggtggaacagtctacagtgtgggtggctctatagccccacggcgatatgtctcaaacatatacaggtacgacgaacgcaaggaagtctggtgtctggccggaaagatgtccattcctatggacggaaccgccgtgatcacaaaaggggaccgccacctgtatattgtgacaggacgctgtttagtgaaagggtatatcagtcgggtcggagtggttgattgcttcgacacaagcacgggcgacgttgtacaatgtattacttttcctattgaattcaaccataggcccctgctgagttttcagcaggacaatattttatgtgtgcacagtcatagacaaagtgtcgagataaatctgcagaaagtgaaagcttcaaagaccacaacgagcgtccctgtgctgccaaactcttgccctcttgatgttagccacgccatctgctctatcggcgattctaaggtgttcgtctgtggcggagtgacgacagcgagcgatgtccagactaaggactatacgattaacccaaacgccttcctcttggaccagaaaacaggcaaatggaagactttagctccgccacccgaggccttggactgccctgcctgctgtctggcgaagctgccttgcaaaatcctgcaaaggatctag

SEQ ID NO: 28203 - DNA, 2208 bp, synthetic construct
  source 1..2208: mol_type = other DNA; note = Synthetic coding sequence
atgattccccctcaggaagctagcgccaggcgccgtgagatcgaagacaaattaaagcaggaggaggagaccctgtctttcatcagggattccctggaaaaatctgatcaactgacaaagaacatggtctcaatccttagcagctttgaaagcaggctaatgaaactggaaaattcaatcattcccgtccataagcagaccgagaaccttcagaggttgcaggaaaacgttgagaagacactttcgtgccttgaccatgtgatcagttattaccacgttgctagcgataccgaaaaaattattcgcgagggtccgaccggtagactggaggagtatttgggctctatggccaagatccagaaggccgtggaatattttcaggataattcgcccgactcacctgaactcaacaaagtgaagctgctgtttgagcgcggaaaggaagcgctggagtctgagtttcggagcctgatgacacgtcacagcaaggtggtttccccagtgttgattctggacctaatcagcggagacgatgacctggaggcacaggaggatgtaaccttggagcaccttcctgagagcgtcctgcaagacgtcatcagaatatctaggtggcttgtggagtacggtcgaaaccaagattttatgaatgtttattaccaaatcaggtctagccagttggatcgcagcattaaagggttgaaagaacactttcacaaatcgtcttcctcatcaggggtgccatactcgccggctattcccaataagcgcaaagatacccctaccaagaagcccgttaaacgtcctggaacgatcagaaaagcgcagaatttactgaagcaatactcccagcacggcctggatggtaagaagggtggctcaaacctgattcccctcgaggggctgctcccctgcacccctagaggagggctgcccggaccgtggatcaatgccgcatgtgtgtgcgcagctgatatctctcccggacacgagcatgattttagggtaaaacacttatcagaagctctcaacgataagcacggcccacttgctggacgcgatgatatgctcgatgtcgagacggacgcatatatccactgtgtgtcggctttcgtaaagttagcacagagtgaatatcagcttctggccgacatcatccctgagcaccaccagaagaagacctttgacagtctaatccaggacgcgctcgacgggctgatgcttgaaggagaaaacattgtgagcgccgctcgaaaagccatagttcgacacgacttttcaaccgttctcacagtgttccccatcttgagacacctgaagcaaaccaagcctgagtttgatcaagtcttgcagggcaccgcagcctctaccaaaaataaattacctggcttgatcacaagcatggagacaataggtgccaaggccctggaggatttcgccgacaatataaagaatgatccggacaaggagtacaacatgcccaaggacggaactgtgcacgagctgacctctaacgccatcctgtttttacagcaactgttggattttcaagagactgccggagcgatgctggcctcacaggagacatcaagttcggctacctcgtattcaagcgagttctcgaagcgtttactatccacctacatatgcaaagtgctgggtaacctgcagctgaacctcctaagcaagtccaaggtgtacgaggatccagctctgtctgcaatctttcttcacaacaactataactacatcctgaaatcactggaaaagagcgagctaatccagctggttgctgtgactcagaagacagcggagagaagttaccgagagcatatcgagcagcagatccagacgtaccagaggagttggctgaaagttaccgattatattgctgagaagaatctgcccgtgtttcagcccggtgtcaagttgcgcgataaagaacggcagataatcaaagaacggtttaagggattcaatgacggtctggaggaactgtgtaagatccaaaaggcttgggccatcccggatacggaacagagagaccgtattagacaggcacagaaaacgattgtgaaggagacctacggagcctttctgcaaaagtttggcagtgtgccattcacaaagaacccagaaaagtatattaagtatggtgttgaacaggtcggtgatatgattgacagacttttcgacacttctgcctag

SEQ ID NO: 28204 - DNA, 378 bp, synthetic construct
  source 1..378: mol_type = other DNA; note = Synthetic coding sequence
atggccggtgccggacctactatgcttctgagagaagagaacggctgctgctcaaggaggcagagcagcagtagcgccggagattctgacggcgaaagagaggattctgcggcagagagagctcgtcagcagctcgaggccctgctgaacaagaccatgcgcatacgtatgacagacggacgaaccctggtaggatgcttcttatgtactgacagggactgtaatgtgatcctgggttcagcccaagagttcctgaagccaagcgactctttctccgcaggagaaccccgtgttcttggcctggccatggttcccggacatcatatagtctctatagaagtgcaacgggagtcacttactggtcccccatacctgtag

SEQ ID NO: 28205 - DNA, 477 bp, synthetic construct
  source 1..477: mol_type = other DNA; note = Synthetic coding sequence
atgcttctgttggattgtaatccagaggtcgatgggttgaagcaccttctggaaaccggagccagtgttaatgcacccccagacccatgtaagcagtctccggtacacctggcggctggcagcgggctcgcttgtttcctgctttggcagctccaaacgggcgctgacttgaatcagcaggacgtcttgggtgaagccccactgcacaaggctgcaaaggttggctccctcgagtgcctttctctcctggtcgcttcggacgcccaaatcgatctgtgcaataagaatgggcaaacagccgaggacttagcttggtcgtgcggcttcccagactgtgctaaattcctgaccactataaagtgtatgcagactatcaaagcgagcgaacatcctgatcgcaatgattgcgttgccgtgctcagacagaagcgttctttgggctctgtagagaacaccagcggtaaacgcaagtgttag

SEQ ID NO: 28206 - DNA, 8711 bp, synthetic construct
  source 1..8711: mol_type = other DNA; note = Synthetic coding sequence
atgcgcggtcgacgaggcagacctcccaagcagccagccgctcccgctgctgaaagatgtgcacctgcacctccaccaccaccgccaccgccaacctctggacctatcggtggcctaaggtcccggcacaggggctcaagtagaggaaggtgggcagcagcccaggccgaggtggcccctaagacacgattatcaagtccccgaggcggttctagcagccggcgtaagccacctcccccaccccctgctccaccttctacatctgccccaggaagaggcggacgtggcggaggcggtggacgtacggggggtggcggtgggggtggacatctagcaagaactaccgctgccagaagggccgttaacaaggttgtgtacgatgatcatgagtccgaggaagaagaggaggaagaggacatggtgtccgaagaagaagaggaagaagacggagatgccgaagagactcaggattcggaggacgatgaggaagatgaaatggaagaggacgatgacgattctgactaccccgaggagatggaggacgacgacgacgacgcatcctattgcaccgaatccagctttcgatctcattccacttactcgagcacccccggaagaagaaaaccaagggtacatcgacccagatcccccatactggaggagaaggatataccccctcttgagttcccgaaatccagcgaagatctgatggtcccgaacgagcacattatgaacgtgattgccatttatgaagtgctgcgcaacttcggaactgtactgcgcctgtccccattcaggttcgaagacttttgcgctgcgctcgtttcccaggaacagtgcacgttaatggcagaaatgcatgttgtgttgctaaaggccgtcctgcgcgaagaggatacatccaacaccacgtttggtcctgcagatctaaaggatagcgtgaactccaccctgtattttattgacgggatgacttggccggaggtattaagagtgtactgtgagagcgacaaggagtaccaccacgtactgccctaccaggaggctgaggactacccttacggacccgttgagaataaaattaaagtactgcagttcctcgtggaccagttcctgactactaacattgcaagagaggagctgatgagtgaaggggttatccagtatgatgatcattgtagagtctgtcataagctgggcgatctgctatgctgcgagacatgtagcgccgtctaccacctggagtgcgtcaaaccgcctctggaagaagtccccgaggatgagtggcagtgcgaagtttgtgtcgcccacaaggtgcctggagtgaccgactgtgtggccgagatacagaaaaataaaccctacatcagacatgaacccatcggttatgacagaagtcggaggaagtattggtttctgaacagacgcctgatcatagaggaggatacagagaacgagaacgaaaagaaaatctggtattactctactaaagttcagcttgctgaactgattgactgcctggataaagactattgggaagccgagctatgcaagatactggaggagatgcgggaggaaattcacaggcatatggacattacagaagacttgacgaataaagctcgagggagtaacaagtcatttctggctgctgcaaatgaggaaatattagagagcattcgcgctaagaagggggacattgataacgtcaagtctcctgaagaaaccgaaaaagataagaacgaaaccgagaacgatagcaaggacgccgagaaaaacagagaagaattcgaggatcagtccctggaaaaggactcagacgacaagacacctgatgatgatcctgagcagggtaagtccgaggagccaaccgaagtcggggacaaggggaattcagtgtcagcaaacctgggggataacacaacaaacgcaacctctgaggagacttcaccatccgagggaaggtccccagtgggctgcctgagcgagacccctgattcatcaaatatggctgagaaaaaagtcgctagtgagctgccccaggatgtgccggaggagcccaataagacctgcgaatctagcaatacaagtgcaactacaactagcatacagcccaacctcgaaaattcaaacagcagctctgagctgaactccagccaaagcgaaagtgctaaggctgctgacgatccagaaaacggggaacgcgagtcacacacacccgttagcatccaggaggaaattgtcggagactttaagagcgagaagtcaaatggagagctgtccgagtccccgggtgctgggaagggtgcctccgggtctaccaggattatcacccggctgcgcaacccagactccaagctgtcccagttaaagagccagcaggttgccgctgccgcacatgaggccaataagctgttcaaagagggaaaagaagtgctggtggtgaactctcagggcgaaataagtaggttgtcaaccaagaaggaggtaattatgaaggggaacataaataattactttaaactgggccaggaagggaagtacagggtgtatcacaaccaatactccacaaattcattcgcactgaacaaacaccagcaccgggaagaccacgacaaacgacgccatctggcccacaagttctgcctgaccccggctggcgaattcaagtggaacggatcagttcatggatcgaaagtgctgacaatctccactctccgactcaccataacccagctggagaacaatatcccttcatctttcctccatcccaactgggcatctcatcgcgctaactggataaaggcagtacagatgtgctccaagccaagagagtttgcattggccctggctatactggagtgcgccgttaaacccgtggtaatgctccccatctggcgggagtctctgggacacactagactccatcgtatgacctcaattgagcgggaagaaaaggaaaaagttaagaaaaaggagaaaaaacaggaggaggaggagactatgcagcaggcgacctgggtgaagtataccttcccagtcaaacatcaggtgtggaaacagaaaggcgaggagtacagggtcactggctacggcggttggtcctggatcagcaaaacacatgtctacagattcgtgcctaagctccccggtaacacaaatgtaaactatcgcaagtctctggaaggaactaagaacaatatggacgaaaacatggatgagtccgacaaacgaaaatgctccagaagcccgaagaagatcaagatcgaacctgattccgaaaaggatgaggttaaggggtcagatgcagcgaagggggctgaccaaaacgaaatggacatcagtaagattacagagaagaaggaccaagacgtaaaggaactgctcgactctgactccgacaagccctgtaaggaagagccgatggaagttgacgatgacatgaaaacagagagccacgtgaactgccaggagtccagccaggtggatgtggttaacgtgtccgagggtttccacctgcggaccagttataagaagaaaaccaagtcgtcaaagctggatgggctcctggaaaggaggatcaaacagttcaccctcgaggagaaacagcgactcgaaaaaattaagttggaggggggaatcaaaggtataggaaaaactagcaccaacagttccaaaaatctttcagagtcgcctgtgatcacaaaggccaaagagggttgccagtctgatagcatgcgtcaagagcagtcccctaacgccaacaatgatcaacccgaggatctgattcagggttgtagcgagtcggactcatccgtgctacggatgtcagacccaagtcacaccacaaacaagctctacccaaaagatagagtgcttgacgatgtgtccatccgctcaccggaaactaaatgccctaaacagaatagtattgaaaatgatatagaggagaaagtctcagacttagcgtcgcgcggtcaagagccttcaaagtcaaagaccaagggcaatgatttttttattgatgattcaaagctcgcaagtgctgatgatattggtactttgatttgcaaaaacaagaaacccctgatacaggaggaatccgatacgatcgtgtcatcctccaagagcgccctgcattcatctgtgcccaagtccacaaatgaccgggacgctactcctctttcccgggcaatggactttgaaggcaagttaggctgtgatagcgaatcaaacagcaccctcgagaacagcagcgacactgtctctatccaagactcctctgaggaggatatgatagttcagaacagtaatgaaagcatctcagagcagttccgtacgcgcgagcaggacgtggaggtgctggaaccacttaagtgtgagctggtgtctggtgaatctacagggaactgtgaggatcgcctgcctgtgaaaggcaccgaggccaacgggaaaaagccgtctcagcaaaaaaaactagaggaaaggccagtgaacaagtgcagtgatcaaatcaagctaaaaaacactaccgacaaaaagaacaatgagaaccgagagagtgagaagaagggacagcggacttctacattccagataaacgggaaagataataaaccaaaaatctatttaaagggtgagtgcctaaaggaaatcagcgagtcccgcgtcgtttccggcaatgtggaaccgaaggttaataacattaataaaatcattcctgaaaacgacattaaaagcctaaccgtaaaggagagcgctattcgaccattcatcaacggtgacgtcatcatggaagatttcaacgaacggaatagctccgagactaaatcacatttgctgtccagctcagatgccgaggggaattacagagatagcctcgagaccctaccatccacaaaggagtctgattcaactcagactaccacaccatcagccagttgtccggagtccaatagcgtgaaccaggtagaagatatggagattgagaccagcgaagtgaaaaaagtgacatcttcccccatcacctccgaagaagagtctaacttaagcaacgacttcatagacgagaacgggctcccgattaacaaaaatgagaacgttaacggtgagtccaaaaggaaaaccgttattaccgaagttacaaccatgacttctactgtggccactgaaagtaagaccgttattaaggtggagaagggtgataaacaaactgtggtgagttctacggaaaattgcgcgaaatccacagtgaccaccacaaccactacagtaaccaagctttcaacaccctcaactgggggttctgtcgatatcatttcagtgaaggagcagtccaaaactgtggttacaacaaccgtcacagatagcctgactaccacaggcggtacgctggtcacttccatgactgtcagtaaggagtacagcaccagagacaaggtgaaattgatgaaattctcacgaccaaaaaaaacacggtctggcactgccttgccgagctacaggaagtttgtcaccaaatcctctaagaagagtatattcgtgctcccaaacgacgatttgaagaagctggccagaaaaggcggtatccgggaagtcccctatttcaattacaacgcaaagccagctctcgacatttggccttatccctccccacggcctaccttcggaattacctggaggtatcgcttgcagaccgtaaagtctctggccggagtctctctgatgctgcgcctcttgtgggcctccctgagatgggatgatatggcggctaaggcacctccagggggaggtactacgaggacagaaaccagcgaaacagagattacgaccactgaaataataaaacgcagggacgtgggcccatacggaattcggagtgaatactgtattcggaaaattatctgtcccataggcgtaccagaaacccctaaagagacgcccacacctcagcggaagggcctgcgcagctcagccttgagacctaaacgcccagagacgccgaagcaaaccggccctgtaatcatagaaacgtgggtggccgaggaggagctcgaattgtgggaaataagagccttcgccgagcgcgtagagaaggaaaaagcccaggcagtggaacaacaggccaaaaagcgccttgagcagcagaagccaacagtgatcgccacatctaccacttcccccacaagtagcaccacatccacaatctccccagctcagaaggtaatggtcgcgccaatttctggctcagtaactactgggacaaagatggtacttacaacaaaggtgggcagtccagccaccgtgaccttccagcaaaataagaacttccaccagacttttgctacttgggttaaacagggccagtctaattcgggagttgtgcaggtccaacagaaggtgcttggtattataccgagctctaccggcacctcccagcaaaccttcacttcctttcagcccagaacagccactgtgaccataagaccgaataccagcgggagcggcggaaccacaagtaacagtcaagtgatcaccggaccgcagatacgcccagggatgaccgtgattaggaccccgctccagcagagtactcttgggaaagccatcatcaggactcccgtgatggtgcagccgggtgcaccccaacaggtcatgacccagatcatacggggtcagcctgtatcgacagccgtgtctgcaccaaacacggtgagctctacccctggccagaagtccttaacatccgcgacaagcacaagtaatattcaaagctcagccagtcagcctcccagaccccaacaaggacaggttaaactcaccatggctcagttgacccagctgacacaggggcacggagggaaccagggcttgacagtggtcattcagggtcagggtcagaccaccggccagctgcagcttatacctcagggcgtgacggtgttacctggccctggccagcagttgatgcaggccgcaatgccaaacggaaccgtacagaggttcttgttcaccccccttgcgaccacagcaacaactgccagtactacaacaacgacggtttccacaactgccgctggcactggagaacaacgtcagagcaaactgtctccgcagatgcaggttcaccaggataagactctgcccccagcacaaagctctagtgttggcccagccgaagcacagccacagactgcccagccttccgcacaaccacagcctcagacacagccccagtcgcccgctcagccagaagtgcagactcaacctgaagtgcagacacagacaaccgtgtcctcccatgttccatccgaagcccagcccacccacgcccagtcttctaagccacaggtcgcagcccagagtcagccacagtctaatgttcagggacagtccccagtgcgggttcagagcccaagtcagactcggatccgaccatcaactccatcacagttaagccccggacagcagtcacaagtgcaaactactaccagccagccaatcccgatccagccccataccagcctgcagatccctagccagggccagccccagtcacagcctcaggtggtgatgaaacacaatgcggtgattgagcatttaaagcagaaaaaatctatgaccccagcagaaagggaagagaatcagcgcatgattgtatgcaaccaggtgatgaaatacattctggacaagatagacaaagaggagaaacaggcagcaaagaaacgtaagagggaggaaagcgtggagcagaagagatctaagcagaacgccacaaaactctccgccctgttgttcaagcacaaagaacagctgagagctgagatccttaagaaacgggcactcctggacaaggaccttcaaattgaggtgcaagaagaacttaaaagagatttgaaaattaagaaggaaaaggatttaatgcagcttgcccaggctacagctgttgccgcaccttgtcccccagtcaccccagctccccctgctccgcctgccccacctccaagcccccctcctccccctgcagtccagcacacaggattgcttagcacgcctaccctgccagctgcatcacagaaaagaaagagggaggaggagaaagactcctcatccaagtctaagaaaaagaagatgatcagcaccaccagtaaggagacaaagaaggacacaaaactgtactgtatctgtaagacaccatacgacgagtctaagttctatatcggctgcgaccgatgccagaactggtaccacgggaggtgtgtaggcatccttcaaagcgaggccgagttaattgatgaatacgtgtgcccacaatgccaatccactgaggatgctatgacggtcctgactcccctgaccgagaaggattacgaaggactgaagcgggtattacgctccctgcaggcacataagatggcatggcccttcctcgaaccagttgatccaaacgatgcacccgattattacggagtgatcaaagagcctatggaccttgccacaatggaggaaagagtgcagaggcggtattacgaaaaattaacagagtttgtggcggatatgacaaagatcttcgacaactgccgctattataatccgtcagacagcccgttctatcagtgtgcggaggtgcttgaaagtttctttgtccagaagctgaagggatttaaggcctcacgctcccacaataacaaattgcagagcacagcctcata

SEQ ID NO: 28207 - DNA, 2628 bp, synthetic construct
  source 1..2628: mol_type = other DNA; note = Synthetic coding sequence
atgaacttccaggcaggcggaggccaatccccacagcagcagcagcagctggctggtggacccccacagcagttcgcccttagcaattctgccgctattagagcagagatccagcgatttgagtctgtgcaccctaatatctatgctatctacgacttgattgagcgcatcgaagatttggccttacaaaatcaaattagagagcacgtgatcagtatcgaggactcctttgtgaattctcaggaatggacactcagtagatccgtgccggagctcaaggtgggcatagtaggaaacctatcatctgggaagtcggcactggtacaccgatacttgacagggacttacgtacaggaggagagccctgaaggcggacggttcaagaaggaaatagtagtcgatggtcagagctacctgttgctcatcagagacgaaggtggtccccctgagctgcaattcgccgcttgggtggatgccgtggttttcgtgttttccttggaggacgagatctcattccaaacagtatacaactatttcctcaggctgtgttcattccggaatgccagcgaggtgccaatggtcctcgtcggcactcaagatgctatcagtgcagctaacccaagggtaatcgatgacagcagggccagaaagctctccacagacttgaaacggtgcacctattatgaaacctgcgccacctacgggctcaatgtggagagagtgttccaggatgtggcccagaaggtggtcgctttgagaaaaaaacaacagctcgccattggcccttgtaaatcacttcccaactctccctcacattctgctgtatctgctgcttccattccagctgttcatataaatcaggccaccaacgggggaggctccgccttctcagattattcttcaagcgttccaagcactccctctattagccagcgggagctacgtatcgaaacaatcgcagcttcctccacgcccacccctattaggaaacagagcaagagacggtccaacatcttcacctcgcgaaagggcgcagatctcgaccgggaaaagaaagccgcagaatgtaaggtggattcaattggttccggcagagctataccaatcaagcagggaattctgttaaagagaagcggcaaaagcttaaataaggagtggaagaaaaagtatgtgacgttgtgtgacaatggcctgctgacgtatcacccatcattgcacgactatatgcagaacattcacggtaaagaaatcgatttgcttagaacaactgttaaggttccagggaagagacttcccagagccactcccgcaactgcccctggcacatcccctagagccaatgggctttccgtcgaacgcagcaatacgcagttaggagggggaacaggcgcaccccactcggcatcctcagcttcccttcacagcgagcgacctctaagttccagcgcatgggcaggtccccgacctgaaggcttacatcaacgttcctgttccgtgtctagcgcggaccagtggtcagaagctacaacctccctccccccaggaatgcagcatccagcaagcggtcccgcagaagtgcttagctcttctcctaaactggatccaccacctagtccacattccaataggaagaaacacaggcgaaaaaagagcacgggcacgcctcggcctgatggtccttcttctgccaccgaagaggctgaggaaagttttgagttcgtcgtggtaagtcttactggacaaacttggcactttgaggcttcgacggctgaggagcgcgagctctgggtgcagtccgtacaggctcaaatcctggcgagcctgcagggctgccgatctgctaaggataaaacccggctaggaaaccagaatgccgcactggcagtgcaggccgttaggactgtacgcggaaatagtttttgtattgactgcgacgctcctaatccagattgggcatcactcaatctaggggcattgatgtgcattgaatgctcagggattcaccgccacctgggagctcaccttagcagagtccgctccctggatttagacgattggccgccagaattattggccgtcatgaccgcgatgggcaatgccctggctaattctgtctgggagggcgctctggggggttattcaaaacctggaccggacgcttgtcgggaagagaaagagagatggattcgggcaaaatatgagcagaagctgtttctcgctcccctgccctcttcggacgtcccactcggacagcagctcctcagagctgtagtcgaagacgatctccggctactggttatgctgctcgctcatgggagcaaggaggaggtaaacgagacatatggggatggagacggcagaaccgcactgcacctgagctcagccatggcaaatgttgtgttcacccagctgcttatctggtacggcgttgatgtcagatcccgagacgcacgcggactgacccccctggcatatgcgcgtcgtgcaggcagccaagaatgcgccgatatcttgatccagcatggctgtcctggcgaaggatgcggactggcccctacccccaaccgtgaacctgcgaacggtaccaatcctagtgctgagctccataggtcgccaagccttctctag

SEQ ID NO: 28208 - DNA, 1761 bp, synthetic construct
  source 1..1761: mol_type = other DNA; note = Synthetic coding sequence
atgggtggtgcattaggacttaggcagctgcccatttgcgctccggcttgccgccctagttccggacatagcccctgggccgctgcgtctcctaaccccaaccagtggagtagccgctcccgctggtgttgcttgcggagaagtgaagctcgtagatcctgccgacccgtgggtagagccgcacctggcccaacccgcgctatggccaggcctgctacctctactcgtaggagcgcctgccccccactcactcccactcctgccctgcgcatagcatggaggctgctgtcagccaccagcagaactagtcgcatggcatccgttttatcacgcggtagggtcagatgcccatggcacggggcttgctttaacatcagcacaggagatcttgaagattttcctggacttgattcattacacaaattccaggtgaagatcgaaaaggagaaggtgtacgtgagggcctctaagcaggcactgcagctacagagacgaactaaagtgatggcaaaatgcatatccccatccgccggatattccagctccactaacgtgttgatcgtgggtgccggtgctgcaggtttggtgtgcgcggagactctgcggcaggaaggctttagcgataggatcgtcctttgtacactggatcgtcatcttccgtacgaccgacctaagttgagcaagtctttagatactcagcccgagcagcttgcactgcggccaaaggagttctttagagcctacggcattgaggtgctcactgaagctcaggtggtgaccgtggacgtaagaacaaagaaagtggtgtttaaggatggctttaagctggagtacagcaagctgcttttggccccaggaagctcacctaagactctctcgtgcaagggcaaggaggttgaaaacgtattcactatccgtacccccgaagatgccaaccgggtcgtgaggttggctaggggtcggaacgtagtggtggtgggtgccggattccttggtatggaggtggctgcttacctcaccgaaaaggctcacagcgtaagcgtcgtggagctggaagaaacaccattccggaggttcctgggtgagagggttgggagagcactgatgaaaatgttcgagaataacagagtaaaattttacatgcagacagaggtgtcggagctgcgaggtcaggaggggaagctaaaggaggtggttctcaagtccagcaaggttgttcgcgcagacgtttgcgtagtcggaatcggagctgtgcctgctaccggcttcttgcgacaatcaggtatcggccttgattctagaggcttcataccggtgaataaaatgatgcagacgaacgttcccggtgtttttgctgcaggtgatgcagtcacatttcccctcgcatggagaaataacaggaaagtcaacatcccccattggcagatggcacacgcacaggggagagtggcggcacagaacatgttagcacaggaggcagagatgagcactgtgccgtacctgtggactgcaatgtttggtaaaagtttgagatatgctggctatggcgaaggctttgatgacgtgatcattcaaggcgatctggaagaacttaaattcgtggccttttacacaaaaggggacgaggtcatagccgtcgcctctatgaattatgaccccatcgtgtcgaaagttgcagaggttcttgcctccggccgtgccatacgcaaacgagaggtcgagaccggcgatatgagctggctgacaggcaaggggtcctag

SEQ ID NO: 28209 - DNA, 1521 bp, synthetic construct
  source 1..1521: mol_type = other DNA; note = Synthetic coding sequence
atgccagtgcaagctgctcagtggactgagtttctttcctgtcccatctgttataatgaattcgatgagaacgttcataagcctatctccttaggttgctcacataccgtgtgtaagacgtgcctgaacaaattgcacaggaaagcgtgccccttcgaccaaactgctattaacaccgatatcgatgtgcttcctgttaatttcgctctgctgcagctcgttggagctcaggtgcctgatcatcaaagcatcaagctcagtaatcttggagaaaataaacactacgaagtagccaagaagtgcgttgaggacttggctctctacctgaagccactgtccgggggtaagggcgtggcaagccttaatcagagtgccctgtcgcgccctatgcaaaggaaactagtgacactcgtgaactgccagctcgtggaggaggaggggcgagtgcgggctatgagagcagcccgtagtttgggagaacggactgttaccgaacttatcctgcagcatcaaaatccccagcaactgtctgctaatctgtgggccgctgtgcgagcgaggggatgtcaatttctggggcctgctatgcaagaggaagccctaaagcttgtgttactggctctcgaggacgggtccgcgttatccaggaaagtgctagtactcttcgtggtgcagagactggaacctcgcttcccgcaggcgagcaagacctctatcggtcacgtggtgcaattgttgtaccgtgcttcatgcttcaaagtcacgaagcgcgatgaggactccagcttgatgcagttaaaggaggagttccggtcttacgaggccctccgcagagagcacgatgctcagatagtgcatatagcaatggaagctggactacggatctctcctgaacagtggagttctctgctgtatggcgatctggcacacaaaagccacatgcaaagtatcatcgataagttacagagtcccgagagttttgcaaaaagtgtacaggagctcacgatcgtcctgcagagaacaggcgatcccgctaacctaaaccgattgcggccacatctcgaacttctcgccaatatagacccgaaccctgacgccgtaagtccaacctgggaacaactggagaatgccatggttgctgttaagaccgtcgtgcacgggctcgtggatttcattcagaattacagccgaaaggggcatgaaaccccccagcctcaacctaactctaagtacaaaacttcaatgtgtcgcgacctgcggcagcagggtgggtgcccacggggaactaattgcaccttcgcccacagccaggaagaactggaaaagtgcaatcccagaggcctgtaccttcattgctgccttttatcatccgtggctagtttgggaacagttcacaacgagctgtacaaacagcagcactgcgaccgggagaaaatatccgtctgtgccgtgaagcgggctgaaacctgcttctccagccaattcttctcccctcttgaagtcccccgagaagaggactag

SEQ ID NO: 28210 - DNA, 783 bp, synthetic construct
  source 1..783: mol_type = other DNA; note = Synthetic coding sequence
atgccaagagcccgatctggacgaaggagtaggggcgcaggcggtcgggaggagacttttctgcgggtcagggctaatcgacaaacacggctgaacgcccgtattggcaaaatgaaaagacgcaaacaggatgaggggcaggtctgcccactctgcaataggcccctcgccggaagcgaacaggagatgagcaggcatgtcgaacattgcctaagcaagcgtgaggggtcgtgcatggccgaggatgatgcggtggatattgagcacgagaacaataaccggtttgaagagtatgagtggtgcggacagaagcggattcgcgctacgactctgttagagggtggatttcgtggcagtggcttcatcatgtgttctggaaaggaaaacccagattctgatgcagacctggatgtggatggggacgacaccctcgagtacggaaaaccccagtatacagaggcggatgtcatcccatgcaccggtgaagagccaggggaggcgaaggaacgagaagcactcagaggtgccgtccttaacggcggacccccaagtaccagaatcaccccagaattctcaaagtgggcgtcagatgagatgccgagcaccagcaatggagaaagctctaaacaagaagcaatgcaaaaaacttgtaagaactccgacatcgaaaagatcacggaagactccgctgtcacaaccttcgaggcattgaaagcccgagttcgcgaactcgagagacagctttccagaggagatcgatataagtgcctaatttgcatgtag

SEQ ID NO: 28211 - DNA, 1461 bp, synthetic construct
  source 1..1461: mol_type = other DNA; note = Synthetic coding sequence
atggctgcggttaaaacgctgaaccctaaagctgaagtcgctagggcccaggcagcccttgctgttaacatctcggctgctcgcggtctgcaagacgtgctgcgcacaaacctgggacccaaaggaaccatgaaaatgcttgtgtccggcgcaggagatattaaactgaccaaggatgggaacgtcctgctccacgaaatgggtcttcaccctcggatcatcactgaggggttcgaggccgcaaaggagaaggcactccaatttctggaggaggtaaaggtctcaagagaaatggacagagagaccctgatagacgtggcccgaacatcattaaggacaaaagtccacgctgagctagccgatgttctgactgaggccgttgtggactctattcttgctatcaaaaaacaggacgaaccaattgatttattcatgatcgagatcatggagatgaaacacaagtctgaaacagatacaagcctcataaggggactggttctcgaccacggagctaggcatccagatatgaagaaacgtgttgaggacgcatacattctcacatgtaatgtgagtctggagtacgagaagacagaggtcaattcagggtttttttacaagagcgccgaggaacgtgagaaactcgtaaaggccgagcgcaagttcatcgaggaccgcgtgaagaaaatcatcgagttaaagcgcaaggtatgtggcgatagtgacaagggatttgtggtaatcaatcagaagggtatcgaccctttcagcctggacgctttgtcaaaggaggggatcgtagccctccgcagggctaagagaagaaacatggagcggctcaccttggcttgtggaggagtggctctgaattcattcgacgaccttagcccggactgcctggggcacgctgggctggtctacgagtacactttaggagaagagaagttcacctttattgaaaagtgcaacaatcctaggtctgtgactctcctgataaaagggccaaacaagcacacattaactcagattaaggatgctgtaagagatgggctgcgggcagtaaagaacgccattgatgacggatgcgttgtgccgggagctggcgctgttgaggtggctatggccgaggcactaatcaagcataagcccagcgtcaaaggcagggcacagctgggtgtgcaggcgtttgctgacgcactgcttatcattccaaaggtactcgctcagaattctgggtttgatctgcaggaaaccctagtgaaaatccaagctgaacattccgaatctggacaacttgtgggggttgatctcaacacaggggaacccatggtagctgctgaagtcggcgtgtgggacaattactgcgtcaagaagcagctgctgcactcttgcaccgtgattgcgacaaacatcctgctggtagatgagattatgagggccggtatgagctcactgaagggttag

SEQ ID NO: 28212 - DNA, 1407 bp, synthetic construct
  source 1..1407: mol_type = other DNA; note = Synthetic coding sequence
atgtcatttagactttctggaggttcacgcaggatatgctccaggacaggcagcggtcggttgtcgggaggaggcaccggctttgtcgctggtaatgtctgcgtggggtctggtgcccgaagctcattcagctgtaccttggaaggcatatccagcggtggaagcttctgcaactcaggaggcggactgggctcaggggcttgcgcaggcttcctcggaaatgaacattcactgctgtccgggaacgaaaaggtcacaatgcaaaatctgaacgaccggctggccagctatttagatcacgtgcacgctttagaagaggctaatgctgatttggaacagaaaattaaagggtggtacgagaaatgcgagccaggatcttcaagggagcacgatcacgactattctcggtactttagcgtgatcgaggacttgaaaagacagattatctctgctacgatctgcaatgcgtccattgtgctccagaatgacaacgccagattaactgctgacgacttccggttgaagtacgagaacgaactggcccttcaccattctgtggaagccgacaccagtggcttgcgccgtgtgttagacgaactgacgctctgtacgaccgacttggaaatccaatgcgagaccttgtccgaggaactgacctacctgaaaaagagccacgaggaggaaatggaggttctgcagtataccgccggaggcaacgtcaacgtggaaatgaacgccacacccggagtggatttgaccgtccttttaaataacatgagagccgaatatgaggatctggcagagcagaaccggaaagatgccgaagcctggtttaacgaaaggagcgccaccctgcaacaacagatctcagaccatgaaggggcagccacagccgctcgaaatgagctgaccgagctaaagaggaatctgcagacattggagatcgagctacaatctctcatggccgtaaaacacagctatgagtgcagcctggctgagacagagggcaactactgtaaccagcttcagcagatccaggatcaaatcggcgtcatggaagaacagctgcagcagatcagaacagagaccgagggacagaaactggagtacgagcagctgctggatgttaaaatctttttggagaaagagatcgatatctactgtaacctgctcgatggcgaggaacgtaagtccaagagcacttgttataaaagtaagggctatagaccagtcaactcaggaaatcaggcaaaagactcgactgaggagaccattgtgaaaacagtagtcgaagagctggaccagatcggtaacttgctctctctgcgagtgcactcggttgaggagaagtcatcaaagatttcaaacattacagttgaacagcgggtgccctctaaagctccatag

SEQ ID NO: 28213 - DNA, 816 bp, synthetic construct
  source 1..816: mol_type = other DNA; note = Synthetic coding sequence
atggcgggtctggaggtccttttcgccagcgccgctccagcgattacctgtagacaggacgcgctcgtctgtttccttcactgggaagtggttactcatggatattttggactgggagtgggcgaccaaccaggcccaaacgataagaagtctgagttgcttccagctggttggaacaacaataaagatttgtacgtattgcgttacgagtacaaagacggctccaggaaactgttggtgaaagctattacagttgagtcatcaatgattttaaatgtactggaatatgggagccagcaggttgctgaccttactttaaatctcgatgactatattgacgcagaacacttgggcgactttcacaggacctacaaaaactcagaagagttgaggtcaaggatcgtcagtggaatcattacccctattcacgaacagtgggaaaaggctaatgtgagctccccccatcgcgagtttccaccagcaacggcacgcgaagtggatccactcaggatcccccctcatcatccacatacgagccgccagcctccatggtgtgaccctctcggacctttcgtggtgggaggcgaagacctggatcctttcggaccacggagagggggaatgatagtagaccctcttcggtctggtttccctcgcgcactcattgaccccagtagcgggctgccaaaccgactgccgcctggtgccgtgccccctggagctcgatttgatccgttcgggcctataggtaccagcccccctggccctaacccagaccacctgcctccgccaggttatgatgacatgtatctctag

SEQ ID NO: 28214 - DNA, 753 bp, synthetic construct
  source 1..753: mol_type = other DNA; note = Synthetic coding sequence
atgtctgaaaacgcggcacccgacttttactacgtggcgatggatttcggtgggcacgggctgtcgagtcattatagtccaggcgttccctactacctccagaccttcgtgtccgagatccggcgtgtggtcgcagggggagtggtagggggaatgtttttctgtaccttcccagaaatggtcgacaagcttatcttactggacacacccttatttctcttagagtctgacgagatggagaatctcctgacctacaaacggcgagcaattgagcacgtgctgcaggtggaagccagtcaagagccttcccatgttttcagcctgaaacaactcctgcagcgccttttgaagagtaattcacatttgagtgaggagtgcggcgagcttctcttgcaaagaggcactacaaaagttgccaccgggttggtgttgaacagggaccagaggcttgcttgggcagagaactctatagacttcatctctagagagctgtgcgcacacagcatccgtaaactgcaggctcacgtactcctgatcaaagcggtacatgggtactttgatagccggcagaactactcagaaaaagagtccctgtccttcatgattgacaccatgaagtctactctgaaagagcaatttcagtttgtggaagtacccggtaatcactgtgtacacatgtctgagcctcaacatgtagcttctataatatccagcttcctgcagtgtacgcacatgcttcccgctcagttgtag

SEQ ID NO: 28215 - DNA, 510 bp, synthetic construct
  source 1..510: mol_type = other DNA; note = Synthetic coding sequence
atggtctttccacttcccaccccgcaggaaccgatcatggctaccccaccaaagagacgggctgtggaggctactggggagaaagtactgaggtacgagacattcatcagtgatgtcctgcagagagacctacggaaagtccttgatcatcgggacaaggtttatgaacaactagcaaagtatctccagctgagaaacgttatcgaacgcctacaggaggctaaacactctgagctttacatgcaggtggacttgggttgcaacttctttgtggatacagtcgtgccagacaccagtcggatctacgtagccctaggttatggtttcttcctggaactgactttggctgaggcactgaaattcattgatcgtaaaagtagcctcctcaccgagctgtctaattccctgaccaaggactctatgaacatcaaagcgcatattcacatgctgctcgaaggtctgcgcgaactgcagggattgcagaacttcccagagaaacctcatcattag

SEQ ID NO: 28216 - DNA, 3177 bp, synthetic construct
  source 1..3177: mol_type = other DNA; note = Synthetic coding sequence
atgacaacggtggtggtacatgtagattccaaagcagagctcacaaccctgcttgaacagtgggagaaagagcatgggagtgggcaggatatggtccctatcctgaccaggatgagtcagcttatcgaaaaggagacagaagagtatcggaaaggtgatccggacccgttcgatgaccggcacccaggcagggcagaccctgagtgtatgctgggccacttgctacgaattttgtttaagaacgacgattttatgaatgccctggttaatgcatatgtgatgacatcccgcgagccccctctgaatactgcggcttgccggctgctgttggatatcatgcctggcctggagaccgctgtggtgtttcaggagaaggaaggcatcgtggagaacctgttcaaatgggcgcgagaggctgatcaacctcttaggacctattccacagggttacttggcggagcgatggagaaccaggacattgcagccaactatagggacgaaaacagtcagctggtcgctatcgtcctgcgacggcttcgagagctgcagctccaggaagtggccctgcggcaagagaacaaacgacctagccctaggaagctgtccagcgagccacttcttcccctggatgaagaagcagtcgacatggactatggggacatggcggtggacgacgctgaaatacagaaatcagccttgcagataataataaattgcgtctgtggccctgacaataggatatcctcaattggtaagtttattagcggcacaccccgtcgcaagctgcctcagaatcccaaaagcagtgagcacaccctcgcaaagatgtggaatgtggttcagtccaataatggaatcaaagtattgttgagcctgctgtcgatcaaaatgcctattaccgacgctgaccagattcgcgctttggcatgtaaggccctggtagggctgagtcggtcctcgaccgtgcgccaaattatctctaagctgccattattcagtagctgtcagatacagcaactgatgaaggaaccggtcttgcaagacaaaaggagcgaccatgtgaaattctgcaagtacgctgccgagctcatagaaagggtcagcggtaagcccctcctcatcggtaccgacgttagtctggccagactgcagaaagccgacgtcgtggcacagagtaggatctcttttcctgaaaaggagttactgctgctgatacgcaatcatcttattagcaagggactgggggaaacagctacagtcttaaccaaagaggcagatctcccgatgaccgccgcaagtcactcatctgcgttcacccctgtcacagctgccgcatctcctgtgagcttgccgagaacccctaggattgctaatggaatcgctactagactgggcagccacgcggctgtgggtgcaagtgctcctagtgccccaaccgcccatccccagcctagacctcctcagggcccactagcgcttcctggcccaagttacgccggaaattctcccttgatcgggaggatctcctttatccgggaacggccttctccgtgtaatggacggaagatccgagtgttgcggcagaagtccgatcatggcgcttacagccagtcaccagccataaagaaacagctcgataggcatctcccaagtccccctactctggatagtattatcaccgagtatctacgtgaacagcacgctaggtgcaaaaacccagttgccacctgcccaccatttagcttatttaccccacatcagtgtcccgaacccaagcagcgccgacaggctcctattaacttcacatcgcggctcaatcgcagggcttcgtttccgaagtacggtggcgttgatggcggatgctttgaccgccacctcatcttctctcggtttaggcctattagtgtctttagagaggctaacgaagatgagagcggttttacctgctgcgcattctccgctcgagagcggtttctgatgcttggcacctgtacaggacaacttaaactgtacaatgtcttttccggccaagaggaggcctcttacaattgtcacaatagcgccatcacacacctcgaaccgtccagagatggaagcttgctgctgactagtgcgacatggtcacaacccctaagtgccctgtggggaatgaaaagtgtctttgatatgaagcattcattcaccgaggatcactacgtggagttctctaaacattcccaggatagagtcatcgggaccaaaggtgacatagcccacatttacgatatacagactggcaacaagctcctgacgctcttcaaccctgacctcgctaacaattataaacgcaattgtgccactttcaatcccacagacgacctggtgctgaatgacggagtgctatgggacgtgagatccgcccaggcaatccacaagtttgataagtttaacatgaacatctcaggcgtattccaccccaatggtttggaggtgataatcaacaccgaaatctgggatcttaggacattccacttgctgcataccgtccccgcactggaccagtgtcgagttgtgttcaatcatacaggcactgttatgtacggtgccatgctccaggccgatgatgaggacgacctgatggaggagagaatgaaatccccgtttgggtcctcatttcgcactttcaacgcaacggattacaagcccatcgcgactatcgacgtgaaaaggaatatttttgatctgtgcaccgatacaaaagattgttatctcgccgtgattgagaatcaaggttcgatggacgcactcaacatggacacagtatgtaggttatacgaggtcgggcgacagaggctggctgaggacgaggatgaagaggaggatcaagaggaggaagaacaggaggaagaagatgacgacgaagacgatgatgacaccgacgacctcgacgagctggacactgaccagctcctggaggcagagctcgaggaggacgacaacaatgagaacgccggagaagatggcgataacgacttttctccgtctgatgaagaacttgctaacctgctggaggaaggggaggacggtgaagatgaagacagtgatgccgatgaagaggtggagctgatactgggggataccgacagctccgacaattcagatctggaagatgacattattctgtctctcaatgagtag

SEQ ID NO: 28217 - DNA, 2409 bp, synthetic construct
  source 1..2409: mol_type = other DNA; note = Synthetic coding sequence
atggccgctgaggcactggcggcagaggccgtagcctcccggctggaaagacaggaagaggatataaggtggctatggagtgaagtcgaaaggttgagggatgagcaactgaacgcgccttattcctgccaggctgagggtccttgtctgactcgagaggtcgcgcagttacgcgctgagaattgtgatttgagacaccggctgtgctctctaaggctctgcctggcagaggagcgaagcaggcaggcgaccctggagtccgctgagttggaggcagcccaggaagcaggcgctcagcctcccccatcgcagtctcaggataaagatatgaaaaagaaaaagatgaaggaatccgaggctgactcagaagtgaagcaccaaccgatttttatcaaggaaagattaaagctgttcgaaattctgaagaaagaccaccaactgcttctagctatctacggtaagaagggcgacaccagtaatattattaccgtgcgggtggcagatgggcagacagtgcagggtgaggtttggaagaccaccccttaccaggtagcagcagaaattagtcaggagcttgccgagtccactgtgatcgccaaggtgaatggcgagctttgggacctggacaggccgctggagggagacagttcactggaactcctgactttcgacaacgaggaggcacaggcagtgtactggcattctagcgcccatatcttgggcgaggcaatggaactctactacggcggacacctttgttacgggccaccaatagaaaatggattttattacgacatgttcatagaggacagggccgtgtcctctaccgaactgtctgcactagagaatatctgcaaagccatcattaaagaaaagcagcccttcgagaggctggaggtgtctaaagaaattctactggaaatgtttaaatacaataaattcaaatgccggattctgaatgaaaaggtcaatactgcaaccactacagtgtacaggtgcggaccgttgatcgacctatgcaaaggtccacatgttcggcatacagggaagattaaaaccatcaaaatcttcaaaaactcctctacatattgggaggggaatccagagatggagaccctacagaggatctacggtattagctttccagataataaaatgatgcgtgactgggagaagtttcaggaggaggcgaagaaccgagaccaccgcaaaatcggtaaagaacaggagcttttcttctttcacgacctttcaccaggaagctgcttcttcctgccccgtggggcatttatttacaatacactgacggactttattagagaagagtatcacaagcgagacttcaccgaggtattatcccccaatatgtataactctaaactgtgggaagctagtgggcattggcagcattactccgagaacatgtttaccttcgagatcgaaaaggatacctttgcgctgaagccaatgaactgtccaggacattgtctgatgtttgctcacagacccaggtcctggcgggagatgccaatcaggtttgctgactttggcgttctgcacaggaacgagctaagcggcacactgtccggcttgacccgtgtgcggaggtttcagcaggatgacgcccacatcttttgtactgttgagcagattgaagaagaaatcaaaggctgcctgcagttcctgcaatctgtgtattccacttttgggttcagctttcaactgaacctgagcactcgcccagagaacttcctgggcgagattgaaatgtggaatgaggctgagaaacaactgcagaattcccttatggatttcggggaaccttggaagatgaatccaggcgatggcgctttctatggcccaaagatagatattaagattaaagacgccatcggacgctatcatcagtgcgccacaattcagctggactttcagctccctattcgcttcaatttgacgtacgtgtccaaggacggggacgacaaaaaaagaccagtcatcatccatagagcaattctcggtagcgtggaaagaatgatcgctatcttgtccgagaactacggcggtaaatggcctttttggctgagtccaagacaagtgatggttattccggtcggcccaacttgtgagaagtacgccctgcaggtgtcaagcgagttcttcgaggaaggcttcatggctgatgtggatctggatcatagttgtacgttgaataagaagatcagaaacgcccagttggcgcagtacaacttcatcttagtggtgggggaaaaggaaaaaattgacaatgcagtaaatgtaagaacccgggataacaaaatccacggggaaatcctcgtgacctcagcgatcgacaaactgaagaaccttcgtaaaacgagaacgcttaacgctgaggaggctttttag

SEQ ID NO: 28218 - DNA, 1149 bp, synthetic construct
  source 1..1149: mol_type = other DNA; note = Synthetic coding sequence
atgttcaagatccaactggaaccgctgaagctgcgcgcatggactctcaacggttttgtgaagtttcgaaataaggagacctctgcagggccagtcgccgttatgggcaaggattattacaagatactaggtatcccatccggcgctaatgaagatgagatcaaaaaggcatacagaaaaatggctctgaaataccatccagataaaaataaagaacctaacgcagaggaaaaattcaaggagatcgccgaggcatacgatgtcttaagtgacccaaagaagcgcggtctgtacgaccaatatggcgaagagggcctaaagactggcggtggcacgtcgggaggttcgtccggatccttccactacacatttcacggagacccgcatgctactttcgctagtttttttggagggtcaaatccattcgatatattcttcgccagtagtcgctcgacacgtcccttctccgggttcgatcctgacgacatggatgtggatgaagacgaagatcctttcggtgccttcgggaggtttggcttcaatggcctaagtcgcggtcctcggagggcacctgagccactatatcctcgtagaaaagtgcaggaccctcccgttgtgcacgagttacgcgtttccctcgaggagatttatcacggaagtaccaaacgcatgaagatcacccggcgtcgcttaaatcccgatggcaggaccgtgcgaacggaagacaagatactacacatcgtaattaagagaggctggaaggagggtacaaaaatcacattcccgaaggagggagacgccacccccgataatataccagccgacattgtatttgtgcttaaggataagcctcacgcccattttagacgcgacgggactaatgttctatactcagctctgatcagtctgaaggaagccctgtgtggctgcaccgtcaacatccctacaattgacggtagagtcattccactcccttgtaacgacgtgattaagcccggtaccgttaaacgcctgaggggtgaagggctaccattccccaaagttcccacccagcgcggagacttaattgtcgagtttaaggtcaggttccccgatagactgacacctcagactaggcagattctaaaacagcatctcccttgctcctag

SEQ ID NO: 28219 - DNA, 1356 bp, synthetic construct
  source 1..1356: mol_type = other DNA; note = Synthetic coding sequence
atgcgggaatgcatctccattcatgtcggtcaggccggagttcagattggcaatgcctgttgggagctttactgtctggaacacggcattcagcctgacggacagatgcctagcgataagaccattggcggaggagacgattcgttcaacacctttttctctgagacaggagcagggaagcatgtgcccagagcagtatttgttgacttggagccgactgtcatcgacgaagtcaggacaggcacgtaccgccagctctttcaccccgaacaattgataaccgggaaagaggacgcagcaaacaattatgcccgagggcactatacaatcggcaaagaaatcatagatcttgtcctggaccgaattcgcaaactggcagaccaatgtacaggcctccagggattcctggtattccacagtttcgggggaggaaccgggtccggattcacatcactcctgatggaaaggttgagcgtggactacggcaagaaatccaagttggaattttcaatctatcccgcaccccaggtgagcaccgcggttgttgaaccttataacagcatcctcacgacccatacgactctcgagcattcagactgtgcatttatggtggataatgaagctatctacgacatatgccggcgaaaccttgatatcgagcgacccacatataccaacctcaatcggctgatatctcaaattgtctcatcaataactgcttccctgaggtttgacggtgctctcaatgtcgacctcactgaattccagactaatttagtcccttaccctaggatacattttccactggccacatatgccccagtgatctccgcggagaaggcctaccacgaacagctgtcggtcgccgagatcaccaatgcctgcttcgagcccgctaatcaaatggtgaaatgtgatcccaggcacggcaagtacatggcatgctgtttgctgtaccggggagacgtggtgcccaaggatgtcaatgccgctatcgccacaattaagaccaagcggtccattcaattcgttgattggtgcccgactggcttcaaggtcgggataaattatcagccacctaccgtagttccgggtggggatttagccaaagtacagcgtgcggtatgcatgctcagtaatactacagctattgctgaagcttgggcaagactggaccacaagttcgatctgatgtatgcaaaaagggctttcgtgcattggtatgtgggagagggaatggaggaaggggagttttccgaagcccgagaggacatggccgcactggaaaaagattatgaggaggtcggggtcgactccgtcgagggcgaaggtgaagaggagggagaggagtactag

SEQ ID NO: 28220 - DNA, 444 bp, synthetic construct
  source 1..444: mol_type = other DNA; note = Synthetic coding sequence
tgaactgcgaggggaccagaacctgagcagatgggacttgctccctgttgtactcaagccctctgtggcctggcacttcgacatcacagccacctccagcagattcggctcgagttccaccgtctgtcagaggaaaacacgcttctcaagaacgatcttggcagggtacgccaggaactagaggccgcagaaagcactcatgacgcccaacgcaaggagattgaggttctaaagaaggacaaggagaaggcatgttctgagatggaagttttgaatcgccagaaccagaactacaaggaccaacttagtcagctaaacgttcgtgtgctgcaactgggacaggaagccagtacccaccaggctcaaaatgaggagcacagggtaacaatacagatgctgacgcagagtctcgaagaagtggtgagatccggccagcagcaatag

SEQ ID NO: 28221 - DNA, 771 bp, synthetic construct
  source 1..771: mol_type = other DNA; note = Synthetic coding sequence
atggccacccagcgcaagcatttggttaaggattttaatccctacattacttgctatatctgcaaagggtacctcataaaacccacaacagttacggagtgcctacacactttctgcaaaacatgtattgttcagcattttgaagacagcaatgactgcccacggtgcggaaatcaggtccacgagaccaaccctctggagatgctgaggcttgacaacaccttggaggagataattttcaaactggttcccggactgagagagcaagaattggagagggaatccgaattttggaagaaaaacaaaccccaagagaacggccaggatgacacgtctaaagctgataaaccaaaggtcgatgaggaaggcgatgagaacgaggacgataaagattatcacaggagcgatcctcagattgccatttgtttagattgcttaaggaacaatggacaaagcggtgataacgtagttaaaggcctcatgaaaaagttcatccgctgttctactcgcgtgacagtgggcacgataaagaaattcctttccttgaaactgaaactgcccagctcatatgaactcgatgtcctgtgcaacggggagataatgggcaaagaccataccatggagttcatttatatgactcggtggcggctccgcggtgagaacttccgatgtctcaactgcagcgcatcacaggtctgtagccaggatggaccactctatcagagctacccgatggtgttgcaatataggccacggatcgacttcgggtag

SEQ ID NO: 28222 - DNA, 6671 bp, synthetic construct
  source 1..6671: mol_type = other DNA; note = Synthetic coding sequence
atggctcctaagaaggaaaagggaggaaccgtgaatacctcttcaaaaatttgggaaccttccctcattgctgcccagtttaaccagaacgactggcaggcatctattgcgttcgtcgttggcaatcaaatcgaggacgatctcctgattcaggctctaacagtggccgtccaggtcccccagcgcaagctgttttccatggtcagttggcaagacatcctgcagcaaattaatgagataaacacactagtaggcagtgcatcttcaaagaaggccaaaaagcccgtgggcggtaacgccccactgtattatgaggtgctgaccgccgctaaagctattatggactcaggggagaaactcactcttccactgatcgggaagctgctgaaatttcagctgctccaaatcaagttcaaagatcaacagcgcagggaaaatgagaagaaggtgattgaggataagcccaaactagagaaagacaagggcaaggccaagtcgccgaaggaaaaaaaagctccatccgccaaacctgccaaggggaagggcaaagatcagcctgaagccaatgcacctgtgaaaaagacaacccagcttaagaggcgcggagaggatgaccatacaaatagatacatcgacgatgaacccgatgacggagctcagcattacattatcgtggtcggcttcaataacccacagcttttggctatcatggctgaattaggcattccaattacttctgttattaaaatctcatctgaaaactatgagccactgcagactcacctggccgcagtgaaccaacagcaggaggtgctgcttcagtccgaggatcttgaggctgagaagctgaaaaaagaaaacgcaatcaaggagttaaagactttttggaagtatctggagcccgtgttgaataacgaaaaaccagaaaccaacctgttcgatgtggccaggctggagtacatggttaaggccgcagacttcccctccgattggtcagacggggaaatgatgttaaaattgggcacagatatcttcgagaacatcgcttgccttatgtacgacattctggattggaaacgacaacaccagcattacttagagtctatgcagttgatcaacgtgccacaggtagtaaacgaaaagcccgtcttagaggcaatgccgacctccgaggctcctcaacccgctgttcccgcacctggcaagaaaaaagctcagtacgaggagcctcaggcccctcctcctgtcacaagcgtgataactacggaggttgatatgaggtattacaattacctactaaacccaatacgcgaagagtttatctcggtcccgctgatcctgcattgtatgcttgagcaggttgtggccactgaggaggatttagttccaccctctctccgcgaaccttcccctcgtgccgacggcctcgaccatcgaatcgctgcccacatcgtgagtctgttacccagcctatgtctgtcagagagagagaagaaaaatctgcatgacatctttctttccgaggaggagaacgaatctaaagcagtgccaaagggtccccttctactgaactaccatgacgcccacgcccacaaaaagtacgcgttacaggatcagaagaactttgatccggtacagatcgagcaggagatgcagtcaaagttgccactgtgggaattcttacaatttcctctaccccctccttggaacaacaccaaacgcctggcgacaatccacgagcttatgcacttttgtacatctgatgtactgagttggaacgaggtggagagagcgtttaaggtattcacgttcgagagtctaaagctgagtgaggtcgacgagaagggcaagctcaaacccagtgggatgatgtgcggcagtgactcagaaatgttcaatatcccttgggacaatcccgctcgattcgccaaacagatccggcagcaatatgtgatgaagatgaatacacaggaggctaagcaaaaggctgacatcaaaatcaaagataggaccctgttcgtagaccagaacctttcaatgtccgtacaggacaacgagtccaatagggaaccttctgaccccagtcaatgtgacgccaataatatgaagcactcagaccttaacaatttgaaactatccgttcccgataatcgtcagttacttgaacaggagtccatcatgaaggctcagccacaacacgagagcttggaacagacgactaacaacgaaattaaagatgatgcagttaccaaagccgactcccacgaaaaaaagccgaaaaaaatgatggtggaggctgacctcgaggacatcaaaaaaactcaacagcgttcccttatggattggtcttttacagagcactttaaacccaaagtcctcctccaggttctccaggaggctcacaaacagtaccgttgcgtggactcatattaccatacacaggataatagcctgctattggtcttccataaccccatgaaccgacagcgattgcactgcgaatactggaatattgccctccatagcaacgtgggttttagaaactacctcgagctcgttgccaagtcaatccaagactggataaccaaagaggaggccatttaccaggaatcgaagatgaacgaaaagataatccgtacacgggcagaattggagctcaaaagcagcgctaacgccaagctcactagtgcatctaagatctttagtataaaagagtcaaagtccaacaaaggaataagcaagaccgaaatcagcgatcaggaaaaggaaaaagagaaggaaaaaatacctttcatactggagggatcactaaaggcatggaaggaggagcagcacaggctggctgaagaggagcgactccgagaagaaaaaaaggcagagaagaaaggcaaggaagctgggaaaaagaaaggtaaagataatgctgagaaggaggacagcagatcactgaagaagaaatccccttataaagagaagagtaaggaggagcaggtcaaaatccaagaagtgactgaggagtcaccacatcagccagagcccaagataacctacccctttcacgggtacaacatgggcaacatcccgacccagattagcggatccaactactatttgtaccccagtgacgggggtcagatagaggtggaaaagaccatgttcgagaagggccctaccttcatcaaagtgcgcgtggtgaaggataaccacaacttcatgatccacttgaatgaccctaaagagattgtaaaaaaagaagagaagggagactactatctggaagaggaagaggaaggcgatgaggaacagtctttggaaacagaagtatctgatgccaaaaacaaagctttcagcaagtttggtagctttagtgcaacgcttgagaatggaatctgcctctcaatatcctattatggaagcaatggaatggcccctgaggataaagatcccgacttggagacaatactcaatatcccctccgcgctgacccccaccgtggtgccagtcatagtaactgtgccccagagcaaggccaaagggaaaatcaaggggaaggagaaacctaaagaatccctcaaagaggaggagcaccctaaagaggaagagaagaaggaagaagaggtagaaccagaacctgtgcttcaagagacattggacgtaccgacatttcagtcacttaacgtcagctgcccttctggattgctccttactttcatcggtcaggaatcaaccggacagtacgtcatcgatgaagagccaacttgggatatcatggtcagacagtcctatcctcaaagagtaaagcactacgagttttacaagactgtcatgcctcctgcggaacaagaagcaagccgcgttattacaagccaggggaccgtagtaaagtatatgttagatggatcaacccaaatccttttcgcagacggcgcagtgtcacgctcgccaaactccggactgatctgtcctcccagtgaaatgcctgctactccacactcgggggacctgatggattccatcagccaacagaagagcgagactataccaagcgaaattacgaacacaaagaagggcaagtcacacaagtcccaatcttccatggcacacaagggagaaatccatgacccaccccctgaagcagtccagacggtaactcctgtcgaggttcacataggaacctggtttacaaccacccccgaagggaatagaataggcaccaaggggctcgagcggatcgctgatctcaccccactgctgtcctttcaggctacggatccagtcaacggcactgtcatgaccacaagggaagacaaagtggtgatcgtcgaacggaaagacgggacaaggatagttgaccacgcggacggcacgagaataacgacattctatcaggtgtacgaggaccagattattctcccagacgaccaagagacaactgagggcccaagaaccgtgaccagacaggtaaagtgcatgagggtggaatcttctcgttacgccaccgtgatcgcaaactgcgaggattcctcctgttgtgccaccttcggtgatgggacaacaatcatcgcaaaaccacaggggacctaccaggtcctgccacctaataccggaagcctttacatcgataaggactgtagcgcggtgtactgtcacgaaagcagttcaaatatatattacccgttccagaaaagagagcaattacgcgcaggtaggtatataatgaggcatacgtcagaagtgatctgcgaagttctggatcccgaaggaaacaccttccaggtgatggccgatggaagcatctctaccatcctgcctgaaaagaagctggaggatgacttgaacgagaagacggaaggctacgatagcttatcaagtatgcacttggagaaaaaccatcaacaaatctacggtgaacacgtgcccaggttcttcgtgatgtatgcagacgggagcggaatggagttgctgcgggacagtgacatcgaggagtacctctccctcgcttataaggagagtaatactgtcgtgctccaggaacccgtccaagagcaaccaggcactctgacaataacagtgctccggccatttcacgaggcaagtccctggcaggtgaagaaagaggacaccattgtgcctcccaacctgagatcacgaagctgggaaacattcccaagcgtcgagaaaaagaccccagggcctccattcggtacccagatctggaaaggcctctgtatcgaaagtaagcagctagtgtcagctcctggagctattctgaaatcacctagtgtgttgcagatgaggcagtttatccaacacgaagtgatcaaaaacgaagtgaagctgcgcttgcaagtcagccttaaggactatataaattacattctcaaaaaggaagacgagcttcaggaaatgatggttaaggactctagaaccgaagaggagcggggaaacgccgcagacctgctcaaactggtgatgtcattcccaaaaatggaagagactaccaaaagtcacgtgacagaagttgccgcacatctaactgacctgtttaagcagagtctggctactcctccaaagtgtcctccggacacgtttggcaaagattttttcgagaagacttggcggcacactgcctcaagcaagagatggaaagagaagattgacaagacccgcaaggaaattgagacaacacaaaattatttaatggatatcaaaaaccgtataattccccctttttttaaaagcgaactaaaccaactgtaccagagtcagtacaatcacttggacagcctcagcaaaaagctgccttcattcaccaaaaaaaacgaggacgccaacgagacagccgtgcaggatacttcagacttgaatctggacttcaagccccacaaagtgtcggaacagaagtcctcctcagtgccctccttacctaagccagaaatctctgccgataagaaagactttactgcccagaatcagaccgagaaccttacaaaatcccctgaggaagcggagagctatgagcccgtcaaaatccctacccagagcctgctgcaggacgtcgcgggacaaacaaggaaagagaaagtgaagctgcctcattatcttctctcatctaaacccaagagtcagcctctggcaaaagtgcaggacagcgtgggcggaaaggtcaatacctcttcagtggcaagcgccgctattaataacgccaaatcatccctcttcggcttccacctgctcccctccagtgttaagttcggtgtcctgaaggaaggtcacacctacgcgaccgttgtgaaattgaagaatgttggtgtggacttctgtcgatttaaggtgaagcaacccccaccatccaccggcctgaaagtcacctataaaccgggacctgtcgccgcaggcatgcagaccgaactcaacatagagctatttgccaccgctgtgggtgaagacggggcaaaaggcagcgcccatatcagtcataacattgaaatcatgacagaacacgaggttttgttcctacccgtagaagctaccgtcctcacaagttcaaactacgacaaaaggcccaaggatttcccacaaggtaaggagaatcctatggtgcagaggacgagcaccatttattcttccactctgggcgtcttcatgagtagaaaagtctccccacatta

SEQ ID NO: 28223 - DNA, 2337 bp, synthetic construct
  source 1..2337: mol_type = other DNA; note = Synthetic coding sequence
atgccggctttcctgggactcaagtgtttgggaaagttatgcagtagcgagaaaagtaaggtgacctcgagcgagaggacctccgcgagaggcagcaaccggaaacggctgattgtagaggaccgcagggtttccgggacaagctttaccgcacataggagggccactattacacacctgctgtatctatgtcctaaggattactgcccaaggggcagagtttgcaatagcgtggatcccttcgttgcccatccccaggaccctcaccatccaagcgagaaaccagttattcattgtcataagtgcggagagccctgcaagggggaagtcctaagagtgcagacaaagcactttcacatcaagtgtttcacctgtaaagtgtgcggatgcgacctggcccagggaggcttttttattaaaaacggcgaatatctatgtacattggactaccagcgcatgtacggaactcgatgtcacggctgtggagaattcgtggagggcgaagtagtgacggctctgggaaagacctaccaccccaattgttttgcctgtacgatctgcaaacgcccattccctcctggagaccgcgttacctttaatggtcgcgactgcctttgccagctgtgcgctcagcctatgtcctcttcacccaaagaaaccacattcagctcaaattgtgccggatgcggcagggacattaagaatggccaagccctgctcgctctagacaagcaatggcaccttgggtgctttaagtgtaaatcatgtgggaaagtcctgaccggtgagtatatcagcaaagatggtgcaccctattgcgaaaaagattaccaggggctgttcggagtgaagtgcgaggcttgccaccaattcattaccggaaaagtgctcgaggctggcgacaagcactatcatccttcctgtgctaggtgctccagatgtaatcagatgtttacagagggggaagaaatgtacctgcaagggtccaccgtgtggcacccagactgcaaacagtctaccaaaactgaggagaagctcagacctactagaacaagttccgagtcgatttacagccgcccaggatcatcgatccctggtagtcccggacatactatctacgcaaaagtagataatgagatcctagactacaaggacctggctgcaattcctaaggttaaagccatatacgatattgagagaccagacctcatcacctatgaaccattctacacaagcggatatgacgataagcaggagcgccagtcactgggtgagtcaccaagaacattgtcaccaacgccatccgccgaaggctaccaagacgtacgggacaggatgatccacaggtctacaagccagggttcgattaattccccggtgtatagccgccattcctacactccgacgactagtcgttccccgcagcacttccaccgccctggtaatgaaccctcctccgggaggaacagcccacttccctataggcccgatagtcgccctttgacaccaacttatgcacaagccccaaagcacttccacgtccccgatcaaggcatcaatatttatagaaaaccacctatatataagcagcatgccgctttggccgcacagtctaaaagctccgaggacataatcaagttctccaagtttccagccgctcaggcaccagatccgtcagagactcctaagattgaaaccgaccactggccgggtccaccatcttttgctgtagtgggcccagacatgaagcggcgttcttccgggagggaagaggacgacgaggagctgctcagacggaggcaactgcaagaagagcagctgatgaaactgaactccggtttgggtcagttaattcttaaagaagagatggagaaggagagtcgcgagagatcatcgctgctggcttccagatatgattctccaattaacagcgccagccatataccatcatctaagactgccagtctccctggctatggcagaaatgggctgcatcggccagtcagcactgatttcgcgcagtacaatagttatggcgacgtgagtgggggagttagggactaccagaccctccccgatgggcatatgcctgctatgcgaatggacaggggagttagcatgccgaacatgctagaacctaaaatctttccctacgaaatgttaatggtaaccaatcgcggaaggaataagatcctgagagaggtggatcggacgagactcgaaaggcacttggcacccgaggtcttcagggagattttcggcatgtccatccaggagttcgaccgactccccctgtggcgcagaaatgatatgaagaaaaaggccaaactgttttag

SEQ ID NO: 28224 - DNA, 1689 bp, synthetic construct
  source 1..1689: mol_type = other DNA; note = Synthetic coding sequence
atgaacccactgtttggccctaatctgttccttctccagcaagagcaacaagggctggcaggaccactgggtgactcattaggtggggaccatttcgcaggcggtggagacctgcctcctgcccctttgtccccagctgggcctgctgcttactcccctcctggaccgggtcccgctccacctgcagctatggctttgagaaacgatttggggagcaacatcaacgtcctgaagacgctcaatctgcgcttccgttgttttctcgccaaagtgcatgaactcgaaaggcgcaaccgcctgctagaaaaacaactgcaacaggccctggaggagggtaaacagggacgacgcggactgggacgtagggaccaggccgtccagactggcttcgtgagtcccattcggccattggggctccagttgggcgcaagaccagctgcggtctgcagcccctccgcaagagtgctgggatcccccgctaggtctcccgctgggccactagccccttcagccgcttctctgagttcttcttccacgtccactagtaccacttattcttcctccgccagattcatgccaggtactatctggagtttcagccatgccaggcggttgggtcctgggcttgaacctactcttgttcagggcccaggcctatcttgggtgcatcctgacggcgtgggggtgcagattgacaccattaccccagaaataagggcactttacaatgtgctggcgaaagtcaagagggaaagggatgagtacaaacgaaggtgggaagaggaatacacggtgcggatccaactccaagatcgggtgaacgagcttcaggaggaggcccaggaggccgatgcttgccaagaggaactggcacttaaggtggaacagctcaaagcagagctcgtggttttcaaaggcctgatgagcaataacctatccgagctcgacactaagatccaggaaaaggcaatgaaagttgatatggatatttgcaggcggattgatattaccgccaaattgtgtgatgttgcccagcagcggaactgtgaggacatgatccagatgttccaaaagaagctggtcccctccatgggtgggagaaaaagggaaaggaaggccgcagtagaggaggacacatccctgtcagagagcgaaggtcctcggcaacctgacggcgacgaagaggaatccactgcacttagtataaatgaggagatgcagcgcatgctcaaccagctgcgtgaatacgacttcgaagacgattgtgattctcttacttgggaggaaactgaagagaccctgctgctgtgggaggatttctccggctacgccatggctgccgctgaggcccaaggggaacaagaggattccctggaaaaggtgattaaggatacagagtccctgtttaagactagggagaaagagtatcaggagaccatcgaccaaatagagctcgagctggcgaccgcgaaaaatgatatgaacagacatctgcacgagtacatggagatgtgttccatgaaacgcggtctggacgttcaaatggaaacgtgtcggagactaattacccaatctggggatcgcaagagccctgcattcactgccgttcctctttctgacccccctcctccaccttcagaggcagaggactcagaccgagacgtgagcagcgatagttccatgaggtag

SEQ ID NO: 28225 - DNA, 2415 bp, synthetic construct
  source 1..2415: mol_type = other DNA; note = Synthetic coding sequence
atgaactaccagcagcagctggctaatagcgccgcaattagggctgagatacaaagatttgagtctgtgcacccaaacatttactccatttacgagctcttggagcgcgttgaggaaccggtcttacagaaccaaattagagagcacgtaatcgccattgaggacgcgtttgtgaattcgcaggaatggactttgagtagatcagtgcccgagctcaaagtgggcattgtggggaacctggcatctggaaagagcgccttggttcaccgatatctcaccggaacctatgttcaggaggaatctccagagggaggccgattcaagaaagaaatagttgtggacggtcagtcctatctgttgcttatccgcgacgagggcggacccccagaggcacaattcgctatgtgggtggacgcagtcatcttcgtgttttctctggaggatgagatcagctttcaaactgtgtaccactactattcaaggatggcaaattatcggaacaccagtgagattccactggtgctggtggggacccaggatgccatttccagcgccaatcccagagtgattgacgacgcccgtgccagaaagttaagtaacgacttaaaacggtgtacctactacgaaacctgcgcaacctatggcttgaacgttgagcgcgtatttcaagacgtggcacagaagatcgtagccacacgcaagaagcagcagctgtccatcggtccttgtaaaagtctgcccaattccccctcacactcatccgtgtgttccgcacaggtctctgccgttcacatcagccagactagcaatggagggggatcactgtcggattactcatctagcgtgccaagcacaccttccacatcacagaaggaattacgcatcgacgtgccccctaccgccaatacccccacaccggtgagaaagcaatctaagcggcgtagcaacttatttactagtcgtaagggctctgatcctgacaaagaaaagaagggcctggaatccagggcagactcaattggaagcggccgtgctatccctataaagcagggcatgttactcaagcgcagcggaaaaagtcttaataaggaatggaaaaagaagtatgtgacgttgtgcgacaatggtgttctgacctaccatcccagcctccatgattatatgcagaacgtacacggtaaagaaatcgacttacttcggactactgttaaagtccctggaaagagaccgccacgcgcaacctcagcttgtgcacccatttcgagccctaagaccaacggactgagcaaggacatgtcaagtctgcacatttctcccaactctgatactggtctgggcgacagcgtttgtagcagccctagcatcagcagtacaaccagccccaagttggatcctcccccttcccctcatgcaaacagaaagaagcacagaagaaaaaagtccacttcaaatttcaaggccgacgggttgtctgggacagcggaagaacaggaggaaaacttcgagtttatcatcgtgtccctcactgggcagacatggcacttcgaggcgacaacatatgaagagagagacgcatgggtgcaggccatcgagtcacaaatccttgcctctctgcagagctgcgaatcctcaaagaacaaatctcggttaacaagccagtccgaggcaatggccttgcagtcaatacgcaatatgagaggaaactcacattgtgtggattgcgagacccagaaccctaattgggcatccctcaatctgggagcactgatgtgcatcgagtgtagtggcatacatcgaaatctagggacccacctgtccagggttcggtccctagacctggatgactggccagtcgagcttattaaggtgatgagctctattggtaacgaacttgccaattcagtctgggaagaaagttcccagggcaggactaagcccagtgtggattcaactcgcgaagagaaggagcggtggataagggcaaagtacgagcaaaagctgtttctggccccactcccatgcaccgagctgagtttgggccagcacctcctcagggccactgctgacgaagacctgcggaccgctatcttgctcctggctcatggcagcagggatgaggtcaacgagacctgcggcgaaggcgatggcagaacagccctccacctggcatgccgcaaagggaacgtcgtcctggcacagctgttgatatggtatggagtggacgtgaccgctcgtgacgcccacggcaacacggccctggcttacgctcgccaagcatcctcccaagagtgtatagacgtgctgttacaatatggctgccccgacgagaggttcgtcctgatggccacgccgaatctcagtcgtaggaacaataacagaaataattcgtctggcagggtgcctaccatcatctag

SEQ ID NO: 28226 - DNA, 2712 bp, synthetic construct
  source 1..2712: mol_type = other DNA; note = Synthetic coding sequence
atgcccgagcagtttagcgtcgctgagttcctggccgtgaccgcagaagatttgagttcccctgcaggcgctgctgcctttgccgctaagatgcctaggtatcgcggagccgctttggcccgagaggagatcctggagggagatcaagcaatattacagcggattaaaaaggccgtgagagcaatacatagctcaggtctgggccatgtcgaaaacgaggaacaatacagggaggcggtggagtccctgggcaatagccatctttctcaaaatagccatgagttgagcactggcttccttaatttagccgtattcactcgggaagtggctgctctgttcaagaacctgattcagaacttaaacaacatcgtcagttttccactggattccctaatgaaaggccaactcagggacggtagacaggactctaagaagcagctggagaaggcctggaaagactacgaggcaaagatggctaagctcgagaaggaaagggaccgcgctagagtcacaggaggcatccccggagaggttgcgcaggatatgcagcgcgaacggcgaatcttccaactccacatgtgcgagtatctcctgaaggctggcgagtctcagatgaagcaggggcctgattttcttcaatctctcattaaattcttccacgcccagcacaatttcttccaagacggctggaaagccgcacaaagtttgttcccattcatcgaaaaactagccgcatcagtgcacgccctccatcaagcacaagaggacgaactgcaaaaactgactcagctgagggactccttgagaggtacactgcagctggaatccagagaagagcatctaagccgtaagaactccggttgtggctactcgatccaccaacatcaggggaacaaacagttcgggacagagaaggtgggcttcctctataagaaatcagacgggatcagacgtgtctggcagaaacgcaagtgcggggtgaagtatgggtgtctcaccatttcgcactctacgatcaatcggccacctgtcaagctcactttgctcacgtgccaggtcagaccaaacccggaagagaaaaagtgtttcgaccttgtgacccacaacaggacatatcattttcaggctgaggacgaacacgagtgcgaagcctgggttagcgtgctacagaacagcaaagacgaggcactgtctagtgcctttctaggggagccaagcgctggaccgggaagctggggctccgccggtcatgacggagaacctcacgacctgacaaaactgttaatcgccgaggtaaaatcacggcctgggaactcccagtgctgtgattgcggagccgctgaccccacctggctgtccactaatcttggggtgttgacatgcattcaatgctctggagtccaccgcgagctcggcgtccgtttttcacgtatgcagtctttaaccctggatttactgggcccttctgaactgctgctggctctgaacatgggcaatacatctttcaacgaggtgatggaggcacaacttccaagtcacggtggcccaaaaccttcagccgaatccgatatggggacccgacgggactacatcatggctaaatatgttgaacacaggtttgccagaagatgcactcctgagccacagaggctctggacagcaatctgtaaccgagatttgctgtccgttttagaggcctttgccaacggccaggatttcgggcagcccctacccggtccggatgctcaagctcctgaggagctggtcctccatctggcagtgaaggttgcgaatcaggcctcactccctctggtggattttattatacagaacggcggacaccttgacgcaaaagctgctgatggaaacactgcactgcactatgccgctctttacaaccagcctgactgtctcaagctgttgctcaaaggacgcgctttggtgggaacagtgaatgaggcaggagaaactgcccttgacatcgcaaggaaaaaacaccataaagagtgtgaggagctgctcgaacaagcacaggcgggtaccttcgcctttccactgcatgtggattactcttgggtcatttctacagaacccggttctgattcagaagaagacgaggaggagaaaagatgtttgctgaagctcccagctcaggcccactgggcgagcggtaggcttgacatcagtaacaagacctacgagaccgttgcaagtctcggggcagcgacaccccaaggcgaatctgaggattgtccaccaccactccctgtcaagaacagtagtaggaccctggtgcagggatgtgccaggcacgcatctggcgaccggtcggaggtctcatccttgagttcggaagccccagagactcctgaaagccttggcagccccgcaagctcaagctcgctcatgtcacctctggaacctggtgatcctagccaagcccctcctaactcagaggaagggctccgggaacccccagggacctctcgtccatctttaactagtggaacaacaccctcggagatgtatttaccagttcggttttcttctgagagtactagatcatatagaaggggagcgagatcccctgaagacggcccatccgccaggcagccactcccacgcagaaatgtccctgttggcatcactgaaggcgacgggtcccggacaggatctttgcctgccagctccgtgcagctgctccaggattag

SEQ ID NO: 28227 - DNA, 1359 bp, synthetic construct
  source 1..1359: mol_type = other DNA; note = Synthetic coding sequence
atgatgaagcgccagctgcacagaatgcggcagctggcccagaccggctcactgggccgtactccagaaactgccgagttcctgggcgaagatctgctgcaggtggaacagaggcttgagcctgccaagagagccgcacataacatccacaagcgactgcaggcctgtctccagggtcagagtggtgctgacatggacaagcgggtgaaaaagctgccactgatggcgctctccacaaccatggcagaatccttcaaagaactggacccagatagctcgatggggaaggcactggagatgtcctgcgcaattcagaaccagctggctagaatcttagccgagttcgaaatgaccctggagagggacgtgttgcagccactgtcacggttatccgaggaagagttgcccgcaatcctgaagcacaagaaatctcttcagaaactggtgagtgattggaatacgctcaaatctaggcttagtcaggccactaagaactctggcagctcacaaggactgggaggcagcccagggtcacactcccacacaacgatggctaataaggttgagaccttgaaggaggaagaggaggagctgaaacggaaagttgagcagtgtcgtgatgaatacctggcagacctctaccatttcgtaaccaaagaagactcttatgccaattacttcattcgcctactggaaatacaggccgactaccataggagatccctgtcttccttagacactgccctcgctgaactaagggagaaccacggccaagcagaccatagccccagcatgacagccacacactttccacgtgtttacggggtctcactggctactcacctgcaggagctcggcagagagatagcgctccctatagaagcctgcgttatgatgctgctgagtgagggaatgaaggaggagggcctgtttagacttgctgctggtgcgtctgtgctgaagcggctgaagcagacaatggccagcgatcctcatagtcttgaggagttctgctctgatccccatgccgtcgcaggggcactgaagtcatatctgcgagagctgcccgaacccctcatgacttttgacctgtatgacgattggatgagggccgctagcctgaaggaaccgggtgccaggctgcaggccttgcaagaggtgtgttcgcgcctgccccctgaaaatctctccaacttgaggtaccttatgaagttcttggcacgtttggctgaagaacaagaggtcaacaagatgacacccagtaacatagctatcgtcctcggaccgaatttattatggccacctgagaaggagggtaccgaacccgctcgggaactgggctctcagactctatgctag

SEQ ID NO: 28228 - DNA, 1137 bp, synthetic construct
  source 1..1137: mol_type = other DNA; note = Synthetic coding sequence
atgaataatagcggtgcagatgagattggcaagcttttcgtgggcggtttagactggtctaccacacaagaaacactgcggtcttacttcagccagtatggagaggtcgtggattgcgttatcatgaaggataaaacaacaaatcagtctcgcggattcggctttgtcaagttcaaagatcctaactgtgtcgggacagttttggcctccaggccccatactctggatggaaggaatattgatcccaaaccctgcactcctcgcggaatgcagcctgagagaacccgaccaaaggagggctggcagaagggtccaaggtctgataactccaagagtaacaaaatttttgtgggcggaatcccacacaattgcggtgaaacagaacttcgtgaatacttcaaaaagttcggcgtcgtcacagaagtggtgatgatttacgacgcagagaagcagcgcccaagaggatttggtttcatcacattcgaagacgagcagagcgtcgaccaggccgttaacatgcactttcatgatataatgggcaagaaagtggaggtgaagcgcgctgagccacgagactctaagtctcaggcacccggacagcctggtgcctcgcagtggggatctcgggtggtgcccaacgctgccaacggctgggccggacagcccccaccgacctggcaacagggctacggcccacaggggatgtgggttccagccggacaagctatcggaggctacggccctccccctgccggtaggggggctccgcctccacctcctccattcaccagttacatcgtgtcgactcctccgggaggatttcccccaccacagggatttcctcaaggttatggtgctcctccgcagtttagtttcgggtacggtccacccccaccgccaccagatcaatttgctcctccaggggtcccccctcccccagcaacccctggagcagccccactggcattccctccaccaccatcccaagctgcccctgatatgtcaaagcctccaactgcacagccagacttcccgtatggtcagtatgggttgggatcctatagtcccgctcccccaggttgcggaccccacttcgtttattctttgatggtgagactgtcttctgacgtcgcatag

SEQ ID NO: 28229 - DNA, 2430 bp, synthetic construct
  source 1..2430: mol_type = other DNA; note = Synthetic coding sequence
atggaggtgctgcgggagaaagttgaagaggaggaagaggctgagagggaggaagcagcggagtgggctgagtgggcccgtatggagaaaatgatgaggcctgtggaagtacgcaaagaggagattactctgaaacaggaaaccctgcgggaccttgagaaaaagctgagcgagattcaaatcacagtttctgccgagctccctgcattcactaaggacactattgacatcagcaagctccccatcagctacaagaccaacactcctaaagaggagcatttgttgcaggtcgctgacaacttctcaaggcagtactcccacttgtgcccagaccgggtgcctttattcctccaccctttgaatgaatgtgaagtacctaagttcgtatcaacaaccctgcgcccaacgcttatgccttacccagaactatacaactgggactcttgtgcacaattcgtgagtgactttctaacaatggttcctcttccagacccactgaagcctactataaagaaggaagagaaggttctgcccaagaaatacacaattaaaccacccagagatctttgttcccggttcgaacaggagcaggaggtgaagaagcagcaggagatccgcgctcaggagaaaaagagactaagagaggaggaagagcgattgatggaggccgaaaaggcaaaacccgatgctcttcatgggctgcgcgtgcactcttgggtacttgtgctttcggggaagcgcgaggtccctgagaacttcttcattgatccctttacaggacactcatattcaacacaagacgagcactttctcggtatcgagagcctctggaaccataagaactactggatcaacatgcaagactgctggaactgctgtaaggatctgatctttgacctcggagatcctgtccggtgggaatatatgcttctcggaactgacaaatcgcagttgtcactcacagaagaggatgacagtgggattaacgatgaggacgacgtcgagaatctgggaaaggaggacgaggataaatcgttcgacatgcctcattcttgggttgagcaaattgagatctcacccgaggctttcgagacaaggtgtccaaacggaaagaaagtcatccagtacaagagagctaagctggagaagtgggccccttacctgaacagcaacggactggttagcaggcttactacatatgaggatttacagtgcacaaatattttagagattaaggaatggtaccaaaatagggaggatatgctagaacttaaacacattaacaaaacaaccgaccttaagaccgattattttaagccgggtcatccccaggccctgagagtccacagttacaagtctatgcaacccgaaatggatagagtgatcgaattttatgaaaccgcacgggtagacgggctgatgaagagggaagaaactccaaggacaatgacagagtattaccagggacggcctgattttctttcatacagacacgcttcctttggcccaagagtcaagaaactaacacttagctctgctgagagcaatccccgaccaatcgtaaagattaccgagagattctttcgcaatccagctaagcccgctgaggaagatgtggctgaacgtgtttttttagtcgcagaagagcggatacagttgcgataccactgtagagaagaccacattaccgcctcaaaaagggagttcctccggaggacggaagtggactcaaaggggaacaaaattatcatgacacccgatatgtgcatctcttttgaagttgaaccaatggaacataccaagaagttattgtaccaatacgaagctatgatgcatctcaagagagaagaaaagctgtctcgccatcaggtatgggagagcgaactggaggtgctagaaatcctcaaactgcgcgaggaagaggaagctgcacacacactgaccatttcaatatatgacacaaagcggaacgagaagagcaaggagtaccgggaggcgatggagagaatgatgcatgaagaacacctccgccaagtcgagacacaattggattacttggctcccttcctggctcagctgcctcccggagagaagctgacctgttggcaggccgttcgcctgaaagacgaatgcttatctgatttcaagcagcggctgatcaacaaggctaatttgattcaagcaaggttcgaaaaggaaacccaagagcttcaaaaaaagcagcaatggtaccaagaaaatcaggtcaccctgaccccagaagatgaagatctatatctgtcatattgtagccaggccatgtttcgaatccgaattctggagcagcggttaaacagacacaaggagctggccccactcaaatacttagccctggaagaaaagctatacaaggatcccaggctgggcgaattgcaaaagatcttcgcttag

SEQ ID NO: 28230 - DNA, 828 bp, synthetic construct
  source 1..828: mol_type = other DNA; note = Synthetic coding sequence
atgtggcctctgaccgcactactgcttctagtgcctagtagcggccaggctgccaccctggagaagccaattctaagtctgcaccctccttggaccaccatcttcaagggagagagagttacattgaaatgtgatggatatcacccactcctgcttgaactacagcctataagcactctttggtaccttggccacttactattgccatcccataagaaatcgatcgaggttcagacccctggagtttatcggtgccagactagaggggctccagtgtcagatcctatccacctttccgtgtcaaatgactggttgattctccaggtgccgtatgcgcctgtgttcgaaggagaaccattggtccttcgctgtaggggctggtacgataaggtcgtgtataaattgcactactaccatgacggccaggcagtgcgctattttcatagttctgctaattacacagtgctgcaggccagagcctctgatagcggcaggtaccagtgctcggggaccatgagaatcccagtggaatccgctccgatgttcagtgcaaaggtagccgtcaccgtgcaagaggcccgtcatgccgcagccgttagagtgttgcaggtgcagccccgaggcgctccgctccggctcggtcgacgggtgcatagtccaggagctagggggaggggcgcaagaatcgtgctcgttcgtggcggttataggcatcctcagtgtcctgaaacccaaagcgtggccgctgccccaggcgcaggtttctcccccggaccgggactccaccatcgtccctccagcatgggtcgtagtctcggcagttggtag

SEQ ID NO: 28231 - DNA, 657 bp, synthetic construct
  source 1..657: mol_type = other DNA; note = Synthetic coding sequence
atgaattgtagatcagaggtgctcgaagtgagcgtggagggacgacaggttgaagaagctatgctggctgtgcttcataccgtgctgctgcacaggagcactggaaaattccactacaagaaagaaggcacgtatagcattggaaccgtgggcacacaggacgtggactgcgattttatcgactttacgtatgtgcgcgtgagttcagaggaattggacagagcgctgcggaaagtggtgggcgaattcaaagacgcactgcgaaattctggtggcgacggactggggcagatgtccctggaattttaccaaaaaaaaaaatctaggtggccatttagcgacgagtgcataccttgggaggtttggaccgtgaaggtccatgtggtcgccttagccacagagcaggaaagacagatatgccgggaaaaggttggcgagaagctctgtgaaaaaatcatcaatattgtggaagtcatgaaccggcacgaatatctacccaaaatgcctactcagagcgaagtcgataacgtgtttgacactggactgcgagatgtgcagccctacctctataaaatcagctttcagataactgatgccttgggcacttcagtgacaaccacaatgcgcagattaatcaaggacactcttgcattatag

SEQ ID NO: 28232 - DNA, 552 bp, synthetic construct
  source 1..552: mol_type = other DNA; note = Synthetic coding sequence
atgatgcaaatctgtgatacatacaatcaaaagcattctctgttcaatgccatgaaccgtttcataggcgcagtcaacaatatggatcagacagtaatggttcccagcttgctccgtgatgtgcccttggccgatcctggcctggataacgacgttggtgtcgaagtcgggggatccggaggctgtctcgaggaaaggacccctcccgttcctgattctggctccgccaatgggtcattttttgctcctagccgggacatgtacagccactacgtgctgctgaagagcataagaaatgacatcgagtggggggtcctgcaccagcccccaccgcctgctggtagcgaggaagggagtgcgtggaagtctaaagatattctggtcgacctaggacacctcgagggtgccgacgccggagaagaggacctggagcagcagttccactatcacctacgcggtctgcatacggtactgtccaagctgacacgcaaggccaacatcctcaccaataggtacaaacaggaaataggtttcgggaattgggggcattag

SEQ ID NO: 28233 - DNA, 369 bp, synthetic construct
  source 1..369: mol_type = other DNA; note = Synthetic coding sequence
atgctgttcgccccatgctgtcatcagtgtggagagttcataatcgggcgtgtgattaaagccatgaacaattcctggcaccctgagtgttttaggtgcgatctgtgccaggaggtgctcgcagacataggatttgtgaagaatgccggaagacacctgtgcagaccatgtcacaatagagaaaaagctcgtggactgggaaagtatatctgccaaaagtgtcatgctattatcgacgagcaacccttgatttttaaaaatgatccgtatcatcctgaccacttcaattgtgcaaattgtggccaagagggatcagattgcaggtgtaccggagcggagcgcggtgctattctgccagccatgccgtag

SEQ ID NO: 28234 - DNA, 1083 bp, synthetic construct
  source 1..1083: mol_type = other DNA; note = Synthetic coding sequence
atggacagcgaacttatgcacagtatcgtaggcagttaccataagcccccagaacgtgtgttcgtgccttcctttactcagaacgagcctagccagaactgccatccagcaaatcttgaagtgacatcccccaagatccttcactccccaaattcccaagagaagcaattagagtatacaaagcgcatggtgttgaatgtggagcgcgagaagaatatgatactggagcagcaggcccaactgcagcgtgaaaaggagcaggaccaaatgaaactgtatgccaagctcgagaagctggatgttttagagaaagaatgcttccgccttacaaccacacagaaaaccgcagaagacaaaattaagcatctcgaagaaaagcttaaggaagaggaacaccaacgaaagctattccaggacaaagcttcagagcttcagaccggattggagatcagcaaaatcattatgtcatccgtgagtaacctcaagcacagtaaggaaaaaaaaaaatcgagcaagaaaactaaatgtatcaagagacgacccccatggcagatatgcagcaaatttggtgccctgcccttcgtggctgaaaaaccatccaggaccacctcctggtgtaaagcgataccgccagatagtgaaaagagcatttctatctgcgacaacctttctgaactgcttatggcaatgcaggacgagctcgatcagatgtcaatggaacaccaagagttgctgaaacaaatgaaggaaactgaatctcactccgtgtgtgatgacattgagtgtgagctggagtgtctgctcaagaagatggagattaagggcgaacagatcagtaaactgaagaagcaccaggattccgtctgtaaactgcagcaaaaagtccaaaattctaagatgtctgaagcgagcggaattcagcaggaggactcatatccaaaaggctccaaaaatatcaagaactctcctcggaaatgcctgaccgatacaaacctgtttcagaaaaatagttcattccatccaattcgcgttcataacctgcagatgaagctgcgacgtgacgacatcatgtgggagcagtag

SEQ ID NO: 28235 - DNA, 1758 bp, synthetic construct
  source 1..1758: mol_type = other DNA; note = Synthetic coding sequence
atgagcggcagcactccatttcagatgcggctggtacatctagacctgaagggcgcaccgccaaaggtgtcatacctttcagagattttcccactcttcagagcgctgggagcaaacgggctgttgatcgagtacgaagatatgttcccttacgagggcccattgcgcctgcttcgagcaaagtacgcctattcaccttccgagattaaagagatcctgcatttagctggacttaatgaactggaggttattcctctcgtgcagacatttggacatatggagttcgtacttaaacatacagcatttgctcacctgagggaggtgggatcttttccatgtactctcaacccacatgaggcggagagcctggcgttggtcggagcaatgatcgatcaagtgctcgaattgcatccaggagcccaaaggcttcatatcggctgtgacgaggtatattatcttggcgagggcgaggcctcccggcgatggttgcagcaggagcaaaactcgaccgggaagctttgcttgtctcatatgagggcagtagctagcggggtaaaggccagaaggccctctgtaaccccgctagtttgggacgacatgctgagggatttgcctgaggaccaattggcggcttcaggggtgcctcagctggttgaaccagtactttgggactataccgccgatctagatgtgcatggcaaggtgctgctgatgcagaagtatcgacggtgcggcttcccccaactctgggccgcatctgctttcaaaggggcaactgggccttcacaagccgtgcctcccgttgagcatcacctccgcaatcacgtgcagtggttgcaggtcgctgggagcggacccaccgattccctgcaggggataatcctgaccggttggcagcgatacgatcactattcagtgctctgcgaactgttaccggcaggggttccctcactggccgcatgcctgcagctgcttcttcggggaggatttgacgaagacgttaaggcgaaggtggagaacttactcggcatatcttccttagagaagacagaccctgtgcggcaggcaccatgcagtccaccttgcccactactgccgttaccttttcccagaccttggcgacagctgttctccgcaggtctttcagccggtcgcggacccgctccatcgctggcagccacctctcttccactctcacacaagtctgccagcatctgcgccgcactgtggatgcgctgttggagggcgacggggatgtctctcgctggttccgcgccaactacggccagtgggtctagctccacacgatcatggttctcaactagttccccccagcggtcggcttcttggcatagcggcgctccatcttgcagatcgtggagacttccatgctcttggctgtccactaggatgccttggcggtctgggtggcggaaaacgtgtactcctgcatgtagcggctgtaagctgtgctgccgaacatccgctcggtgcctccccccacggtgtcatccacctgctctggcaggcacactcctgagaacacccgagggaagggcacacgccaggggcctgcttctggaagccggtggcgcactgcattgccagatggcctgggctattagagctcacgttggtgtcgtgcctagcggcccagcagtaagttgtccccatagcgtacccgagggccctggccaacccttaggggagcggcttgagaacaccgaaggctcaagtacaggaaggccagccctttag

SEQ ID NO: 28236 - DNA, 2112 bp, synthetic construct
  source 1..2112: mol_type = other DNA; note = Synthetic coding sequence
atggaagcactgttagaaggtattcagaacagaggccacggcggaggtttcctgaccagttgtgaagccgaactgcaagaactcatgaagcagattgacattatggtggcgcataaaaaatctgagtgggagggacgtacgcacgcactggagacgtgtttgaagataagggaacaagaactgaaatcactgcggtcccagcttgatgtgacacataaagaagtggggatgctgcaccaacaggttgaagaacacgaaaagattaaacaggaaatgactatggagtataagcaggaattgaaaaaactgcacgaggaactgtgcattctgaaacggagttatgaaaaattgcagaaaaagcagatgagggagtttcgtggcaacaccaagaatcatagggaggaccgctccgagatagagagactgactgccaaaatagaggagtttaggcagaaaagcctagactgggagaaacagcgcctcatatatcagcagcaggtttcatcgctggaggctcagaggaaagccctcgccgaacagagtgaaattatccaggcccagctcgttaacagaaaacagaagctggagtcggtagagctgagcagccagagtgagattcagcatctgagcagcaaactggagcgagctaacgataccatctgcgccaatgagctagagattgaaagactgaccatgagggtaaacgatttagtgggcactagtatgacggttctgcaagaacagcaacagaaggaggagaaactcagggaaagcgagaagcttttagaagcattacaggaggaaaagcgtgagctgaaggcagctttgcagagccaggaaaatttgatccacgaggccagaatacagaaggagaagctgcaggaaaaagtgaaagctaccaacacacagcacgccgtcgaagctatccggccacgcgaggaatctcttgccgaaaaaaagtacaccagccagggacagggggatctggactccgtcttatcacaactgaatttcacccataccagcgaggacttgctacaggccgaagttacctgcctcgaggggagtttagaatcggtttccgcaacctgtaagcaattgagccaggagttaatggagaaatatgaggagctgaaaaggatggaggcccataacaacgaatataaagccgagattaagaagctgaaggaacagattctgcagggtgaacagagctacagctccgccttggagggaatgaaaatggaaattagccacctgacccaggagctgcaccaaagagacatcacaatagcaagtaccaaagggtcatccagcgacatggaaaagcgactgcgcgcagagatgcagaaagccgaggataaagctgtggaacataaggaaattctcgatcagctcgagtctctgaaactcgagaaccggcacctttccgagatggtgatgaagttggaactgggcctccatgaggccaaagaaatttccttggcagatttacaggaaaactacattgaagcactcaataaattagtgtccgagaatcagcagctccagaaggacttgatgaatacaaagagccagctggagatcagcacacagatgtgcaaaaaacagaacgataggatatttaaaccaacacattccagaactacagagttcaaaaacaccgaattcaagccaacccatgggcaacataggcacgatgggatcaaaactgagcattacaaaacggatctacacagcccacgaggccaggcttctgacagcatcaatcccatgtcccgggttctgtcacccctcagtccccagatttctccttgcagctccacaaggtctctaactagttacagcctgtgtaagacacattccctgccttctgctctcgacaccaacgaggcaaacttctctgacacgatgagcgagagtatgaatgaccaagaggagtttatttcgtcttgcagtctgcccgtcagccccctcggtagcattgccacacggttcttagaagaagaagaactgcgatcacaccatatcctcgagagactggatgcacatattgaagagcttaagagggagtccgaaaagactgtgcgccaattcactgccctgaagtag

SEQ ID NO: 28237 - DNA, 1626 bp, synthetic construct
  source 1..1626: mol_type = other DNA; note = Synthetic coding sequence
atgtcctcctgcgtgagcagccaaccctcaagtaatagagcggctccccaggacgaattaggtggtcgtgggagtagctcatctgagtcacagaagccctgtgaggccctccgaggactcagctcgctgagtatacacttgggtatggagtccttcatagtagtgaccgaatgtgagcccggatgcgccgtcgacttgggtctggccagagatagaccacttgaggccgacggccaggaggtgccgctggataccagtgggagtcaggctcgcccacatttgtcgggaaggaagctgtccttgcaagaacgcagtcagggcggtctcgcggctggcggatccctggatatgaacgggagatgcatatgccccagtttgccctattctcccgtgtcctccccgcagagctctcctcgactgccccgacggcctactgtcgaaagccatcatgtctctattaccggcatgcaggattgcgtccagcttaatcagtacaccctgaaagacgagataggtaagggctcgtacggagtggtgaagctggcctataacgaaaacgacaacacgtactatgcgatgaaagtcctgagcaaaaagaagctaatccgccaagctggttttccaaggcggccacctccgaggggtacccggcctgcccctggcggttgtattcaaccccgtgggccaatcgaacaggtgtaccaggaaattgctattttgaagaaactcgaccatccgaacgtggtgaaactcgtggaggtgctcgacgaccccaatgaggaccatttatatatggtgtttgaactggtcaatcagggaccagtgatggaggtcccaacgctcaaaccgttaagcgaggatcaggcacgcttttatttccaggacctcataaaggggatcgagtacctccactaccagaagataatacatagagatatcaaaccttccaacctcctggtgggcgaggacggtcacataaagatcgccgatttcggtgtgagcaacgagtttaagggttcagacgccctgctgtctaatactgtggggacccctgcctttatggcccctgaatccctctcagaaacccggaagatcttttcagggaaagcactggatgtgtgggccatgggagtaacactgtactgctttgttttcgggcaatgtccctttatggatgagcgcattatgtgtctccactccaagatcaaatctcaggccctggagttcccggatcagcccgatatagctgaggaccttaaagaccttatcaccagaatgctcgacaaaaatccagaatcccggatcgtcgtgccggagataaagctgcatccgtgggtgacccggcacggagccgaacctctgccctctgaagatgaaaattgtactcttgttgaagtcaccgaagaggaggtggagaacagcgttaaacacatcccgagtttagcaaccgtaattctcgtaaaaactatgattcggaagcggtcattcggaaacccctttgagggatcccggcgagaagagcgctccttgagcgctcccggtaatcttctgaccaagcagggatctgaggataatctgcaagggaccgaccccccaccggtcggcgaggaggaggtcttgctttag

SEQ ID NO: 28238 - DNA, 2463 bp, synthetic construct
  source 1..2463: mol_type = other DNA; note = Synthetic coding sequence
atgacagacaccagacgacgggtgaaggtgtacacactgaacgaggaccggcagtgggatgatagaggaaccggccatgtcagctcaggatatgtggagcgactcaaaggaatgtccttgctggtaagggccgagtctgatggaagcctgctgctggaatctaagattaatccaaacactgcatatcaaaagcagcaagatactctcatagtatggtctgaagccgaaaactacgatctggccttaagtttccaggaaaaggcagggtgtgatgagatatgggagaaaatctgtcaagtacaagggaaagatccatcagtggatatcactcaagacctggtggacgagtccgaggaagagcgcttcgatgatatgagtagccccggattggaactcccttcatgtgagttgagccgacttgaagagattgcggagctggtggcttcctccctgccttccccactgcgccgtgagaagcttgccctcgctttggaaaatgaaggctacattaaaaagctgctggagctctttcacgtgtgcgaggacctggaaaatatcgaaggcctgcatcacctgtatgaaataataaagggtattttcctcctcaataggacagcacttttcgaggtcatgttttctgaagaatgcatcatggatgtgatcggttgcctcgagtacgaccctgcactgtcacagcctagaaaacacagggaattcttgaccaagaccgccaaatttaaggaggtgattccaattagcgatccggagctcaagcagaaaatccaccagacttatcgcgtccagtatattcaggacatggttctgcccacaccctccgtgttcgaggaaaacatgttgtccaccctgcacagttttatattttttaataaagttgagattgttgggatgcttcaggaggatgaaaaattcctgaccgacctgttcgcgcaactgactgacgaagccaccgatgaggaaaagcgacaggaactggttaattttctgaaggagttttgcgctttttcccagaccctccaaccccagaatcgagatgccttcttcaagaccctcagtaatatgggaattcttcctgcactagaagtgatcctgggcatggatgacactcaagtcagatccgctgccaccgatatcttctcttatctggttgagtataatccttccatggtgagggagttcgtcatgcaggaagcacagcagaacgacgacgacatactcttgatcaacctgataattgaacatatgatctgtgatacagatcctgagctgggaggagcagttcagcttatggggctgcttagaaccctggtcgatccagaaaacatgcttgccactgcaaacaagacagagaagactgaatttctagggttcttttataagcactgtatgcatgtgctgaccgctccccttcttgccaacaccacagaggacaagccttcaaaggatgactttcagaccgcccagctgctggccctggtactggagttgttgaccttctgtgtggagcatcacacgtatcatataaagaactacatcatcaacaaagatatcctgaggcgtgttcttgtgctcatggcaagcaaacatgcctttctcgcgctatgcgcactgagattcaaacgcaagatcatcggattaaaggacgagttttataatcgctatataatgaagagcttcttgtttgaaccagtggtgaaagctttccttaataatggcagtcggtacaacctcatgaactcagctatcatcgagatgtttgagttcatccgggtcgaagacatcaagtccctaacggcccatgtgatagagaattattggaaagccttagaagatgtagattatgtgcaaaccttcaaagggctgaaactgcgtttcgaacagcagagggaacgccaggataaccctaagcttgattcaatgcggtctattctgcgcaaccaccgttaccgcagggatgccaggacactagaagacgaggaagagatgtggttcaacactgatgaggatgatatggaggacggagaagccgtggtctctccatccgacaaaaccaagaacgatgatgacattatggacccaatttcaaaatttatggaaagaaaaaagcttaaagaaagcgaggaaaaggaggtgctcctaaaaacaaacttgagcggcagacagagtccttcattcaagttatctttatcctcgggaaccaagactaaccttacctctcaatcgtcaacaacaaaccttcctgggagtcccggtagtcccggaagccccggatctcctggatcgcctgggtctgtgcccaagaacacctctcagaccgccgctatcacgacaaagggcggacttgtggggctggtcgactaccccgatgatgacgaggatgacgacgaggatgaagataaggaagatactctacctttgtccaagaaagcgaaattcgacagctag

SEQ ID NO: 28239 - DNA, 2382 bp, synthetic construct
  source 1..2382: mol_type = other DNA; note = Synthetic coding sequence
atgagtgaacagggcgacctgaatcaggccattgccgaagagggaggaactgagcaggagaccgccactcctgagaatggtattgtcaagtccgagagtctggatgaggaagaaaaactggagttacagcgccgtctggaagcgcagaatcaagagagaagaaaaagcaagagtggagccggaaaaggcaaattgacccgatcactggcagtatgcgaggagagtagtgcccgacctggaggagagagtctccaggatcaggaatctatacacctacagctgagctcatttagcagtctccaggaagaggacaaatcacggaaggatgattctgagagggagaaggagaaagacaagaacaaagataaaaccagcgagaagcccaagatccgcatgcttagtaaagattgttcccaggagtacacagattcaaccggaatcgacttgcatgaattcctgattaataccctgaagaacaacagcagagatcgtatgatcctgctcaagatggagcaggagattatagactttatcgcagataacaataatcactataaaaagtttccacaaatgagtagctaccagcgtatgctggttcatcgggtggcggcatacttcgggttggaccacaatgtcgaccagaccgggaaaagcgtgataattaacaaaacttcctccacccgcatcccagaacagaggttctgtgaacatttaaaagatgagaaaggcgaagaaagccagaaacgttttatccttaagagagataactctagcatcgacaaagaagacaaccaaagcgtctgctctcaggagtcactctttgtagaaaacagaggcaacagggacggttccggtaggacatctggcagtcgacagtccagctccgaaaatgagcttaaatggtccgatcatcaacgggcatggtcttccactgactcggattcaagcaataggaacttgaagccagccatgacaaagactgcttcctttggcggaatcaccgtcctgacccggggagacagtactagctccactcgttcaacaggcaagctgtccaaggccggaagcgaaagttcttctagtgccggttccagcggatcactctcccggacccatccgccactccagagcaccccccttgtttcgggagtcgccgcaggttccccgggatgtgtgccttaccctgagaatgggatcggaggacaggtggcgccaagcagcacctcctacatacttctgccacttgaagcggctactgggataccacccggttcaattcttcttaatccccacactggacaaccttttgttaatcctgatgggacacccgcaatctacaatccacctacaagccagcagccccttcgcagtgccatggtggggcagtctcagcagcagccgccacagcaacaaccatcaccacagccccaacagcaggtacagcctcctcagccacaaatggcgggtcctttagtaacgcagtccgtgcaggggcttcaggcatcttcccagtccgttcagtaccctgcagtctcatttccgccacagcacctgctgccagtgagccccacccagcatttccctatgagagatgatgtagccacacagtttggccagatgaccctgtcccgacagagttctggcgagacccccgaacctccaagtggtcccgtttatccgtctagcttgatgccgcaaccagctcagcagccaagctacgtgattgccagtacaggccagcagttgcctactggcggattcagtggctcaggccctcccatctcacagcaggtgctccagccacccccatctccacagggtttcgtccagcagccaccaccagctcagatgcctgtttattattatccctccggtcagtaccccacgtccactactcagcaatatagaccgatggcaccagtgcagtacaatgcacaaagatcccagcagatgccccaggccgctcagcaggccggataccaacctgtactgagtggccagcaggggtttcaaggcctgatcggcgtacagcagccccctcagtcacagaacgtgatcaacaaccagcagggtacacctgtgcaatctgtgatggtgtcttatcccactatgtcctcttatcaggtgccaatgactcagggatctcaaggcctgccccagcagagctatcaacaacctatcatgcttcccaaccaggccggtcagggaagtctgccagctaccggcatgccggtctactgcaacgtgactcccccaacccctcagaataatctgcgattgattgggccacactgtccaagtagcacagtccctgtgatgtcagcctcctgccgtacgaactgcgcatcaatgagtaacgcgggttggcaggtgaaattttag

SEQ ID NO: 28240 - DNA, 1467 bp, synthetic construct
  source 1..1467: mol_type = other DNA; note = Synthetic coding sequence
atgagattccactggctgcctaccctgtccgaacccttcgataggaatcaggaattggaaacatgcatcagaccattgtggacccccagtggctcagcatgcgagaccgagcacaataaaagtatggatatgggtaaccagcacccttcgatttcacgcttgcaggaaatacagaaagaggttaagtcggtcgagcagcaagtcattgggtttagcggactgagcgatgataagaactataagaaattggaaaggatactcacaaagcagctattcgagatcgatagtgtggatacagaagggaagggcgacattcaacaagctagaaaacgcgcagctcaggagaccgaacgcctactgaaagaactcgaacagaatgccaatcatcctcacagaattgagattcagaacatcttcgaagaggcccagagtctggtgagagagaagatcgtccccttttataacgggggaaactgcgttacagacgagtttgaagaggggatccaagatatcatcttgcgcctcactcacgttaaaactgggggtaaaatcagcctgaggaaagccagataccatactctcaccaagatttgcgcagtgcaagagatcattgaggattgcatgaaaaagcagccatctttgccactgtcagaggacgcacacccctccgtggctaaaataaactttgtgatgtgcgaggtgaataaagctcgtggcgtgctgattgccttactcatgggagtgaataacaacgaaacgtgcaggcacctgtcttgtgtgctgagcggtctgatagccgatctagacgccctggacgtgtgtggacgcactgagattaggaactacaggcgtgaggtcgtggaagacatcaacaagcttctgaaatacctggatctggaggaagaggccgacacaaccaaagctttcgatcttaggcagaatcattccatcttgaagattgagaaagtgctaaaaagaatgcgggaaattaagaacgagctgctgcaggcccagaacccctcagagttgtacctgagtagcaaaacagaacttcaaggcttgatcggacagctggatgaagtcagcctcgaaaaaaacccatgcattcgcgaagcgaggagaagggccgtgatagaggtgcagaccttaattacctacattgatctgaaagaagcactggaaaagaggaaactattcgcttgcgaagagcatcccagccacaaagctgtgtggaatgtcttgggaaatctgtctgagattcagggcgaagtgctgtctttcgacggtaaccgaactgacaaaaattacattcggcttgaggagttgctaacgaagcagctgctggccttggacgccgtcgatccacagggcgaagaaaagtgcaaagccgcacgcaagcaggccgtgcgtctcgctcagaacattttaagctacctggatctcaaaagtgacgagtgggagtattag

SEQ ID NO: 28241 - DNA, 978 bp, synthetic construct
  source 1..978: mol_type = other DNA; note = Synthetic coding sequence
atggggaagatggtaagtgtgattaacaccgtcgacacctcacacgaggatatgatccacgacgcccagatggattattacgggactcgcctggcaacttgttccagcgacagaagcgtgaagatttttgacgtgagaaacggagggcagatcctgatcgcagacctgagaggccatgagggcccagtttggcaagtggcctgggcccacccaatgtacggaaatatcttggcaagttgcagttacgaccgaaaagtgatcatctggcgtgaagagaatggcacttgggaaaaatctcacgaacacgcaggccacgactcgagcgtgaactccgtctgctgggccccacacgactatgggctcattctggcttgtggcagctctgatggcgcaatcagcctgctgacctatacaggagagggccagtgggaggttaagaaaattaacaatgcacatactattggctgcaatgctgtgagttgggcgcctgccgtggtgcctggttcgctgatcgaccacccttctggtcagaagccaaattacatcaagcggttcgcgagtggcggttgtgacaatctgattaaattgtggaaggaagaggaggacggtcagtggaaggaggagcagaaactggaggcccactcggactgggttagggacgtggcatgggcccctagcatcggcctgccaacatctactatagccagctgctctcaggatggacgcgtgtttatttggacttgcgatgatgcctcaagtaacacctggtcccccaagctactgcataaatttaatgacgttgtgtggcacgtcagttggagcatcactgctaacatcctggccgtgtcggggggagataataaagtcaccctatggaaggagtccgtggacggtcaatgggtctgtatctcagacgttaataaaggacagggaagtgtctcagcctccgtcacagaaggtcagcagaatgaacagtag

SEQ ID NO: 28242 - DNA, 846 bp, synthetic construct
  source 1..846: mol_type = other DNA; note = Synthetic coding sequence
atgctctttatcttccccctttcgctgccatggcggccttcatgttggaaggaatcatgctcaacaggccagaggcaggcaggacggtcgcgagaagactctgttacccccccacctagctccccgtggcctacgccacctgctggagccatgtccacaaaacaggaggccaggcgggatgaaggcgaggccagaacacggggacaagaagcccagctcagggatcgcgcacacctgtcccagcagcggagactcaaacaggctacacagttcttgcataaggacagcgcggatctcctgcccctcgactctctcaagcggctgggcacgtctaaagacctacagccacgatccgtaatccagcggagactggtggaaggtaaccctaactggttacagggcgaacctccacgcatgcaagatctgatacatggacaggagagccgaagaaagacatcccggactgaaatccccgcactcctggtgaactgtaagtgccaagaccaacttttgcgcgtcgctgtcgacaccggaacacaatacaataggatttctgcgggatgcttgtccagactagggctagaaaagcgggttcttaaggcctcagctggggacttagcgcctggcccaccaacgcaagtggagcaacttgagctgcagctgggacaagaaacagtggtttgcagtgcccaggtggtggacgccgagtcgccagagttttgcctaggtctgcaaacactgctgagcctgaagtgctgcatcgatctggagcacggagtcttacgactcaaagccccattctccgaattgccatttctgcctctgtaccaggagcctggccaatag

SEQ ID NO: 28243 - DNA, 1533 bp, synthetic construct
  source 1..1533: mol_type = other DNA; note = Synthetic coding sequence
accgggggaggtgtagcccctgctggacaagtgaggaccgctacttgggccagacgggctaggccataccggaaaatggccgctcgcacggggactgagttggcttctgccgctagtaccacggccccaggaagcagtaaacgcaggaaaagacacccatggcacactgtgtctagaagacccggtaggactcctaaatggcgcctaccccgtatctcagcaagggctccatatcggctgaggaggcttcggagacacacatattggcctccaagacgaccagtggctgccagccgatgctggcccgtgggtgcaactccgttgggctccgtgggtggtcgcaccgggaagatggatgccgctacccttacttacgacactctgaggtttgccgagttcgaggacttcccagagacatcggagcctgtgtggatcctaggacggaaatactctatcttcaccgagaaggacgagatcctgagtgatgtggccagccgcctttggttcacctacaggaagaactttcctgcaattggcggaaccggaccaacttcggataccgggtggggttgcatgctcaggtgcggccagatgatctttgcccaggctttggtttgccgccaccttggcagggactggagatggacgcaaaggaagagacaaccagacagttatttttcagtacttaatgcttttattgacaggaaagacagttattatagtatacatcagatcgcccagatgggcgtgggtgaaggcaagagcatcgggcagtggtacggcccaaataccgttgcccaggtcctgaagaaattggctgtgttcgacacctggagtagcttagcggtgcatatcgctatggacaacacggttgtgatggaggagattcggagattgtgccggaccagtgtgccatgtgccggagctaccgcttttccagccgattcagaccgacactgcaacgggttcccggcaggagctgaagtgaccaatcgaccatctccatggaggccactggtgcttttaataccccttcgactcgggcttactgacatcaacgaagcatatgttgaaacactgaaacactgcttcatgatgcctcagtcactgggcgtcatcggagggaagcccaacagcgcacactatttcataggctacgtcggggaagaactcatatacctggacccacacacaacccagcctgcagttgagccaacagatggttgcttcatcccggacgagtccttccattgccagcacccaccttgccggatgtctatcgcagaactggatcctagcatcgctgtgggcttcttttgcaaaacagaggatgattttaatgattggtgccagcaggtcaagaaactttctctcctggggggagccctcccgatgtttgagctcgtagaactgcagccttcccacctagcctgccctgacgtcctgaacctcagtctggattcatcagacgtcgagcgacttgaaagattttttgacagcgaagacgaggacttcgagatcctgagtctttag

SEQ ID NO: 28244 - DNA, 552 bp, synthetic construct
  source 1..552: mol_type = other DNA; note = Synthetic coding sequence
atggcgtcaaataagacgactcttcagaaaatgggaaaaaagcagaacgggaagagcaagaaggttgaagaagccgagccggaggaattcgtggtggagaaggtgctcgacaggcgagtggtgaacggcaaggtggaatatttcctgaagtggaagggattcaccgatgccgacaacacttgggagccagaggagaaccttgactgtccagagctgatcgaggcgttcttaaactcacagaaagcagggaaagagaaggacggcacaaagcggaagagcttgtccgattctgagagtgatgactcaaagtccaaaaagaagagggacgctgccgataagcccagaggcttcgcacgcggtttggatcccgaacgcatcatcggagcaactgatagctccggtgaattaatgttcttaatgaaatggaaagattcggacgaagccgatctggtgcttgccaaagaagccaatatgaaatgtccgcagattgtgattgccttttatgaggaacggcttacctggcactcctgtcccgaggatgaggcccaatag

SEQ ID NO: 28245 - DNA, 1464 bp, synthetic construct
  source 1..1464: mol_type = other DNA; note = Synthetic coding sequence
atggagcgaagcggacaaagggtaactacgtgggattgcgatcagggtaagcattccgattcagactaccgggaggatggtatggatcttggctctgatgcaggctccagcagcagctcatcacgggcttctagtcagagcaattctaccaaggtcacaccttgctcggaatgcaaaagtagctcctccccagggggttcccttgacctagtgtccgcactggaagattatgaagagccttttcccgtttatcagaaaaaagtgatcgacgagtgggctcctgaggaagacggagaagaagaggaggaggaggatgagcgagatcagagagggtatagggatgatcgatccccggcaagagagccgggagacgtgtcagcaaggactcgatcgggcggtggaggtggaagatcggctaccactgcgatgcctcctccagtccctaacggaaacctacatcagcatgatcctcaggacttgagacacaatgggaatgtggtcgtcgcgggtcgcccatcctgcagcagaggaccgcgacgggcaattcagaagccccagccagcaggcggaagacggtctgggagggggccagccgctggtggactctgtcttcagcctcccgacggtggaacctgtgtgccagaggagcctccggttcccccaatggattgggaagctctcgaaaagcacctagcaggcttacagttccgagaacaagaagtacggaaccagggtcaagcgagaactaatagtacttccgctcagaagaatgagcgagagagcatccgccagaagctggcactgggcagcttcttcgatgacggtcccggaatatacacgtcttgttcaaagtcaggcaaacccagcctctcctcccgcctccagagcggcatgaacttacagatctgcttcgtaaatgacagcggcagtgacaaggactctgatgccgacgacagcaagactgagacttccctagacacgcctcttagccctatgagtaagcaatcaagttcatactcagacagggatacaacagaggaggaaagcgagtcactagacgacatggacttcctgacccgacagaagaagctccaggccgaggcgaaaatggcattggccatggcaaagcctatggccaaaatgcaggtcgaggtggaaaagcaaaaccgtaagaaatcccccgtagctgatctgctcccacatatgccacacatttctgaatgtctgatgaaacggtcactgaagcccactgacttgcgggatatgaccatcggccagctgcaggtgatcgtaaatgatctccatagccagattgagagcttaaacgaagagttagtgcaactcctccttatacgcgacgaactccatacagagcaggacgctatgctggtggacattgaggacctcacacggcacgcagaatcacagcagaaacacatggctgagaaaatgccagccaagtag

SEQ ID NO: 28246 - DNA, 927 bp, synthetic construct
  source 1..927: mol_type = other DNA; note = Synthetic coding sequence
atgaaacgcgcacatcctgagtattccagcagcgatagtgaactggacgaaacgatcgaagtagaaaaagaaagcgcagatgagaatggaaacctgtccagtgctcttggctcgatgtctccgaccacatcctctcaaatcctggctcgaaagcgcaggcgtgggattatcgaaaagagacgtcgggataggattaataactctctcagtgaattgcggagactggtcccatccgctttcgaaaagcaggtgatggagcagggctccgctaaacttgaaaaggctgagatcctgcagatgactgtcgatcacctcaagatgctccatacagcaggaggaaagggatatttcgacgcgcacgcactggccatggactatagaagtttggggtttcgagagtgtctcgccgaggttgcgcgatacctgtcaatcatcgaaggtctggatgcatctgacccgctgcgcgtcagacttgtctcccacttgaacaattacgccagccagagggaggctgcttctggggcacatgccggactcggtcacattccttggggtaccgtctttggccaccacccgcacatcgcccaccctctattactcccccagaacgggcatggaaacgctggtacaaccgctagtccaaccgagccacaccaccagggccgtcttggcagcgcccaccccgaggccccagctctgcgcgctcccccttctggttctctgggtccggtgctacctgttgtgacctctgcctccaaactaagtcccccattactgagcagtgtcgcgtctctgtcagcgtttccattcagcttcgggtcttttcatcttctgtcccctaacgccctgtccccatcagctcccacgcaggctgcgaatcttgggaagccttaccggccatggggaaccgagataggtgccttttag

SEQ ID NO: 28247 - DNA, 1338 bp, synthetic construct
  source 1..1338: mol_type = other DNA; note = Synthetic coding sequence
atgagtgtcacatacgatgactccgtcggagttgaggtgagctctgactcgttctgggaagtcggtaactataaacggacagtgaaaagaatcgatgacggtcataggctgtgttcggacctcatgaattgtctacacgaaagggcgaggatcgaaaaagcctacgcccaacagttaaccgaatgggcacgtcgctggaggcagcttgtggagaaaggccctcagtacggaaccgtggaaaaagcttggatggctttcatgtccgaggcggagcgggtgagcgaattacacctggaagtgaaggcgtccctaatgaacgacgactttgaaaaaatcaaaaactggcagaaagaggcatttcataaacagatgatgggcggattcaaggagaccaaggaggccgaagacggctttaggaaagcacagaaaccctgggccaaaaagctaaaagaagtggaggccgcaaagaaggcccaccacgcggcttgcaaggaagagaaactcgccatatcacgggaagctaacagcaaggccgatccaagtttgaaccctgagcagctcaagaaactgcaagataaaattgagaaatgcaaacaagatgtcctgaaaacaaaagaaaaatacgaaaagtccctcaaggaactggatcagggcacccctcaatatatggagaatatggagcaggtgttcgaacagtgccaacagtttgaggaaaagcggttaagattttttagagaagtcctattggaggtacagaagcacttggacctctcgaatgtggcaggatacaaggccatttaccatgatcttgaacagagcattcgcgcagccgacgcagttgaagacctccgttggtttcgtgccaaccacgggccagggatggcaatgaactggccccagttcgaagagtggagcgctgaccttaatcggaccctctcacggcgtgagaagaaaaaggcgaccgatggagtgactctgactgggattaaccagacaggcgaccagtcgctgccttccaagccctcttctgtatcatcatacgagaagactcagtcgtacccgacagactggtctgacgacgagagtaacaatcccttttcttcaacagatgcaaatggcgattctaacccttttgatgacgacgcaacttcaggaactgaagttcgagtgcgggctttatatgattatgagggacaggagcatgatgaattgtctttcaaagctggagatgagttaacaaaaatggaggacgaagatgagcaagggtggtgtaaagggaggctagataatggccaggtagggctgtatccagccaattatgtcgaggcgatacaatag

SEQ ID NO: 28248 - DNA, 1248 bp, synthetic construct
  source 1..1248: mol_type = other DNA; note = Synthetic coding sequence
atgatgctcggccctgaggggggtgagggtttcgtcgtaaagttgcgtggcctgccgtggtcatgttcagtcgaggatgttcagaactttttgtccgactgcaccatacatgatggagcagctggggtccatttcatttatacccgcgagggacggcaatctggcgaggcatttgtagaactcggaagcgaagacgatgtgaagatggcccttaagaaagatcgggaatcaatgggtcatcggtacattgaggtgtttaagagtcacagaaccgaaatggactgggtgctgaagcattctgggccaaatagcgctgactccgcaaacgatgggtttgtgagattacggggtcttccattcgggtgtaccaaggaagaaatcgttcagttcttcagcggactcgagatcgtgccgaatgggataactctgcctgtggatcctgagggaaagatcaccggtgaggccttcgtccagttcgcgagccaggagctggctgagaaagcgcttggaaaacacaaggagcgcatcggacacaggtatattgaggtgttcaaatcttcccaggaggaagtgcgttcctactcggatccccctctgaagttcatgagtgtgcagcgcccagggccttatgatagaccgggaaccgcccgaaggtacattggaattgtgaaacaagccggattagagagaatgagacccggagcttacagcaccggatacggcggatatgaggagtattctggtctctctgatgggtacggctttacgacagaccttttcggaagggaccttagttattgcctgagtggtatgtacgaccataggtacggggatagtgagttcacagttcagtccactacaggccactgcgtacatatgcggggtctgccttacaaggctacggaaaatgacatatacaattttttttcccccctcaatccggttagggtgcatatcgagataggccctgacggaagagtcaccggtgaggccgatgtcgagtttgctactcacgaggaagctgtggcagcaatgtccaaagatagggcgaacatgcagcatcgatacatcgaattatttctgaatagcacaaccggcgcatctaacggggcatacagtagtcaagtcatgcaggggatgggtgtctccgctgcccaggctacttactccggccttgaatcccagagtgtctccggctgttacggggcaggatatagtggtcaaaattctatggggggttatgattag

SEQ ID NO: 28249 - DNA, 1770 bp, synthetic construct
  source 1..1770: mol_type = other DNA; note = Synthetic coding sequence
atgagtgtttctgtccatgaaaccaggaaaagccggtctagcactggctccatgaatgtcacactcttccacaaggcctctcaccccgattgtgtattagcgcacctcaacacactcagaaagcactgcatgtttactgacgttactctttgggccggtgaccgggcttttccatgccatagagctgtactggcggcatcgtctaggtatttcgaggccatgttcagccacggtcttagggagtccagagatgacaccgtgaactttcaggacaacctgcatccagaagtgcttgaactcctgttggatttcgcctatagcagccgcatagcaatcaatgaggagaacgccgagagtctgctagaagccggtgacatgctccagttccacgacgtgcgtgatgccgcagccgaatttctggagaagaacctttttccatccaactgcttgggaatgatgttactgagcgacgctcaccaatgtaggaggttgtatgagttcagttggagaatgtgcctggtacatttcgagacagtgcggcagagtgaggattttaactcgctgtctaaggacaccctgttggacttgatctcctccgatgaactcgagacggaggatgagcgggtggtgtttgaggcgattctgcagtgggtcaaacacgatcttgaaccacgtaaagttcacctgcccgagcttctgcgctccgtgaggctggcgctcctgccttctgactgtctacaggaagcggttagttccgaggctctattgatggccgacgagcggaccaagctcattatggatgaggcactgagatgtaaaacccggatcctgcagaatgacggcgtggttaccagtccctgcgctcgccctcgaaaggccggtcacacactccttatcttgggagggcagacattcatgtgtgataagatctaccaggtggaccataaggcaaaagaaattatccctaaagctgatctgccgtcaccccgtaaagagttttccgcttcagctatcgggtgcaaggtgtacgtgacgggaggccgtggatctgagaacggggtgtccaaagacgtgtgggtatatgataccgtgcacgaggagtggtctaaagccgctccaatgcttattgcaagattcggccatgggtccgcagaactcgaaaactgcctgtacgtcgtgggaggccacacttctctggcaggagtgttccccgcatctccttccgtgtccctgaagcaagtcgaaaagtacgatcccggtgctaataaatggatgatggtcgcaccactcagagatggcgtctcgaacgcagcagttgtcagcgcaaaattgaaacttttcgtctttgggggaacatcgatccatcgggatatggtatcaaaagtccagtgctacgatccctcggagaacagatggacaataaaggccgagtgccctcagccctggcgctataccgcggcagccgttctgggcagccagatattcattatgggtggcgacactgagttcacagccgctagtgcttatcgttttgactgtgaaaccaatcagtggactcgaattggcgacatgaccgccaagcggatgagctgtcacgcactagcatcaggtaacaaactatatgtggtcggtggctatttcggaactcaacggtgcaaaaccttggactgttacgatccgacttcagacacatggaattgcatcaccaccgtgccctattctcttattcccaccgcatttgtgtcaacctggaaacacctccctgcttag

SEQ ID NO: 28250 - DNA, 1311 bp, synthetic construct
  source 1..1311: mol_type = other DNA; note = Synthetic coding sequence
atgatgggagaagctgcagtggccgcagggccttgcccacttagggaggacagctttactcggttctccagtcagtctaacgtgtacgggctggccggaggagctggaggtcgcggagagctactggccgctacactcaaggggaaggtgttaggcttccgttaccaggacttgagacagaaaatacgacctgtggctaaggaacttcagtttaattatataccagtcgacgccgagattgtaagcatcgacaccttcaacaagagcccacccaagcggggattggtagtgggcataacctttattaaggattctggcgacaagggaagcccctttcttaatatttactgtgattacgagccaggatcagaatacaatctggattccattgctcagtcatgtctgaacctggagttacagtttaccccctttcagttgtgtcacgccgaggtgcaggttggggatcagctggagaccgttttcttactgtccggcaatgaccctgccattcatttgtataaagagaacgagggccttcatcagtttgaagagcaaccagtggagaatctgtttccagaattaacaaacttgacctccagtgtgctttggctcgatgtccacaattttcccggtaccagccgtaggctgagtgctttgggatgtcagtctggctatgtccgagtggcacacgtcgaccaacgctcccgggaagtattgcagatgtggtccgttctacaggatggccctatctccagggtgattgtgtttagcctgagcgccgctaaagaaacgaaagacagacctctccaggacgagtacagtgtgctcgtggcttcaatgctggaacctgcggtggtgtacagggatctgcttaatagggggttagaggatcagctgctactgcccggttcagatcagtttgactccgttctatgcagtttggtcacggacgtcgacctagatggtcgccctgaagtgctggtagcaacctatgggcaggagctcttatgttataagtatcgaggccctgaaagcggactcccagaggcacaacacgggtttcacttgttgtggcagagaagcttttcatctcccctgctggctatggcccacgtagacctcacaggcgatggcctgcaggagttggcagtggtgtctttgaaaggcgttcatatcctgcagcactctctaatacaggcgagcgagctggttctcactagattgcggcaccaagtcgaacaacggagaaggaggttgcaaggattagaggatggcgcaggagccggtcctgctgaaaatgctgcttcgtag

SEQ ID NO: 28251 - DNA, 642 bp, synthetic construct
  source 1..642: mol_type = other DNA; note = Synthetic coding sequence
atgcttcttccgttcatcagaaccctcccgcttctctgctataatcaccttctggtgtcaccagattccgctacactctcccccccttattctttggagaagatgaccgacctcgtggcagtctgggacgttgcactttctgatggagtccataaaattgagttcgagcacggaaccacaagtggcaagagggtcgtctacgtggatggcaaagaagagatacggaaagagtggatgtttaagctcgtgggaaaggaaacgttttacgtaggggctgccaagactaaagcaactatcaacattgatgcaatatcagggtttgcttatgaatacactttagaaattaacgggaaatcactgaagaaatacatggaagatcggtcaaaaacaaccaacacctgggtactgcatatggatggggagaacttcaggatcgtcctcgagaaggatgctatggacgtatggtgtaatggtaagaagctggagacggccggtgaatttgtcgacgacggcactgaaacccacttcagtataggtaatcacgactgctatataaaggctgtctcatccgggaaacgtaaggaaggcattatacacactctcatagtggataaccgggagatcccagaaattgcatcttag

SEQ ID NO: 28252 - DNA, 663 bp, synthetic construct
  source 1..663: mol_type = other DNA; note = Synthetic coding sequence
atgacatcaggtgaagttaagacatccttgaagaacgcttactccagcgctaaacgcctatctccaaagatggaggaagagggggaagaggaagattattgcactccaggtgcgtttgagttagaaagactgttttggaagggcagccctcagtacactcacgttaacgaagtctggccaaaactctacataggggatgaagcgaccgctctcgacagataccgcctgcagaaggccggatttacccacgtcctcaacgccgcacacgggagatggaacgtggataccggccctgactactatcgggacatggatattcagtaccacggggtggaggccgatgacctgcctacgttcgatctgtctgtcttcttctatccagctgccgctttcatcgatagagctctgtctgacgatcactccaaaatcctggtgcattgcgtcatgggtaggtcgaggtctgccacactggttctggcttatctgatgatccataaggacatgacactggtagacgccattcagcaggtagcaaagaatcggtgtgtacttcccaaccggggattcctaaaacagctgagggagctggataagcaactggtgcagcaaaggcgcaggagccagagacaggacggggaggaggaagacggtagggagttatag

SEQ ID NO: 28253 - DNA, 1845 bp, synthetic construct
  source 1..1845: mol_type = other DNA; note = Synthetic coding sequence
atgtcacccgctgatcggtgccgcagcgctaatactatcgaacctgccaccacgtccagcctggccttgttccttctgctgcagcgagaccagtccagcaggactcgcggtctgcctgaggagaaggaggaagtaactatggacaccagcgagaaccggccagagaacgacgtgcctgaaccacccatgcctattgcggatcaggtcagcaatgatgaccgcccagaagggtccgtggaggatgaagaaaaaaaagaaagctctctacccaagtcattcaaacggaaaatctcagtggtctccgctacaaaaggcgtccccgcaggcaactcggacaccgaaggcggacagcctggcagaaagaggcgatggggtgcatctaccgcaacgactcagaaaaagcctagtatctctataactacggagagcttaaaatcactcataccagatattaaaccattggctggccaggaggcagtggtggatctccacgcggatgacagccggatttccgaggatgagacagaaagaaacggagatgatggcacacacgacaagggattaaaaatatgccgaacggtgactcaggtagttccagctgagggccaggaaaacggccagcgagaagaagaggaggaggaaaaggaacctgaggccgagcctcccgtcccacctcaggtgagcgtcgaggttgccctgccaccccctgccgagcacgaggtcaaaaaggtaacactcggcgataccctgactaggaggtctatcagtcagcagaagagcggggtgagtatcacgattgacgatcctgtgcgtaccgctcaagttccatccccgcctaggggaaaaatctccaatatcgtgcacatctccaatctcgttcgtccgtttacactagggcagctgaaggagctgctcggcagaacagggaccttggtggaagaggccttttggattgataaaatcaaatcccactgttttgtaacgtacagcactgtggaggaggcagtggctactaggactgctctccacggagtgaagtggcctcagtcaaatccgaagtttctatgcgctgactacgcagagcaggatgagctggactaccataggggactccttgttgataggccttcagaaactaagaccgaggaacaaggcatccccaggcccttgcaccccccaccaccaccacccgtccagccaccacagcatccccgagccgagcagcgcgaacaggaacgcgctgtacgggaacagtgggcagaacgagagcgcgaaatggagcggcgagagcgaacccgttcagaacgagagtgggatagggacaaggtgagagagggtccacgttcccgatcccgctccagggacaggagaaggaaagaaagagctaaaagcaaagaaaagaagtccgagaagaaagagaaggcacaggaggaacctcccgcaaagctgctcgacgacttgtttcggaagacaaaggctgcaccctgtatatactggctgccgctaacagatagccagatcgtgcagaaggaggccgaacgcgcagagagagccaaggaacgggagaaacgcagaaaggaacaagaggaggaagagcagaaggaaagagagaaagaagccgagcgggaaagaaatcggcagctcgaaagagaaaaaagacgggaacactccagggaacgggacagggaaagagagagagaacgagagagagacagaggggaccgagaccgggacagggagcgcgaccgagagcggggtagagaacgagatagacgggacactaagcggcactctagatcacggtctcggtcgaccccagtgcgagataggggaggcagacgctag

SEQ ID NO: 28254 - DNA, 1203 bp, synthetic construct
  source 1..1203: mol_type = other DNA; note = Synthetic coding sequence
atgaagaacgagccgctcactcctggttatcatggatttccggctagagattcacagggaaaccaggagccaactacaactcctgatgccatggtacagcctttcaccactatcccctttccaccccctccccagaatggcattcccacagagtacggggttccacacacccaagactacgccggacaaaccggtgaacacaacctcaccctttacggaagtacccaggcccacggtgagcaaagctcaaatagccctagtacgcaaaatggttctcttactactgaagggggtgcccaaaccgatggccaacaatctcaaacacagtcctctgaaaatagcgagagtaagtccacacccaaacgtttgcatgtgtccaacattccgtttcggttcagagaccctgatctgagacaaatgttcggccaattcggtaagattctagacgttgaaatcatattcaacgagagaggtagtaaggggtttggctttgtcactttcgagaattccgccgatgctgaccgggctagagagaaactgcatggcaccgtcgtggaaggtagaaagatcgaggtcaacaacgctactgctagagtcatgaccaacaaaaagatggttactccatacgctaacggatggaaactgtcccccgtggtgggcgctgtatatggccctgagttgtatgcagcaagttctttccaggcggacgtctcactgggcaacgacgctgcggtgcctctctctggcagggggggaattaatacctatattcccctcatcattcctgggtttccataccccacagccgcaaccactgcagccgcttttcggggtgcccacctgagaggcagaggccgtacggtctacggggctgtgagggctgtaccacctaccgccattccagcctacccaggcgttgtgtaccaggacggcttttatggggctgacttgtatatcgagagtgctaattgctttcggagcaacagagttgatatgcagccaactgacatgcattctctactgttgcaaccgcagcctcctctcctccagcccctgcagcccctgacagtgaccgtgatggcagggtgcacccaacctacacctaccatgcccctgccactgccgcttgcaatggagctagcactgtggcgggtttacaccgaggttgcaacagctgatctccctcccactgaggtgacgtag

SEQ ID NO: 28255 - DNA, 1545 bp, synthetic construct
  source 1..1545: mol_type = other DNA; note = Synthetic coding sequence
atggatgagggaatggaaattagcagtgaaggaaacagtctgataaaggccgtccatcagtcccggttgcgcctgaccaggctgctcttggagggaggagcctacattaacgagtcaaatgataggggcgagacccccctgatgatagcctgtaaaactaagcacgtggaccaccagagtgtttctaaggctaaaatggtgaaatatctgttggagaataatgccgaccctaatatacaggataaaagtggcaaaactgccctgatgcatgcttgtctagagaaggcaggccctgaggttgtgtccctgctgttgaaatcaggggctgatctgtcacttcaggaccacagctcttactccgctctggtctacgctattaatagcgaagataccgaaaccctcaaggtcttgctttccgcttgtaaagccaaagggaaagaggtcattatcatcaccaccgccaaactgccatgtggcaagcacaccaccaagcagtacctgaatatgcctcccgtagatattgacggatgccactctcccgcaacatgcaccactccatccgagatcgatataaagacagcttccagtcctctgtcccacagtagtgagaccgaactgaccctttttggttttaaagatttggaattagccggaagcaacgacgacacctgggatcccggatcacccgtccgcaagccagccctagccccaaaaggcccaaaactgccacacgcccctccttgggtcaagagccccccactgttgatgcaccagaacagagttgcaagtctccaggaggagttgcaggacatcactccagaagaggagctcagttacaaaactaacggccttgcattgagcaagcgctttattaccaggcatcagagcattgatgtcaaggatacagcccacttactgagggcgtttgatcaggcaagcagtcgcaagatgtcctacgacgagattaattgtcagtcctacctgtcagaaggaaatcagcagtgcattgaggttcctgtagatcaagatccagactcaaaccagacaatttttgcaagcactcttcggtccatcgtccagaagagaaacctcggcgctaatcattacagttccgacagccagttgagcgccggtctgaccccgcctacatccgaagacggcaaagccttaattggtaagaagaaaatcctgtctccctccccctcccagttaagtgagagtaaggaactgctcgagaacatacccccaggaccactaagccgacgtaaccacgctgtgcttgagcgaagaggctccggggctttccccctcgaccacagcgtgacccagaccagacagggtttcctgcccccactaaatgtgaattctcatccacccataagcgacatcaacgtcaacaacaaaatatgcagcctgctgagttgcggtcagaaggtccttatgcctaccgtgcctatcttcccaaaggagtttaaaagtaagaagatgctgctgaggcgccaatccctacaaactgaacaaattaaacaactggttaatttttag

SEQ ID NO: 28256 - DNA, 1674 bp, synthetic construct
  source 1..1674: mol_type = other DNA; note = Synthetic coding sequence
atggaccaaagcagggtgttactctgggttaaggcagaacctttcatcgtcggcgctctgcaggtcccccctcccagtaaattcagtttacactacttaaggaaaataagtacatatgttcagatcagggccactgagggagcctaccctcgcctctactggtccacatggcggcacatcgcttgcggcaagttgcagttggcaaaggacctcgcttggctctacttcgaaatcttcgactcattatcaatgaagactcctgaggaaaggttggaatggagcgaagtcctctcaaactgcatgagcgaggaagaagtagaaaaacaaaggaaccaactatccgtcgataccctgcagtttcttttgttcctttatatccagcagcttaacaaagtgtctctgcgcaccagcttaattggcgaggaatggccctctccacggaacaaatcccagagtcccgacttgacagaaaaaagtaattgtcacaacaagaactggaacgattatagccaccaagccttcgtttacgaccacttgtccgacctgctagagttacttttggacccaaaacagttaacagcctcatttcattctacgcacagctcgctcgtgtcccgcgaggccgtggtggccctgagctttctgatcgaaggaactatctcaagagcccgtaagatttaccctctccacgagctagcgctttggcaacccctgcatgctgactccggcttcagcaagatttcaaagaccttctccttctataagctagaaacatggctgagatcctgtctgactgggaatcctttcggaactagcgcctgcctaaagagtggtaaaaaattggcttgggctcatcaggtggagggtactaccaagcgggctaaaatcgcatgcaatacccacgtggcacctcgaatgcaccggctagtggtgatgtcacaggtgtataagcagacattggcgaaatcgtctgataccttggccggagcccatgtcaaaatccaccgttgcaatgaaagcttcatatatctgctctctccattgcgatctgtcactattgagaaatgcagaaattccatattcgtgcttgggcctgttgggaccacactgcatttgcacagttgcgacaatgtgaaagtaatagccgtgtgtcaccggttatctatttcttcaactaccggatgcatcttccacgtcctgactcccacacgccctctgatcctgtctggaaatcagactgtgacctttgcgccttttcatactcactatcccatgctggaagaccatatggcccgtaccgggctcgccaccgtacccaactactgggataatcccatggtggtttgccgggagaactctgacacccgggtcttccagctactcccgccttgcgagttttacgtatttatcattccatttgagatggaaggtgatacgactgaaatccccggtggactcccttcggtgtaccagaaggctctgggacaacgagaacagaagattcaaatttggcaaaagaccgtgaaggaggcacatcttactaaggaccaaaggaaacagtttcaagtgctggttgagaacaagttttatgagtggctaatcaacaccggacatcgccagcagctcgactccctcgtgcctcctgcagccggatcgaagcaggctgctggctag

SEQ ID NO: 28257 - DNA, 648 bp, synthetic construct
  source 1..648: mol_type = other DNA; note = Synthetic coding sequence
atggttttccggaggtttgttgaagtcgggagagtcgcctacgttagtttcggaccacatgcgggaaaactggtggccatcgtggatgttatcgaccaaaatagggccctcgtcgatgggccttgcacccaggttcgacggcaggccatgccttttaaatgtatgcagttgactgattttatcttgaagttcccacacagcgcccatcagaaatatgtcagacaggcctggcaaaaagcggatatcaacacaaagtgggctgccacgagatgggccaagaagattgaagctcgggagcgtaaggcgaagatgacagattttgacaggttcaaagtaatgaaagctaagaagatgcggaatcgtattattaaaaacgaagtcaaaaaactgcaaaaggccgctctccttaaggcctctcccaaaaaggctccgggaacaaagggcactgccgctgcagctgctgctgccgcagcagccaaagtcccagctaagaaaatcaccgctgcctcgaagaaggctccggctcaaaaagtacctgcacagaaagctactggccaaaaagccgcacctgccccaaaagcacagaaaggtcaaaaggcaccagctcaaaaagctcctgcccctaaggcatccggaaagaaggcttag

SEQ ID NO: 28258 - DNA, 888 bp, synthetic construct
  source 1..888: mol_type = other DNA; note = Synthetic coding sequence
atggagctgatacaggatacgtctaggccacctcttgagtacgtaaaaggcgtccctctgataaagtacttcgctgaggccctgggtccactacagtccttccaggcaaggcccgacgacttgctgattaacacctacccaaaatctggcactacttgggtgtcccaaatactcgacatgatttaccagggaggcgatttggagaagtgtaatcgggctccaatatacgtgcgtgtgccgtttttggaggtgaacgatcccggagaaccctcgggcctggaaactctgaaagatacacctccccctcgcctgatcaaatctcatttgcctctggcacttctgccccaaacattgctggaccaaaaagtgaaggtagtgtacgtcgccagaaacccgaaggatgtggcggtctcatactatcattttcaccgaatggagaaggcacaccctgagccaggcacttgggacagtttcctggagaagttcatggctggggaagtgtcctatggaagctggtaccagcacgtgcaggagtggtgggaattatccagaacccatcccgtcctgtatctattctatgaagatatgaaagagaatcccaaacgcgaaatccaaaagattctcgagttcgtaggccgaagtctgcctgaggaaaccatggacttcatggtgcagcatacctcttttaaggagatgaagaaaaacccaatgaccaattacaccaccgttccgcaggagctgatggatcactcaatctctccatttatgcggaaaggcatggcaggcgattggaaaacaaccttcactgtagctcagaatgaaagatttgacgcagactacgctgaaaagatggcgggatgcagcctgtctttccgaagcgagctgtag

SEQ ID NO: 28259 - DNA, 1368 bp, synthetic construct
  source 1..1368: mol_type = other DNA; note = Synthetic coding sequence
atgagctccctgggggctagcttcgttcagatcaaattcgatgatctacaattcttcgagaactgtggcggagggtcattcggatcggtgtacagagccaaatggatttcccaagacaaggaggtggccgttaagaagctgctgaagatcgagaaggaagctgagatcctgagcgtgctttctcatcggaatatcatacagttttacggggtgatccttgagccacccaattacgggattgtcactgagtatgcaagtctgggctccctttacgactacattaatagcaacaggagcgaggaaatggacatggatcacatcatgacctgggctactgacgtggccaaaggtatgcattatctgcacatggaagctccagttaaggtcatccaccgtgaccttaagagtagaaatgtggtgattgccgcagacggagttctgaagatttgcgacttcggggctagccgattccacaaccacactacccacatgagccttgtggggacattcccttggatggctccagaagtgatacagtcactccctgtgagcgaaacttgtgatacctactcctatggggtcgtcttgtgggagatgctgaccagagaggtacctttcaaaggtctcgagggactgcaggtggcctggcttgtggtcgagaagaatgaacggctgaccattcccagctcatgcccccgatcgtttgctgagctgctccatcagtgctgggaggccgacgccaaaaaaaggccctcctttaaacagatcatctccatcctcgagtctatgtccaatgatacatcactgcctgacaagtgcaacagtttcctgcacaacaaggctgagtggcggtgcgaaattgaagccaccctggaaagactgaagaagcttgaaagagacctgtctttcaaggagcaagaattaaaagaacgggagcgcagacttaaaatgtgggaacaaaaattgacggaacagagcaacaccccccttcttcttccgctggcagcaagaatgtccgaggagtcatatttcgagagcaagaccgaggagagtaatagcgccgaaatgagttgccaaatcacggctactagtaatggcgaaggccatggcatgaacccgagcctacaggccatgatgctgatggggttcggagacatattctcaatgaacaaagccggagcagttatgcatagcggtatgcagatcaacatgcaggctaagcagaactcttctaagaccactagtaaacggagaggcaagaaagtgaacatggctttaggcttttctgactttgacctgtctgagggggacgatgacgatgatgatgatggggaagaggaggataatgatatggacaattccgagtag

SEQ ID NO: 28260 - DNA, 423 bp, synthetic construct
  source 1..423: mol_type = other DNA; note = Synthetic coding sequence
atgcggtttagattctgcggggatctggattgcccagactgggtcctggccgagatctccaccctggccaagatgtcaagcgttaagctgaggctcctgtgtagccaggttctgaaagaactgctgggccaggggatcgactatgaaaagatcctcaaattaacagcagacgctaagttcgagagcggtgacgtgaaggccactgtggctgtcctaagctttattctatcttccgccgctaagcactccgtcgatggggagtccctcagcagcgaactccagcagttggggctgcctaaagaacatgccgcttcactttgtaggtgctatgaagagaagcagagcccactgcagaagcacctgcgcgtgtgttccttgcggaagttaaagcaggcacagacactcatgtctagtctgggttag

SEQ ID NO: 28261 - DNA, 573 bp, synthetic construct
  source 1..573: mol_type = other DNA; note = Synthetic coding sequence
atgaccgcctctgcctctagcttctccagcagtcagggagtccaacagccgagcatttattccttctcacagataacccgcagtcttttcctctcaaacggtgtcgcggctaacgacaaactgctcctatcttcgaatcgcatcaccgctattgttaatgcatctgttgaagtggtcaatgtcttcttcgaggggatacaatacattaaagtgcctgttacagatgctcgggactcaaggctctacgatttcttcgaccccatcgccgatctgattcacactattgatatgaggcagggccgaaccctgttgcactgtatggccggagtcagtcgatctgccagcctgtgcctcgcatacttgatgaaatatcacagtatgtccctcttggatgcccacacttggaccaaatctcggagaccaatcatcaggcccaacaacggattttgggagcagctcatcaattacgagttcaagcttttcaacaacaacaccgtccgaatgatcaatagcccagtcggcaacatccctgatatttatgagaaggatctcaggatgatgataagcatgtag

SEQ ID NO: 28262 - DNA, 3576 bp, synthetic construct
  source 1..3576: mol_type = other DNA; note = Synthetic coding sequence
atgctcaggaagttaacaatcgagcaaatcaatgactggttcaccataggtaagacggtgacaaatgtggagttactgggcgctccacctgcctttcctgcaggcgctgctcgggaagaagtgcagcggcaagatgttgcccctggggcagggccagcagctcaggcaccagcgttagcccaggcccctgccagaccggcagcagccttcgaaagatccctgtctcagaggagtagcgaagtcgaatacataaacaagtatagacaacttgaggctcaagaacttgacgtgtgtagaagtgttcaaccaacttctgggccaggaccacgaccaagtttggcgaaattgagcagcgtaacatgcatccccggaaccacttataaatatcccgacctgcccatctccagatacaaggaagaagtggtgagcttgatcgaaagcaatagtgtggtgattatacatggggcaacaggctcaggcaagtctactcagctgccacagtacatcctggaccactacgtacagaggtcggcttactgctccattgtagttacgcagcctcgtaagatcggggctagtagcatcgcacgctggatttccaaagaacgagcctggacactaggaggtgttgtaggctatcaggtgggcctggagaagatcgcgacagaagacacccgtctcatatacatgactacaggagtcttacttcagaaaatcgtgtcagccaagtctttaatggagtttacgcacatcatcatcgatgaagtacacgagagaaccgaagaaatggatttcctgctgctggtggtaagaaagctgctgcgtacaaactctcgatttgtgaaagttgttctgatgtcggcgactatctcttgcaaagagttcgcagactacttcgccgtcccagtgcagaataaaatgaaccccgcttacattttcgaagtggaaggcaagccacactccgtggaggagtattacctgaatgatctggaacacatccaccactccaagctcagcccacacctgctggaagaacctgttattacaaaggacatttatgaggtagctgtttcattaatccagatgtttgacgatctcgatatgaaagagagtggtaataaagcttggtcgggggctcagttcgtgctggaaaggagttctgtactggtcttcttaccaggattgggagaaataaactacatgcacgagcttctgaccagcctcgtacataagcgtctgcaggtgtacccactgcacagcagtgttgcccttgaagagcagaataatgtgtttctaagtccggtacctggttatagaaagatcattctgtccacaaacattgccgagagctcagtgaccgtcccagacgttaagtatgtgattgatttctgtctaacgcgcaccctcgtgtgtgatgaagacaccaactatcagagcctgaggcttagttgggcaagtaaaacatcttgcaaccagagaaaaggcagggcagggcgagtgagccggggatattgctataggttagtgcacaaagatttctgggacaactctattcctgatcatgtcgtgcctgagatgttgcgttgccccctgggatcaacgattttgaaggtgaagctcctggatatgggcgagccccgagcccttctggccacagccctgtcccccccaggattaagcgacatcgagcggacaatacttcttttaaaagaggtcggtgccttggccgtgagtggtcagagggaggacgaaaacccgcacgatggcgagctgacttttctcggtagagtattagcccaactgcccgtgaatcagcagttaggaaaactgattgtgctgggccatgtgtttggctgtctcgacgaatgcctgatcattgcagccgcactgtccctgaagaacttcttcgccatgccgttcaggcagcacctggatggctaccgtaacaaggtcaatttctcgggctctagtaaaagcgattgcattgccctggtcgaggccttcaaaacgtggaaggcatgtagacagacaggcgagctccggtaccccaaggatgaactcaactggggaaggctcaactatatacagatcaaacgaatcagagaggtcgcagagctttacgaggagcttaagaccagaatatcccaattcaacatgcacgtggattctagaaggcccgtgatggaccaggaatacatttacaagcagagattcattctccaggtagtgctggccggagcattctatcccaattacttcacgtttggacagccagatgaagaaatggcggtccgtgagctagccggaaaagaccctaagactactgttgtgctaaaacatatcccgccatacggattcctttattacaagcagctgcagtccttgtttcgccaatgcggccaggttaaatcaatagtctttgacggagcaaaagccttcgtggaattttctcgcaatcctacagaacgcttcaaaactctaccggctgtgtatatggccattaagatgagtcagctgaaggtgtccctagagctgtctgttcacagcgcagaagagattgaaggaaaggttcaaggcatgaatgtgagcaaattgcgaaacacccgcgttaacgtggattttcaaaagcagacagtggacccaatgcaggttagcttcaacacatccgatcgatcacagaccgtgacagacttgctcctgaccattgatgtgaccgaggtggtggaggttggccatttctggggatacagaatagatgaaaacaacagtgaaatcctcaagaagctaaccgccgagatcaatcagctcactctggtgcctttacccacccacccccacccagatttagtgtgcctggcgccattcgcagactttgacaagcagaggtatttccgggctcaggtgctttacgtctccgggaatagtgcggaagtgtttttcgtggactatggcaacaaatcccacgtggacctgcatctcctgatggaaattccgtgccaatttttggaattgcctttccaggccctggagttcaaaatctgtaagatgcggccatcagccaaatcactcgtgtgcggaaagcactggtccgatggcgcatcccagtggttcgccagtctcgtgagcggatgcaccctgctcgtgaaagttttctctgtagttcatagtgtgctccacgtagacgtgtaccagtactcaggagtgcaggacgccattaatatcagggacgtgctgatccaacagggctatgccgaactgacagaagagtcttatgagtcgaaagtaaatatattaagagcagcgattaacaagcttgtgtgtgacgggccaaacggttgtaaatgtctgggacctgaaagagttgcccagttacaggatatcgctcggcagaagctgctcgggctcttctgccagagcaaaccaagagagaagatagttcccaaatggcacgagaagccttacgaatggaatcaggtggaccccaagcttgttatggagcaggccgaccgggaaagttcaagaggcaaaaacacgttcctttaccagttgcataagctggttgttcttggcacctag

SEQ ID NO: 28263 - DNA, 906 bp, synthetic construct
  source 1..906: mol_type = other DNA; note = Synthetic coding sequence
atgacaagacatggcaagaattgtactgctggggcagtgtatacgtatcacgagaagaaaaaggacactgccgcatctggctacggaacacagaacattcgactcagtcgtgacgccgtgaaggacttcgattgttgctgtctgtcactgcagccgtgtcacgatcccgtcgtaacacccgacggatatctctacgaacgggaggcaatcctggagtacattctccaccaaaaaaaggaaattgccagacaaatgaaggcctatgaaaaacagcggggaacaaggagagaagagcagaaggagttgcaaagagctgcgtctcaggaccatgtcaggggcttcctagagaaggagtccgccattgtttcacgccctctcaacccctttactgcaaaagcattaagcggtaccagccccgatgacgtccaacccggtccctccgtagggcctccaagcaaagacaaggataaagtactaccgtcattctggatccctagtctgaccccagaggcaaaggctacaaagctcgaaaaacctagccgcaccgttacttgtccaatgagcggtaaaccattgagaatgtctgaccttactccagtgcacttcactccactcgactcaagcgttgaccgtgtggggctgattaccaggagcgagagatacgtgtgtgctgtgactcgagattcgttgtctaacgccacaccttgcgcggtactcagacctagcggtgccgtggtgaccctggagtgcgttgagaaacttatacgcaaggacatggttgatccagttacaggggataaactgaccgatagagatatcattgtactgcagcgcggaggtaccggattcgctgggagtggggtcaagctccaggccgagaaatcccggcctgtgatgcaagcctag

SEQ ID NO: 28264 - DNA, 1509 bp, synthetic construct
  source 1..1509: mol_type = other DNA; note = Synthetic coding sequence
atgcaaagctgtgaatcgtctggggactcagctgatgaccccttgtcccggggactgcggaggcgtggccagccaagagtcgtcgttataggggctgggctggcaggccttgcagccgctaaggcacttctggaacaggggtttactgacgtaaccgtcttggaggcctcttctcatattggtggtagagtacagagtgtgaagctgggacacgcaacattcgagctcggcgctacatggattcatggctctcatggaaacccgatttatcatctggcggaagcgaacgggctgctggaggagactaccgacggtgaacggtccgtcggtaggattagcctatactcaaaaaatggcgtggcctgctacctgactaatcatggaagaagaatccctaaggacgtagtggaggaattcagtgatttatataacgaggtgtacaatctaacccaagaattctttaggcacgacaagcccgtcaatgcagagagccaaaactccgtgggcgtgttcacaagagaagaagttaggaatcgtatccgcaatgaccctgacgaccctgaagccaccaagaggcttaaactggccatgatccaacagtacctcaaagttgagtcctgcgagtctagtagtcattctatggatgaagttagcctgtctgcttttggagaatggacggagattcccggtgctcaccacataattccttctggcttcatgagagttgtggaattgctggctgagggcatcccagctcatgtcatacaactggggaaaccggtccgatgcatccactgggatcaggcctccgcccgtccccgtggcccagagatagagcccagaggagtcctgaaacggcagtatacaagcttctttcgcccaggtctcccaactgagaaggtcgcagcaattcaccgcctcggcattgggaccaccgacaagatcttcttagaatttgaagagcctttttggggccctgaatgcaactcactccagttcgtatgggaggatgaggccgagtcacatactctgacgtatccccctgaactatggtaccgcaaaatttgtggcttcgacgttctgtaccccccagagaggtacggccacgtcctctcgggctggatctgcggcgaagaggcattagtgatggagaagtgcgacgatgaggccgtggccgaaatctgcacagaaatgcttaggcagttcacaggcaacccaaacattcccaagcctagacgaatactgcggagcgcatggggctcaaatccttactttcggggatcatatagctacactcaggtcggatcctctggcgcagatgtggaaaaattggcgaagcctctgccgtatactgaaagctctaagacagctcccatgcaagtgttgttctccggtgaggcgactcaccggaagtactacagtaccacccatggcgcactattaagtggccagcgagaagccgcaaggctcattgaaatgtatagagaccttttccagcaggggacttag

SEQ ID NO: 28265 - DNA, 579 bp, synthetic construct
  source 1..579: mol_type = other DNA; note = Synthetic coding sequence
atgggaacattcgatctgtggactgattatctgggcctggcccacctggtgcgtgcactttctgggaaggagggccctgagaccagactatcgccacagccagagccggagcccatgctagaaccagtctcagcactcgagccaatgccagcccctgagtctgtgcctgtgcccggtccgaaagatcagaagcgcagtcttgagtcttccccagccccagagagactgtgttccttctgcaagcacaatggggagagccgcgctatttaccagagccatgtcctcaaggacgaagccggacgggtactgtgcccaatcctgagggattacgtgtgtccacagtgcggagccacgagagagagagcacatacccgtcgattttgcccccttacaggccagggctacacgtcagtctactctcacacaactcgcaattctgctggaaaaaaactcgtgcgacccgacaaagcaaagactcaggataccggccaccggcgtggtggaggtggcggtgcgggattcaggggtgcaggaaagtcagagccatctccctcgtgctctcccagcatgtctacctag

SEQ ID NO: 28266 - DNA, 2568 bp, synthetic construct
  source 1..2568: mol_type = other DNA; note = Synthetic coding sequence
atggccgttgaggacagtacactgcaagttgtggttagggtccgccctccaacaccgcgtgaactggacagccagaggcgcccagtcgtgcaagtcgtggacgagagggtcctcgtcttcaacccggaggagcccgacggcggttttccagggttgaaatgggggggaactcatgatggtccaaagaagaagggtaaggacctgacgttcgtcttcgacagggtatttggtgaagccgctacacagcaggatgttttccaacatacaacacactctgtactggatagcttcctccaggggtataactgcagcgtgtttgcttacggcgcaactggcgctgggaagactcatactatgcttggcagggagggtgacccaggcatcatgtacttaactacagtggaattatatcggcgactagaggcgagacagcaagaaaaacatttcgaggtcctcataagctaccaggaagtgtacaacgaacagatacacgacctcctcgagccaaaagggccacttgcaatacgcgaagatccagataagggtgtagtggtacaagggctcagcttccaccagcccgcttcagcagaacaactgctcgagattttgacccgcggtaatcgcaacagaacacagcaccctactgatgctaatgcaacgtcttcccgttcccacgccatattccaaattttcgtcaaacagcaggaccgggtgccaggcctcacacaggccgtccaggttgccaaaatgagcctgatcgacctcgcagggagcgaacgggcaagctcaactcatgccaagggagagagactgagagagggcgctaatattaatagatcccttctggccctgattaacgttttgaacgccctggccgacgccaagggacgcaaaacccacgtgccttacagggatagtaagctgacacggctgctcaaggactcacttggcggaaattgcagaacagtcatgattgcagcaatcagtccctctagcttgacctatgaagacacatacaacacattaaaatacgccgaccgcgcaaaggaaatccgcttgagccttaagagcaacgtgacttccctggattgccacatctctcaatacgctacaatatgccagcagctacaggcagaggtggcggcactgcggaaaaagctccaagtatatgagggagggggtcaacctcctccccaagatctccccggaagccccaagtccgggcctccacccgagcacctgccgagctcacctctgcctccacatccaccttcacaaccatgtacaccggagctgcctgccggtccacgcgctctccaggaggagagtttagggatggaggcacaagtggagagggccatggagggcaattcaagcgaccaagaacagagcccagaggatgaggatgagggcccagccgaagaggtgccaactcagatgcccgaacagaatccaacccacgccctgcccgagagccctcgattgaccttacagccaaagcccgtcgtgggccatttttccgctcgtgaattggatggagatagatccaaacaactcgcattgaaggtgttgtgcgtcgcccaaagacagtactcactactccaagcagccaatctcctcactccggacatgattactgaatttgaaaccctgcagcaactggttcaggaggaaaagatcgaaccaggagctgaagccttaagaaccagcgggcttgctaggggtgcacccctcgcccaggagctctgcagcgagagcaaaccccctggctacacgggacctgttacaaggactatggcacggaggctgtcgggccctctccacacgttggggatcccacctgggccaaattgcacgcccgctcagggcagtcgatggcctatggaaaaaaaaagacgcaggccaagtgcacttgaagcagattcaccaatggccccaaagagaggcactaagaggcaaagacagtctttcctcccttgtctgcggaggggtagcttgcccgatacccagcctagtcaggggccatccactccgaaaggagagagagcctcttcaccctgccatagccctagagtgtgccccgcaaccgtgattaagtctagagtacccctcggcccatcagccatgcagaattgcagcacgccactggcgttgccaacacgtgatttaaacgcaactttcgatctttccgaagagcctccctccaagccctcgttccatgaatgcattggctgggacaagattccccaagagctgtccagattggatcagcccttcattcctcgcgctccagtgccgctattcaccatgaaggggccaaagccgaccagttcattgccaggcaccagcgcttgcaagaagaagcgagtggcctccagttctgtatcgcatggaagaagcaggattgcgcgactgcccagcagcactctcaagcggccagctggcccactcgttttacctgaattaccgctgtcacccctttgcccatctaaccgccgaaacggaaaggacttgataagagtgggtagggccctcagcgcagggaacggtgtgacaaaagtgtcttag

SEQ ID NO: 28267 - DNA, 444 bp, synthetic construct
  source 1..444: mol_type = other DNA; note = Synthetic coding sequence
atgtggaaatttccaggtgggctgtctgagcccgaggaagatataggggataccgctgttagggaagtgttcgaagagactggtataaaatcagaattccggtctgtcttatccatcagacagcaacacacaaaccctggggcatttggtaaaagcgacatgtatatcatttgccgcctgaaaccttacagctttacaataaatttctgccaggaggagtgcctgcgatgcgagtggatggacttaaatgacctggccaagaccgaaaacacaactcctatcacaagccgagttgctcggctgctgctgtatggctaccgcgaaggattcgacaaaatcgacctcaccgtggaagagctcccggcagtgtacactggcctgttttacaaattataccataaggagctccccgagaattacaaaactatgaagggtatcgactag

SEQ ID NO: 28268 - DNA, 3327 bp, synthetic construct
  source 1..3327: mol_type = other DNA; note = Synthetic coding sequence
atggccttacgccctggcgcagggtcggggggagggggtgcggcaggcgcaggggcaggtagcgctgggggaggtggcttcatgtttccagttgccggagggattaggcctcctcaggccggtctgatgccaatgcagcagcaaggatttcccatggtttctgtgatgcagcctaatatgcagggaatcatgggtatgaattactcctctcaaatgagtcagggcccaatcgcaatgcaggccggaatccctatgggaccaatgcctgccgcaggaatgccctacttagggcaggcacctttcttaggaatgcgaccccctggccctcaatataccccagacatgcagaagcaatttgctgaagagcagcagaaaaggttcgagcagcagcagaaactactagaggaggagaggaagaggcgccagtttgaagaacagaaacagaagctgagattgctgagctctgtgaagcccaagacaggagagaagtcaagagacgacgcattagaggccattaagggcaacctcgacggctttagtcgggacgccaaaatgcatcctacgcctgctagtcacccgaaaaaacctggggtgggcgtatttccatcccaggacccagcccagcccagaatgccaccctggatttacaacgaaagtctggttccagacgcatacaagaaaatcttggaaactacaatgacccccacagggatagatacggctaagttgtatcccatcctcatgtcgagtggcctgccaagagaaaccctaggacagatttgggccctggctaaccggacaacacctggcaaactgaccaaggaagagttgtacacagtgcttgctatgatcgcagtgactcaggtcgtgaaaccggaggaagacgactttcaggatttccaggacgcctccaaatctggaagcctcgatgattctttctcagatttccaggaactgcccgcatcctctaaaacctcaaacagtcaacatggcaatagcgccccttctctgctgatgccactgcccggaacaaaggccctgccatcaatggacaaatatgctgtgttcaaggggattgcagcggacaaatcgtccgaaaataccgtgcctccaggcgaccccggagataagtatagcgcattcagagaactcgaacagactgcagagaacaaacccctgggagagtcctttgccgagttccggtccgccggaacagacgacggcttcacagacttcaagaccgcagattccgtcagccctctggagccccctactaaagacaaaacctttccaccttcttttccatcagggaccatccagcagaaacagcaaactcaggtgaaaaacccactcaatctggcagatttggatatgtttagttcagtgaattgttccagtgagaaaccgttaagcttttcagctgtattcagcacatccaagtcagtgtccactcctcaatctacaggttcagcggcaaccatgactgctttagcagccactaagacgtcgagtctggccgatgacttcggcgagttttcgctgttcggagagtactctggactggcgcctgtaggggagcaggatgacttcgcggattttatggcattctcaaactcctcaatttcaagtgagcagaagccagatgataaatacgacgcattgaaggaagaagctagcccagtccctctcaccagcaacgtgggaagtacagtaaaagggggacagaatagcaccgccgcttctactaagtacgacgtgtttcggcaacttagcctcgaggggagcggccttggagtggaagatctcaaagacaatacacctagtggcaagtcagatgacgacttcgccgacttccacagtagtaagttcagcagtatcaacagtgataagtccttgggggagaaagccgttgcatttagacacactaaagaggatagtgccagtgtgaaaagcctcgaccttccctcaatcggcggaagcagcgtcggcaaggaagattcagaggacgctctgagcgtccaattcgatatgaagctagcagacgttggtggcgatctgaagcacgttatgagcgactcatctctggatttgccaacggttagcgggcagcatcccccagcggcagccggatcaggttcaccaagtgctacctccattctccagaaaaaagaaacaagctttggcagttcagagaatatcactatgacgagcctgagtaaggttaccacattcgttagtgaggatgctctccccgaaacaactttccccgctctcgccagcttcaaggacacgatacctcagaccagcgaacagaaagagtacgaaaacagagactataaagacttcactaaacaggacctccccactgccgaaagaagccaggaggccacttgtcccagccccgcttcgagtggtgcaagccaggagacacctaacgagtgcagcgatgatttcggcgagtttcagtctgagaaacccaaaatatcaaagttcgatttcctagtagccacttcacagtctaagatgaagagctcagaagaaatgatcaaatctgagttagcaactttcgatctctccgtgcaaggttcccataaaaggagccttagcctgggcgataaggagattagtagaagctcccccagtccggctctagaacagcccttccgcgatcgttcaaacacacttaatgaaaagcctgctctgccagtgattagagataagtacaaggatttgaccggggaagtggaagagaatgaacgttatgcatatgagtggcagaggtgcttgggaagcgctctaaacgtcatcaaaaaagccaacgatactttgaacggcatctccagcagtagcgtgtgtacagaagtgattcagtctgcacagggaatggagtatctcctgggggtagtggaagtgtacagagttactaaaagggtagagctcggtattaaggctacggctgtgtgtagcgagaaactccagcaactgctgaaagatattgataaggtgtggaacaatctgattgggtttatgtctcttgccaccctgacgcctgacgagaattccttggacttctcttcctgcatgctacgcccaggcataaagaatgcccaagaactagcctgcggggtatgtctgctgaacgtagacagccgttctagaaaagaagaaaagccagccgaagaacacccaaagaaagccttcaatagtgaaacagatagttttaagctggcatatggtggccaccaataccacgcgtcttgtgctaatttttggattaactgcgtggaaccaaagcccccaggcctggtgctacccgaccttctgtag

SEQ ID NO: 28269 - DNA, 1257 bp, synthetic construct
  source 1..1257: mol_type = other DNA; note = Synthetic coding sequence
atggaaacacacatctcctgcttattcccagagctcctggccatgatcttcgggtatctcgacgtgcgcgataaggggcgtgccgctcaggtttgcaccgcctggcgagatgccgcataccataaaagcgtgtggagaggggtggaagccaagctgcatctacggcgagccaaccccagcctctttccatcccttcaggctcgcggaatccgtcgggtgcagatcctgagcctgcggagatccctcagctacgtaatccagggcatggcaaatattgaatctctgaatctgagcgggtgttacaatctgacagataacgggctgggccatgcgtttgtccaggagatcgggagtctaagggccttgaacttatctctatgcaagcaaatcacagactccagtttgggtcggatcgctcagtacctgaaggggctggaggtgcttgagctcgggggatgctctaatatcactaataccggtcttttgctcatagcttggggactacaaagactgaaaagccttaatctccgcagctgcagacatctctcggatgtgggtattggacatcttgcaggaatgacccgatcagctgcggaaggttgtctcggcctggagcaattgactcttcaggactgccagaaactcactgatctgagcttaaagcacatcagtcggggacttacaggattgcgcctgttaaatctgtcgttctgcggagggatctctgacgcgggacttctgcacctctctcacatgggaagccttcgatccctgaacctgcggtcctgtgataacatctccgataccggtattatgcatctcgccatggggtccttacgcctgtcaggactggacgtgtcgttctgcgacaaagttggcgatcagtccctcgcatacatcgcacagggactcgacggcctgaagtctttaagtctttgcagctgccacatatcagacgatggaataaatcgaatggtcagacaaatgcacggtctgcgtacccttaacattggccagtgcgtgagaattaccgataaaggtctggagctaatcgctgagcatctctcccaattgacaggcatcgatttatatgggtgtacacgcataaccaagcggggactggagaggatcacccaacttccttgcttaaaagtactgaacctcggcctttggcagatgacggattcagaaaaggaggcgagaggggatttcagtcccctctttacagtgcgaacaaggggatcctccagacggtag

SEQ ID NO: 28270 - DNA, 1371 bp, synthetic construct
  source 1..1371: mol_type = other DNA; note = Synthetic coding sequence
atggccgctgccctgaagtgtctgttgaccctggggagatggtgcccaggactgggagtggccccacaggcaagagcactggctgccctagtgcccggagtgactcaggtagacaacaaatctggattcctccagaaacggccacatcgccagcatccgggtatactgaagctgcctcacgtgagactgccccaggccctggctaatggagcgcagctattgctgctgggctccgcgggtccaaccatggagaatcaagtacagacactcaccagctacctttggagtaggcacctgcccgtcgagcctgaagaacttcagagacgggctcggcatcttgagaaaaagtttctggaaaaccccgatctgagtcagacagaagagaagctgcgcggagctgtgctgcacgcactgagaaaaaccacatatcattggcaggaactgtcctacacagagggtctgtccctggtttacatggcagccagattggatgggggattcgcggctgttagccgggctttccacgagatacgagctcgcaatccagcattccagccacagacattaatggattttggatctgggacaggctcagtcacatgggcggctcacagcatttggggacagagtctgcgcgaatatatgtgtgtcgaccggtctgcggctatgctggtgttggcggagaagctccttaagggcggttcagagtcaggcgaaccctacatccccggagtgtttttcaggcagtttctgccagtgagtccaaaggtccagtttgacgttgttgtctcagcgtttagcctcagcgaactcccatccaaggctgatcgtacagaagtggtgcaaaccctgtggagaaaaactgggcactttttggtcctcgttgaaaacggaacgaaggctggccacagtctgctgatggatgccagagacctggtcctgaagggcaaggagaaatccccgttggaccctcggcctggctttgtgtttgccccttgcccacacgaactcccatgtccacaattgacaaacctcgcttgttctttctcgcaggcctaccacccaatacctttcagctggaataagaagcctaaggaagaaaagttctccatggtcattttggcaagggggtcgccagaggaagcccacagatggccccgtataactcagcccgttctcaagcgccctcgccatgtgcattgtcacctgtgctgccccgacggacacatgcaacatgcggtccttaccgctaggcgacatggtcgggatttgtaccggtgtgctcgggtctcttcgtggggcgatctattgcccgttctcacacctagtgccttcccgccaagcacagcccaggacccatcagaatcttag

SEQ ID NO: 28271 - DNA, 756 bp, synthetic construct
  source 1..756: mol_type = other DNA; note = Synthetic coding sequence
atggacatgaagaggaggatccaccttgaattaaggaataggacacccgctgccgtgagggagctcgtactggacaattgtaagagcaatgacggcaagatagagggcctcactgcggagtttgtgaacctggaattcctgagcctgattaacgtgggtctaatatctgtatctaacctaccaaagctccccaagttgaaaaaactcgagctgagtgagaatcggatatttggcggactggatatgctggcagagaaactgcccaatctgacacatctaaatctgtccggcaacaaacttaaggatatcagtacattagagcccctgaagaagttagaatgcctgaagagtctagacctgttcaactgtgaggtcactaacctcaatgattaccgggaatctgtctttaagctgctaccgcagctgacttatctcgacggatatgatcgtgaggatcaggaggcacccgacagtgatgccgaagttgacggagttgatgaagaagaggaggatgaagaaggagaggacgaggaggatgaagacgatgaagacggagaggaagaggaattcgacgaagaagacgatgaggacgaggacgtggagggagacgaagacgatgacgaggtaagtgaagaggaggaagagtttgggctggatgaggaggatgaggacgaagatgaagacgaagaggaagaggaagggggtaagggtgaaaagaggaagagagagactgacgacgagggggaagacgattag

SEQ ID NO: 28272 - DNA, 510 bp, synthetic construct
  source 1..510: mol_type = other DNA; note = Synthetic coding sequence
atgtccgctccccctgcacttcagatccgggaagccaatgctcacctcgccgcagtccatcggagagctgcagagttagaagccagattagatgccgctgagcggactgtacacgctcaggcagaacggctcgccctgcacgaccaacaattacgcgctgccctggatgaactcggtagagccaaagatagggagatagctacacttcaggagcagctaatgacctctgaggcgaccgttcatagtctccaggccactgtgcatcagcgggatgagctaatccgccagctgcagccccgtgccgaactgctgcaggatatttgccgacggaggcctccccttgctgggctcctggacgcccttgccgaagctgagagattagggcctctacccgcttccgaccctgggcatccacctccaggcggaccaggaccccctttagacaactcaacaggggaagaggcagaccgagaccacctgcagccagccgtgttcggcaccactgtgtag

SEQ ID NO: 28273 - DNA, 2079 bp, synthetic construct
  source 1..2079: mol_type = other DNA; note = Synthetic coding sequence
atgaaaatcttttgctcccgggcaaaccccacgaccggtagcgtggaatggttggaagaggatgagcactatgattaccaccaagagattgctcgatcatcttatgcagatatgctacacgacaaagaccgaaacgtgaagtactaccaggggatccgcgctgctgtcagccgtgtaaaggacaggggacagaaggcactggtgttggatatcggcacaggaactggactcctgtcaatgatggccgtgacagccggagccgacttctgttacgccatcgaagtcttcaaacctatggccgacgctgccgtgaagatagttgaaaagaacgggttctcggacaaaattaaagtgatcaataaacactcaactgaggttactgtgggacctgaaggtgacatgccatgtagagctaatatactggtgactgagctctttgacacagaactaataggggagggcgctctgccttcgtacgagcatgcccataggcacctggtagaagaaaactgcgaggccgtccctcacagagccactgtgtacgctcagctcgtcgaaagcgggaggatgtggtcctggaataaactgttccccatacacgtgcaaacaagtttgggggagcaagtgattgtccctcccgtcgatgttgagtcgtgccctggagctcctagcgtatgtgatattcagctcaaccaggtctcccctgccgactttaccgtcctgagcgatgtgcttcctatgtttagtatcgatttcagtaaacaggtatccagctccgctgcctgtcactctaggcgttttgaaccattgaccagcggcagggcacaggttgtcttgtcatggtgggacattgagatggatcctgagggtaagatcaaatgcacaatggcgcctttttgggctcattccgaccctgaagaaatgcagtggagggatcactggatgcagtgtgtctattttcttcctcaggaagaaccagtcgtgcaagggtcggccctctacctcgtggcacaccatgacgactactgcgtatggtacagtttgcaacgtacttctcctgagaagaacgagcgggttaggcagatgcgacctgtatgcgattgccaggcccacctcctgtggaaccgaccaaggtttggcgagatcaatgaccaggatcgaactgatcggtacgtccaggctcttcggacagtgctgaaacctgactcagtgtgcctgtgcgtaagtgacgggagcctcctgagtgtcttagctcaccacttaggtgtggagcaggtcttcacggtggagtcctcagccgcaagccataaacttctccgaaagatatttaaagcaaatcaccttgaagataaaatcaacattattgaaaagagacccgaactgttgactaatgaggatctccaggggaggaaagtgagtctgctcctcggagagccattcttcactacatccttgctcccctggcacaacctgtacttctggtacgtccgcaccgccgtggatcaacacttgggccctggggcaatggtgatgccacaggctgccagcctgcacgccgtggtagtggaattccgggacttgtggaggatacgctctccatgcggggactgtgaaggcttcgacgtgcacattatggatgatatgatcaagcgtgctctggatttccgggaatcaagagaggctgagccgcaccccctatgggagtatccttgccggagtctcagcgagccgtggcagattctcacgtttgacttccaacaaccagtgcccctgcagccactgtgtgccgaagggaccgtcgaactacgccgaccaggccaatctcacgcagctgtcctttggatggaataccacctgaccccagagtgtacactgagcactgggctcctggaacccgctgacccggagggaggatgttgctggaacccccattgtaagcaggccgtctacttcttcagcccagctcccgatcctcgggctttactcggcggacccagaacggtgtcctatgcagtcgaattccatccagacacaggggatattatcatggagtttaggcacgctgacactcctgattag

SEQ ID NO: 28274 - DNA, 468 bp, synthetic construct
  source 1..468: mol_type = other DNA; note = Synthetic coding sequence
atgaccgtcgaggggcctccccctaaagacaccggcattgcccgtgttcccttggcgggtgcggcaggaggccctgggatcgggagagcagcgggacgtgggattcctgcaggcgtgcctatgccccaggcccctgctggccttgcagggccagtccgcggagttggaggcccaagccagcaggttatgaccccccagggacggggaacagtggccgctgcagccgcagccgcaacagctagtattgctggcgctcccacccagtaccctcctggtagaggaggccctccccctccaatgggtcgaggtgctccacccccaggaatgatgggcccaccacccggaatgagaccacccatgggaccgccaatggggattccaccagggcgaggtacaccgatgggaatgccaccacccggaatgcggccaccccctccaggaatgcgaggcaaatgtctgcaatggtag

SEQ ID NO: 28275 - DNA, 402 bp, synthetic construct
  source 1..402: mol_type = other DNA; note = Synthetic coding sequence
atgacgcgaggtaaccaaagggaactagccagacaaaagaatatgaagaaacaaagcgatagcgtgaaaggcaagcgcagggacgacggactgagcgccgctgctcggaaacagagcgcaccctcttcactgcccccaggcacacgacggtcatgctccaggagtagaaaaaggcaaacccggcgtaggcgtaatccgtcctcctttgtcgcctcttgccctacacttctccccttcgcatgcgtgccaggcgctagcccaaccacgctggcattcccacctgtcgtgcttacaggcccaagcactgacggaatcccgttcgctctgtctctgcagcgcgtgcccttcgtcctgccaagcccacaggtagcgtctcttccactggggcattcacgcggatag

SEQ ID NO: 28276 - DNA, 1809 bp, synthetic construct
  source 1..1809: mol_type = other DNA; note = Synthetic coding sequence
atggccgagttcagggtacgtgtgagtactggggaagccttcggtgcgggaacctgggataaggtgtcagtctcaatagtggggacacgtggcgagagcccccctcttcctctcgataacctgggcaaggagttcaccgcaggggcagaagaggacttccaggtcacattgcccgaggatgtcgggagagtgctcctgctgcgcgtgcataaggcaccacccgtccttcccttactgggaccactcgcccctgatgcttggttttgccgctggtttcagttgaccccgccaagaggcggacacctcctttttccttgctatcagtggttagagggagcaggcaccctcgtgttacaagagggtaccgcaaaggtgagttgggctgatcaccacccagtactccaacagcaaaggcaggaggagctccaagcacgccaggaaatgtaccagtggaaagcctataatcctggatggccccactgtctggacgaaaaaactgtcgaagacctggagttgaacataaaatactcaacagcaaagaacgctaacttctatctgcaggccggttccgcctttgccgagatgaaaatcaagggccttctcgatcggaagggtctgtggcggagtctgaacgaaatgaagaggatattcaattttagaagaacccctgcggcagaacatgcatttgagcactggcaggaggatgccttcttcgccagccagtttctgaatgggttgaaccctgtgctcatccggaggtgccattatttaccaaaaaacttcccagtcacagatgctatggtagcatcggtactaggacctggcacatcactgcaggctgaacttgaaaaggggtctctctttctggttgatcacggtatcctgtccggcattcaaactaatgttattaatggaaagcctcagttttctgcggctcctatgacactcctctatcagtcccccggttgtggccctctcttgcctttagccattcaattgagccagacaccaggtcctaactctcccatcttcctgccgactgacgacaagtgggattggctcctcgctaaaacttgggtgagaaacgcagagttctcatttcatgaggcattgacacacttgctgcactctcacctgctccccgaggttttcactctggctacactgaggcagttacctcattgccatcctctgtttaagtctactggcatcggaatagaagggttttcggagctaatacagcgaaacatgaagcagctcaactacagcctcttgtgcctgcctgaagatatcaggactcggggagtggaggatatacccggatactactatcgtgatgatggcatgcaaatttgggggatcccctcatccctggagacgcgcgaagcgctggtgcagtacgtaactatggttattttcacttgctccgcaaagcacgccgctgtctccgcaggacagtttgactcgtgcgcctggatgcccaatttaccaccatctatgcagctccctccccctactagtaaggggctcgcgacgtgcgaaggttttatcgccaccctacctccagtgaatgctacttgtgacgtgatactggctctgtggctcctgagcaaggagccaggagaccaaagacccctgggcacttacccggatgaacactttaccgaggaagcccctaggagaagtatagctactttccagtctcgtctggcccaaatatcccggggaatccaagaaagaaatcagggtctggtgctaccctacacttacctggacccaccccttattgagaactctgtatccatttag

SEQ ID NO: 28277 - DNA, 3123 bp, synthetic construct
  source 1..3123: mol_type = other DNA; note = Synthetic coding sequence
atggttagttccgctcagatgggctttaacctccaggcactcctggaacagctttcccaggatgagttatccaagtttaagtatctcataaccaccttttccctggcacacgagcttcagaaaattccacacaaagaggtggacaaggctgacggaaagcagctagtggagattctgaccacccattgcgactcgtactgggtagagatggcttcacttcaggtgttcgaaaagatgcataggatggatctgtctgagcgcgctaaagacgaggtgcgggaggcagccctgaaaagtttcaacaaaagaaaacccctgtcccttggaataactagaaaggaacggcctccccttgacgtggatgagatgctggagcgcttcaagaccgaggctcaggacaaggacaacagatgcaggtacattctaaagacaaaatttcgggagatgtggaagtcctggccaggcgatagcaaagaggtgcaggtgatggccgagcgctacaagatgttaatcccattttccaacccgcgtgtgcttcctggcccattttcttacaccgtggtgttgtatgggcctgcaggtctgggtaaaactactctggcacagaagctgatgttggactgggcggaggacaacctcatccacaagtttaagtatgccttttacctcagttgccgagaattgagccggttgggcccttgttcgttcgccgagttggtgtttcgggattggcccgagttacaagacgatattccccacatccttgctcaggctcgaaaaattctgttcgtaatcgacgggtttgatgagctcggtgccgctcctggagccctgatagaagatatttgtggtgactgggagaaaaaaaaacccgtgcccgtgcttcttggttccctcctgaacagggtgatgctgcccaaggccgcactcctggtgactacgcgccctcgcgctcttcgcgacttgcggatcctggccgaagaacctatttacatcagagttgaggggtttttagaagaagataggcgagcctattttcttcgccactttggggatgaggaccaggcaatgcgcgcttttgagttgatgcgctctaacgcggctttgttccaattgggcagcgcgcctgccgtgtgttggatcgtctgcacaactctgaagttgcagatggaaaagggagaggaccctgtgcccacttgtctgaccaggaccgggttgtttttgcgcttcctgtgttcacgctttccgcagggggctcagctgaggggggcactccggacgctgagtttactggccgctcaaggactttgggcccaaacctctgttcttcatcgggaggacttggagagactgggggtccaggaatctgatctgcgtttgttcttagacggcgacatcctccgacaagatcgcgtttcaaagggctgttatagtttcatccatctgtccttccagcagttcttgacagctcttttctacacccttgagaaagaagaagaggaagatcgcgacgggcacacatgggacatcggcgatgtgcagaaactcctgtcgggagtggagaggctgcgcaatcccgatctgatccaggcaggctattactccttcggccttgcaaatgaaaagagagccaaggagctcgaggccaccttcgggtgtaggatgagtccggacatcaagcaggagctacttaggtgtgacatttcctgcaagggcggtcattctacagtaacagacctgcaagagctgttaggctgcctgtatgagagccaggaggaggaattggtaaaggaagttatggctcagtttaaggagatctctctccacttgaacgccgttgacgttgtgcccagcagcttctgtgtgaagcactgccgaaatctccaaaaaatgtccctgcaagtgatcaaggagaatctgccagagaatgtgacagctagcgaatccgatgccgaggttgagagatcacaggatgatcagcatatgctgcctttttggacggacctttgctccattttcgggtctaacaaggatctcatgggactggccatcaatgattccttccttagcgcctctctggttcggatcttgtgcgagcagatcgctagtgatacctgtcatctgcagagggtggtgtttaaaaacatctcccctgccgacgctcacagaaatctgtgtctcgccctgcgcggtcataaaaccgttacctatttaacactgcaggggaacgatcaagacgacatgttccccgcactgtgcgaggttctgcggcaccctgaatgcaatctgagatacttaggacttgtgtcttgctcagcgacaacccaacagtgggctgatctctctctcgcactggaagtgaatcaatcccttacctgtgtcaatctgagtgataatgagttacttgacgaaggagcaaaactgctttatactactttgagacaccctaaatgctttctgcagcgtctttcgttggaaaactgccaccttaccgaagccaattgtaaagacctggccgctgtgctggtcgtttctagagaacttacccacctgtgcctcgcaaaaaatccgattggaaacaccggagtgaagtttctgtgtgaaggcctgagatatcccgaatgtaaactgcagacactcgtgctctggaactgtgatattacctctgatggttgttgtgatctgaccaagctgcttcaggaaaaaagctccttgctgtgcttggatctgggactgaatcatattggagtaaagggcatgaagtttctgtgtgaggctttgcgaaagcccctgtgcaatttgcgttgcctgtggctctggggatgttctatacctcccttcagctgcgaagatctgtgctccgcactctcatgtaaccagtccctcgtcacgttagacctggggcagaaccctttagggagttccggagtgaaaatgctgttcgagaccctcacatgttcatccggaaccctccgcaccctgaggctgaagatcgacgattttaatgacgagctgaataagcttctggaggaaatcgaggagaaaaacccacaactcatcatcgacaccgagaagcaccacccttgggccgaaagaccttcttcgcatgactttatgatttag

SEQ ID NO: 28278 - DNA, 3864 bp, synthetic construct
  source 1..3864: mol_type = other DNA; note = Synthetic coding sequence
atggttccaggcgaggaaaaccagctggtgccaaaggaggctcctttggaccatacctccgataagtcactgctggatgcaaatttcgagcccggaaaaaaaaacttcctgcatctgaccgacaaggatggagagcagccacaaatactgctggaagactcatccgctggcgaagattcggtgcacgaccgctttattgggcctctcccacgcgaaggatccggagggagcacatctgattatgtctcccagtcatattcatacagctcaatccttaataagtctgagaccggatacgttggcctggtgaaccaggccatgacttgttacctcaactccctgctgcagactctgttcatgactcccgagttcaggaacgccctctacaaatgggagtttgaagaaagtgaggaggatcccgtgactagtatcccctaccagctccagcgcctgtttgtcctattacagacctcgaagaaaagagccattgaaaccacagatgttacaagaagctttggatgggattccagcgaggcctggcagcaacatgacgtacaggaactttgcagagtaatgttcgatgccttggagcagaagtggaagcaaactgagcaggccgatctgatcaacgagctatatcagggtaaactgaaggattacgtgagatgcctggagtgcggatatgagggttggcggatcgacacatatcttgatattccccttgttatcagaccgtacgggtccagccaggcattcgccagcgtcgaagaggctcttcatgcatttatacagcctgagattctcgacggtccaaaccaatatttctgcgagcgctgcaagaaaaagtgtgatgccagaaaagggcttcgattcctgcactttccctacctgctcaccttgcagctcaaacgttttgactttgattacacaactatgcatagaattaagcttaacgatagaatgactttccccgaagaactcgacatgtccactttcattgatgttgaagacgagaagtccccgcagactgagagctgtactgacagtggcgcagaaaacgagggcagctgccactcagaccagatgagtaacgacttttccaatgatgatggcgtggatgaagggatttgcctggaaactaattctggcaccgagaagatcagtaaatctggcctggagaagaattctctcatttacgagctgttcagtgtcatggtgcacagcggaagcgctgcaggcggtcactactacgcctgtattaagtctttcagcgacgaacaatggtacagcttcaatgaccagcatgtgagccgaatcacacaggaggacataaaaaagacccatggaggtagctccggaagccggggatattactctagtgcattcgcatctagcaccaatgcgtacatgttaatttatcgactgaaggatcctgcacggaatgccaagttcctggaggtggatgagtaccccgagcacattaaaaacttagtccagaaggagagggaactagaagaacaggaaaagagacagagggaaatcgagcgcaatacttgcaagatcaaactgttttgcctgcacccaactaagcaggtcatgatggagaacaagttggaggtccacaaggacaagacactgaaggaagccgtggagatggcttacaagatgatggatctggaagaagtgattcccctcgattgctgtcgccttgttaaatacgacgaatttcacgattacctggagaggagctacgagggcgaggaagataccccaatggggttgcttctcggtggtgtgaagtccacctacatgttcgacctgttactcgaaacaagaaaacctgatcaggtgttccagtcatacaaaccgggagaggtcatggtgaaggtgcacgtcgtggacctgaaggccgagagtgtggcagcccctattacagtgcgggcatatctcaaccaaacagtgacggagtttaagcagcttatctctaaggcaattcatctaccggcagagaccatgagaatagtcttggagcgctgttataacgaccttaggctgctgtcagtcagctcgaagactctgaaggcggaaggctttttcagatcaaataaagtcttcgtggagtcttccgaaacactcgattatcaaatggccttcgctgattctcacctgtggaagctgctggatcggcatgcaaacaccattaggctgttcgtgctcctgcctgagcaaagcccagtgagttatagtaagcggacggcttatcagaaggctgggggagactccggtaatgttgatgacgactgcgagcgcgttaagggacctgttggctcactcaaatccgtcgaagctatactcgaagaatccacagagaaactgaaatccctgtccctgcagcagcagcaggacggagataatggcgatagcagcaagagcacggagactagtgactttgagaatatcgagtcccctctcaacgaaagagacagctccgcaagcgttgacaacagggagttagagcagcacattcagaccagcgaccccgagaattttcagtccgaggagaggagcgactctgacgtgaacaacgatagaagcaccagctccgttgattcagatatcctgagcagctcccatagctcggacactctgtgtaatgccgacaacgcccagattcccctggccaatgggttggacagccatagtattacttcttcaagaaggactaaagccaatgaaggtaagaaggaaacgtgggatactgccgaggaggactcaggaaccgacagcgagtacgacgaatctggaaagtccaggggtgaaatgcagtacatgtactttaaagctgagccctatgctgctgacgaaggtagcggagagggccacaagtggcttatggtccacgttgataagagaatcaccctggcagcgtttaagcagcacctggagcctttcgtgggagtactatcctcccacttcaaggtgtttagagtgtacgcatctaatcaggagttcgagtctgtgcgtcttaacgagaccctttctagctttagcgacgataataaaataactatccggctaggcagagcactgaaaaagggggagtatcgcgtgaaggtctaccagttgctcgtaaacgagcaggagccctgcaaatttctgcttgacgctgtgttcgccaaggggatgactgtgcgccagagtaaagaggaacttatccctcagttacgcgagcagtgtgggttggaactctccatcgatcggttcagactgagaaagaaaacatggaagaatccgggaaccgtctttttggattatcacatttacgaagaagacatcaacattagtagcaattgggaggtctttctcgaggtgctcgacggtgtcgagaaaatgaagagcatgagccagttggcggtgctgtcccgacgctggaaaccgagcgaaatgaagctggaccctttccaggaggtcgtcttggaatcgtccagtgtggacgaactccgggaaaagctaagcgagatttccggcattcctctagatgatatcgaattcgctaaaggacggggaacttttccctgcgacatcagtgtgctggatatacaccaggatttggattggaatccaaaagtttctactctgaacgtctggccactgtacatctgcgacgacggcgcagtaatcttttaccgcgacaagacggaagaactgatggaattgacggatgagcagaggaatgaacttatgaagaaggaaagtagcagactccagaaaaccggccacagggtgacttactctccacgtaaggagaaagcactgaaaatctatttagatggcgcaccaaataaagatctaactcaagactag

SEQ ID NO: 28279 - DNA, 420 bp, synthetic construct
  source 1..420: mol_type = other DNA; note = Synthetic coding sequence
atgccctggcgggctggtaatggagtgggccttgaagcccaagctggtactcaggaggcgggacccgaagagtactgccaggaggagcttggtgccgaggaggaaatggcagccagggctgcttggccagtgcttcgcagtgtcaacagcagagagctgagcagaataattatctgcaaccactctccgcgtattgtgctgccagtgtggctgaattactatggcaagctgctgccatatctgacactccttccagggcgagactttaggattcacaattttcgcagccacccctggctgttcagggacgctcgtacccatgataagctgctagtcaatcagactgagttgtttgtcccaagcagtaacgttaacggacagcctgtcttcgctaatattacactgcaatgtattccctag

SEQ ID NO: 28280 - DNA, 582 bp, synthetic construct
  source 1..582: mol_type = other DNA; note = Synthetic coding sequence
atggaaggctgtgtatctaacctgatggtgtgcaaccttgcttacagtggaaagctggaggagcttaaggaatccatactcgccgacaagagcctcgccacaagaactgaccaggccggatggagcccactgcacatcgccgctagcgctggccgtgacgagatagtgaaagctttgttgggtaaaggggcacaagtgaatgccgtgaaccagaatgggtgtaccccacttcactacgccgcatccaagaatcgacacgaaatcgccgtgatgctcctcgaagggggtgccaatcccgatgccaaagaccactatgaagccaccgcaatgcaccgggcagcagccaagggaaacctaaagatgattcacattctgctgtactacaaagcatctactaacatccaggataccgagggcaacacacccctgcacctggcatgcgacgaagaaagagtagaagaggccaagttactggtgtcacagggtgcttctatctacatagaaaataaggaagaaaaaaccccactgcaagttgccaaaggaggcctaggtcttatcctgaaaagaatggtggaaggttag

SEQ ID NO: 28281 - DNA, 612 bp, synthetic construct
  source 1..612: mol_type = other DNA; note = Synthetic coding sequence
atgagtgagaatgcggctccaggcctcatctccgaacttaagttggcagttccgtgggggcatattgccgctaaggcctggggatctctgcagggcccacctgtcctgtgccttcatggctggctcgacaatgcatctagcttcgaccgactgatacccctgctcccacaagatttctactacgtcgcgatggactttggcggacacggcctctctagtcactattcccccggtgtgccctattatttgcagaccttcgtgagcgagattaggagggtggtggctgcactgaagtggaacagatttagcatcctgggccacagtttcggaggggtggtggggggtatgtttttctgtacatttcctgagatggtcgacaagttgatcctgctcgacactcccctcttcctcctcgagagcgacgagatggagaacctgctcacatacaagcgtcgagccatcgagcatgtgctgcaggtcgaggccagtcaggagcccagtcacgtgttcagcttaaagcagttgctgcaacgccagcggacagcacttacgtcaagtgcgggttcatgcgtgaggattccaagtggatcctgccgacctatgtcatgctag

SEQ ID NO: 28282 - DNA, 765 bp, synthetic construct
  source 1..765: mol_type = other DNA; note = Synthetic coding sequence
atgcccgctgggagcatgtctaccacaggctacccaggcgtgtgttccaccacctcataccgaactcattgttatattcccgtaacatctagcgtgactctctcaagctccgatctgtccccaacgttcggacactgcctgcctagttcctaccagggaaacctctggctgttggattactgccaggaaagctacggcgaagccccaacttgtaagagccccagctgtgaacccaagacatgtagcaccaccggatgcgatccttccaactcttcggttccatgtaatagtccctccgccggacaggtgttcagtgtgtgtgaaactactaacgtgtcaccttcgccaagttgttcccctagcacacagacaaacggatacgtgtgcaattgccacattcccacccgcaatgcatctaaggcttgtcagacattacgaaacggctctaattgttttggacagcttaactgcctgtccaaatctttccagactctgaaccactgcaggttgtcaacgctgggctacaagtcttaccaaaacccgtgcttcatacctagctacgtgtctcctctgtgctacatcagcaatagttgccagccacagtcttatcttgtcaggaattatcactattcctcttaccggccaacatcttgccgtcccctctcctatttatcacgctcattccgatctctgtcatatatcccaagcacattcccacctttgcgctacctgtgcagcgggagcagacccctgaagtgctattag

SEQ ID NO: 28283 - DNA, 1338 bp, synthetic construct
  source 1..1338: mol_type = other DNA; note = Synthetic coding sequence
atgcgggaaatcgttcatctacaggctggtcaatgtggcaatcaaatcggagcgaagttctgggaagtcatctctgacgagcacggaatagatcccacgggaacctatcatggagatagcgacctgcagcttgaacgcatcaatgtttattacaacgaggccactggcggaaaatatgtcccaagagcggtactcgtcgacctggagccagggacgatggactcagtacgcagtggcccattcggtcagatttttaggcccgacaattttgttttcggccagtccggcgcaggtaacaattgggcaaagggacattataccgagggagcagagttggtggatagtgtattggacgtggtacggaaggaggctgagtcctgcgattgtcttcagggatttcagctgacacattcactggggggaggaaccggaagcggaatgggaacacttctaatctcaaaaattagagaagaataccccgatcgaattatgaacacgttttccgtggtgcctagtccaaaggtttctgacactgtggtagagccttataatgccaccctgtctgttcatcaactggtggagaacaccgacgaaacgtactgcatcgacaacgaggcgctatatgatatttgttttcggactctgaagctgactacacccacatacggcgatttgaatcacctggtgtcagccaccatgagtggtgtcacgacatgtctccgattccccggacagttgaatgccgatcttcggaagttggccgtcaatatggtgccattcccaagactgcatttcttcatgcctggttttgcgccactgacaagtcgtgggtcccagcaatatagggctctgactgtgcctgagctcacccagcaaatgtttgacgcgaaaaacatgatggctgcctgcgatccccgtcacggacggtatttgactgtcgcggctgttttccggggacgcatgtccatgaaggaggtcgacgaacagatgctcaatgtgcaaaataagaatagcagctattttgtagagtggattcccaacaatgttaagaccgcggtgtgcgacatccccccacggggactgaagatgtccgcaaccttcataggaaatagcactgctatccaggagttgtttaagcgcatcagcgaacaattcacagcgatgttccggagaaaggccttcctgcattggtatactggtgaagggatggacgaaatggagttcaccgaggccgaatcaaacatgaatgacctggtctccgaataccagcaataccaggacgctacagctgaggaggagggcgaattcgaggaggaagcagaggaggaggtcgcttag

SEQ ID NO: 28284 - DNA, 750 bp, synthetic construct
  source 1..750: mol_type = other DNA; note = Synthetic coding sequence
atggcggagaggggcgagctggacctcaccggagccaagcaaaacaccggcgtctggctcgtgaaagttcctaaatatctcagccagcagtgggctaaagcgagcggccgtggcgaagtggggaagctgaggatcgctaagacccaaggacgcacggaggtgagttttacactgaatgaagacttagcaaatattcacgacatcggcggaaagcccgctagtgtttcagcacctcgcgagcacccattcgtgctacagagcgtggggggtcagacccttacggtgtttacagagtcctcctctgacaaacttagtctggagggaatagtcgtccagcgtgcagagtgtcgccctgctgcatctgaaaactacatgcgattaaagcggttgcaaattgaagaatcctcgaaaccggtgcgcctgagtcagcagttggataaggtggtgactacaaactataaaccagtggccaaccaccagtacaacatcgaatacgagaggaagaagaaggaggatggcaaaagagcacgggcagacaagcaacatgtcctcgacatgctattcagtgccttcgagaagcatcagtactataatctcaaagatttggtggatattacaaagcagccagtggtttacctcaaagagatcctgaaagagatcggcgtgcagaatgtgaaaggcatacataaaaacacctgggagttgaagccagaatacaggcactaccagggggaggagaaatctgattag

SEQ ID NO: 28285 - DNA, 2511 bp, synthetic construct
  source 1..2511: mol_type = other DNA; note = Synthetic coding sequence
atgtggtccttaggatgcgtcatcgccgaattgttccttggttggccactctaccccggtgcatccgaatacgaccagattcgatatatatcccaaacgcagggccttcccgcagaatatctcttgagcgctggcaccaagacgacccgtttctttaaccgagaccccaaccttggttacccattgtggcgtttgaaaacccctgaggaacacgagctggagactggaatcaagtcaaaggaggcgaggaaatacatcttcaactgcctcgacgacatggcacaggtgaatatgtccacagatctggaggggaccgatatgcttgctgagaaagctgaccggagggaatatattgatcttctgaaaaaaatgcttactattgatgccgataagcgtattactcccttgaagactctcaatcatcagttcgtgaccatgactcacctccttgatttccctcattctaaccatgtcaaaagttgcttccagaatatggagatatgtaagaggcgggtccatatgtacgacacggtgtcccagatcaagtcaccattcaccactcatgtcgcacccaacacaagcaccaacctgaccatgtcattcagcaatcaattgaacacagtgcataaccaggcaagcgtactggccagcagcagtaccgccgctgctgcaacattgtcccttgccaactccgacgtatctctgctcaactaccagagtgctttatatccaagctccgccgctcctgtgcccggagtagcgcagcaaggtgtgtccctgcaaccaggaaccactcagatctgcacccagacagaccccttccaacaaacattcattgtgtgtcctcctgcgttccagaccggactgcaagctaccacaaagcatagcgggtttcccgtgcgcatggacaatgccgtgcccatagtgcctcaggcaccggctgcccagccgctgcagatccagagtggcgtgttaacacaagggtcatgtacaccacttatggtggctacccttcatcctcaggttgctaccataaccccccagtacgccgtccctttcactctgtcatgcgctgccggtagaccagccctagttgaacaaaccgccgcagtgcttcaagcctggccaggtgggactcagcaaatactcctccctagcacttggcagcagctccccggagtcgccctgcataactccgtccagccgaccgcaatgatacccgaagcaatggggagtgggcagcagctcgccgactggcgcaatgctcactcacacggcaaccagtatagtaccatcatgcagcagccctccctgttaaccaaccatgtcactttagccactgcccagccactgaatgttggggtagcccatgtggtgcggcagcagcagtcatcttcactccccagcaaaaagaacaagcaatcagctcccgtatcctcaaagtctagcctcgatgtgctccccagtcaggtgtactcactggttggatcaagtccacttcgcacaacatcatcttataattcccttgtccctgtgcaggatcagcatcaaccgatcattattcctgatacacctagccctccggtgtcagtgatcacaatcagatctgacaccgacgaggaggaggataataagtataagcccagctcttcagggcttaaaccaagatccaacgtgatctcatacgttactgtgaacgacagccccgactccgattcctcattgtccagcccctactccactgacacattgtctgccctcagggggaactcgggcagtgtcctggagggacctgggcgtgtggtcgctgacggaaccggtacaagaaccattatcgtgcctcctctgaaaacgcaactgggcgattgcaccgtagccacacaagcgtccgggctactttccaacaagactaagccggtagcctcagtgtcaggtcagagctcaggatgttgcatcaccccaactggatatagagcccagcggggagggacatcagctgcccagcccttaaacttgtcacagaatcagcagtccagcgctgcccctacatcccaagagcggagttctaatcccgcaccacggaggcagcaggcttttgtggcaccactttcacaagctccatatacctttcagcacggcagccctttgcacagtaccggacacccgcatctggcgccagcaccagcgcaccttccaagtcaggcccatctctacacttatgcagcccctacgagtgcagctgctctcggatcaacaagttcaatcgcccatctgttctctccccaaggcagtagtaggcatgctgcagcttacactactcacccaagcaccctggtgcatcaagtgccagtctcagtgggcccatccctgctgacctctgcctccgttgccccagcgcaatatcagcaccaattcgcaactcagtcctacataggttcctctagagggtccactatctacaccggataccccctgagcccaactaagatcagccaatacagttatctgtag

SEQ ID NO: 28286 - DNA, 2352 bp, synthetic construct
  source 1..2352: mol_type = other DNA; note = Synthetic coding sequence
atgtcccaggtaaaatcttcttatagctacgatgccccatctgacttcattaatttcagcagcttggacgatgaaggtgacacccaaaacatcgactcatggttcgaagaaaaggcgaatctggagaataagctgctaggaaagaatgggacaggcggtttattccaggggaaaacccccctgagaaaagcgaatttacagcaggctatcgtcacccctctcaagcctgtggataacacctattacaaggaggctgagaaagagaacctggtcgaacagtcaattccaagcaacgcctgcagttcactagaggtcgaggccgcaatcagccggaaaactccggcacagccccagagaaggtcgctgcggctgagcgcccaaaaagacttggaacagaaggagaaacaccacgtgaaaatgaaggcaaagaggtgtgccactccagtgatcattgacgagatcctccctagtaagaaaatgaaggtctctaataacaaaaagaagcccgaagaggaaggcagcgcacaccaggacacagccgagaagaatgccagcagccccgaaaaagcaaagggtagacataccgttccctgtatgccacccgctaaacagaaattcctcaaatctactgaagagcaggagttggaaaaaagcatgaaaatgcaacaggaggtggtcgaaatgcgtaagaagaacgaggagttcaaaaagcttgcactggccggtatcggccaacccgtgaaaaagtctgtcagccaggtaaccaaatctgtggactttcattttcggacagatgagagaattaaacaacatcctaagaatcaggaagaatacaaggaagtgaactttacatctgagctaagaaagcatccatctagtcctgccagagtcacaaaaggctgcacgatagttaaaccatttaatctatcccagggtaagaaacggacgttcgacgaaacagtgtcaacctacgtccccctggcgcagcaggtggaagacttccataaaagaacacccaatagataccacctgcggtctaaaaaggatgacataaagacaggaagttgctcagtgactcaagctggagtccagtggcgagaccatggttcgctccagtgccccacccctggactcaaacagagctcttgcctgtctttgccaaacctcctgccttctaagtctagcgtcactaaaatctgtcgcgacccacagaccccagtgctgcagacaaagcaccgggcaagagccgtgacatgcaaatccaccgctgaactcgaagctgaggaactggagaagttacagcagtataagtttaaggctcgggaactggatcccaggatccttgaaggaggccctatcttgcccaaaaagcccccagtgaaaccaccaacagaacctattggcttcgacctggagatcgaaaagcgcatccaagagcgtgaatcaaaaaagaaaacagaagacgaacatttcgaatttcattcacgaccatgtcccaccaagattctcgaagacgtggtcggtgtccctgaaaaaaaggtgttgccgatcacggtaccgaaaagccccgcatttgctctgaaaaaccgcatacggatgcccactaaggaagacgaggaagaagacgaacccgtggtcattaaagcgcagcccgtcccccactacggggtgccattcaaacctcaaatacccgaggctcgaactgtggagatatgcccattcagctttgacagcagggacaaggagcgccagcttcaaaaagaaaagaaaattaaagaactgcaaaaaggggaggttcccaagtttaaggctctccccttgcctcacttcgatacaataaatcttccagaaaaaaaggttaaaaacgtgacacaaatcgagccgttctgcctagagacagataggaggggggcactgaaagcccagacttggaagcatcagctggaagaggagctgaggcagcaaaaggaggctgcttgtttcaaagctcggcctaatactgtgatttcccaggagccatttgtacctaagaaagagaaaaagtcagtggccgaagggctgtccggcagtctggttcaggagcccttccagttagccaccgaaaagagggcaaaggagagacaagagctcgagaagagaatggctgaagtggaagcccaaaaagcccagcagttggaagaggccagactacaggaagaagagcagaagaaagaagagctggcacgtttgcgccgtgagctggtgcacaaagccaaccccattagaaagtaccaaggactggaaattaagagcagcgaccagcctcttacggtacctgtatcccctaaattcagtacgcggttccactgttag

SEQ ID NO: 28287 - DNA, 2061 bp, synthetic construct
  source 1..2061: mol_type = other DNA; note = Synthetic coding sequence
atgggatcctacttatccgtgcctgcttactttacaagccgagatttgtttaggtgcagcgagtgccaggacagccttacaaactggtactatgaaaaagatggcaagctttactgccctaaggactattggggaaagttcggggagttctgccatggatgttccctgctgatgaccggcccttttatggtcgccggagaattcaaataccacccggagtgttttgcctgcatgtcctgtaaggtaatcattgaagatggtgatgcctacgcactggtgcagcacgctactttgtactgcggcaagtgccacaatgaagttgtgctggccccaatgttcgagcgcttgtcaactgaaagtgtgcaagagcagctaccatacagcgtgactctaatctccatgcctgctacaacagagggcaggcgtgggttcagcgtgtccgtcgagtccgcctgtagtaactatgcaacgactgtgcaagttaaagaggtcaaccggatgcacattagtccaaataataggaatgcaatccaccctggagataggatactcgagatcaacgggaccccagtgcgtacccttagggtggaggaggttgaggacgccataagccagacatcacaaacacttcagcttttaattgagcacgatcccgtgagtcagcgactggatcaacttcgactggaagcaaggctggctcctcacatgcagaacgctggtcatccgcacgccctttctacactcgatacaaaggaaaatctagaagggaccctgaggcggaggtctctgcgtcgttctaatagcattagtaagtcaccgggtccctcgtctccaaaggagcctctcctctttagcagggacatcagccggtcagaaagcctgaggtgttcgtcgtcttattcgcagcagatcttccggccatgtgacctcattcacggagaggtgctagggaaggggttttttgggcaggcaattaaagtgacccataaggccactgggaaagtaatggtgatgaaggagcttattaggtgtgatgaggaaacgcagaagacatttctcaccgaggtaaaggtgatgcgctccctagatcacccaaacgtcctgaagtttatcggggtcttgtacaaggataaaaaactgaatttactcaccgaatatattgagggcggtactctgaaggattttttgagaagcatggaccccttcccatggcagcagaaggtgcggttcgccaaagggattgccagtgggatggcctacctccactctatgtgcattattcatagagatctaaactctcacaattgcctgattaaactggacaagaccgttgtagtcgccgactttgggcttagtcgcctgatcgtggaggagcgaaagcgggcacccatggagaaggcaactactaaaaagaggacactgcggaaaaacgaccggaagaagagatatacagtcgtgggaaatccctattggatggctcccgaaatgctcaacggtaaatcatatgacgagaccgtggatattttttcctttggaattgttctctgcgaaatcattgggcaggtgtacgcagaccctgattgtctgcctaggactcttgatttcggcctgaatgtcaaactgttctgggagaagttcgtgcctacagattgccctcccgctttcttccccctggccgctatttgttgtagactcgaacctgaaagtcgcgcacccccaggagctgccggagaagggcctggctgcgctgacgatgaagggccagttagacggcaggggaaggtcacaataaaatatgatcccaaggagctgcgcaagcatcttaacctggaagagtggatactggagcaactaacaaggttatacgactgtcaagaggaagagatttctgagcttgagatagatgtcgacgaattgttggacatggaatcggacgatgcctgggcgtcgcgcgtcaaagagctgttagtagactgctataaacccacagaagcattcatctcagggctactcgacaagatacgagctatgcagaagctctcgactccgcagaagaaatag

SEQ ID NO: 28288 - DNA, 840 bp, synthetic construct
  source 1..840: mol_type = other DNA; note = Synthetic coding sequence
atgcgggctttaacagttcagagagtgaagttcgccatggacctgcccctgctaaaacgcgctggccaggacttagcggaaaaaacaaagaacttcgtgagtagatccctcgtcatcggtgaggtgttgtccatggccgatatggcaacaggcgtgaaatgcggaatcatttactggctgtttggaggagccatccgcaatctaggctctcccgaacatgtgactaagtggtttcagccactgcaggagcagaaatacaccggcatgttcgctatgacagagagaggccacggctcaaacgccagagggattcagactgaggcgacatttgacctgagcgcccaggaatttgtgatagacactccatgcgaaaacgccgagaagatgtatataggcaatgcaatgtacggcaattacgccgctgtgttcgcacagttaattattgatgggagaagccagggtcctcactgtttcatcgtaccagtgcgcgacgagaatggcagcctctatccgggagtgaccgccatagatatgatgtacaaggaaggtctgcacggtgtcgataatgggatcctgatctttgataaggtgcggatcccacgcgagaacctgctcgataaatttggctcggtggctccagacgggcagtaccatagtcccattcggaataaatccgcacgctttaatgccatgttggcagctttaacacctagccgcctagccgttgctttccaagctatgggagctatgaaactggggttaacgatagcgattcgctattctcatcgtagccggataatttcccagaactgctgctccgcccctgctggactgtactag

SEQ ID NO: 28289 - DNA, 597 bp, synthetic construct
  source 1..597: mol_type = other DNA; note = Synthetic coding sequence
atgacactgaggtgtctcgagccatctgggaacggtggggaggggacccgtagtcagtggggtacagcaggcagcgcagaagagccttctccccaggcggcacgccttgcgaaagcactgagggaattaggtcagaccggatggtattggggatccatgacagtcaatgaggctaaggaaaagttgaaggaagcccctgaaggaacgtttttaatccgagacagtagtcacagcgactacttgctgacaatttccgtcaaaacttccgccggaccaacgaatctgcggatcgagtatcaagacggcaaattccggcttgatagcatcatttgcgtcaagagcaagctgaaacagtttgactccgtggtgcacctgatcgattactacgtccagatgtgtaaagacaaaagaactggacctgaagctccgaggaacggcaccgttcatctttacctgactaaaccactgtataccagtgcgccatccctgcagcacctctgcagattgactattaataagtgtacaggcgcaatctggggtttgccgctgccaacacgtctgaaggactatcttgaggagtataaattccaggtatag

SEQ ID NO: 28290 - DNA, 570 bp, synthetic construct
  source 1..570: mol_type = other DNA; note = Synthetic coding sequence
atggaggcagacggcgacggcgaggaattggccagattacgctcagtctttgccgcatgtgacgctaaccggagcggtcggctagaaagagaggaattccgggcattatgcacggagctgcgtgtgagacccgcagacgcggaggcagtttttcaacggctggatgcagacagggacggtgcaatcactttccaggaattcgccagagggttcctgggttcattacgtggcggtagacggagggactggggaccacttgaccccgcaccagctgtttccgaagctggacctgagacacacgacagtgaggaggacgagggcgatgaggatgccgcagctgccctggccacaagctgcggaccagcctcacctgggcgagcctggcaggatttccaggccaggttgggagacgaggctaagttcattccccgatttgggtacactattagtaaaccagcctttgtatttgtccgacaccttatcactctctgtgccctgagttgggctaaaaaggaggggagggagactctctggaccatcgaagaaggaggcgctaaaatggccgagtag

SEQ ID NO: 28291 - DNA, 300 bp, synthetic construct
  source 1..300: mol_type = other DNA; note = Synthetic coding sequence
gcactggacgttgccgtaaaaacattccctccagagcgtcacgtggccgtaaaatgctttgggaaaaagaaggagaaaaagaataatgccaattcccccgcttctgttagcaatcctacagtgaccaagcatgcgttcgggatggaagaggagctccagagagagggatccatagagacattaagcaacagctccggaagtacgtcagggtccatcccacgtaacttcgatgggtatcgctcccccttaccaactaatgagagtcagcccctttccctgtttcctacagggttcccatag

SEQ ID NO: 28292 - DNA, 1170 bp, synthetic construct
  source 1..1170: mol_type = other DNA; note = Synthetic coding sequence
atggagagaaaggatttcgaaacatggttggataacatcagcgtgacattcctctctcttaccgatcttcagaagaatgaaactctggatcacttaattagtctctccggtgccgtacagctgcgtcatctatcaaataacctggaaacacttttgaaaagggatttcctgaaactgctgccactggagctgtccttctaccttctcaaatggctggatcctcaaacattactcacctgctgcctggtgtctaagcaatggaacaaggtgatctccgcatgcacagaggtgtggcagacggcttgtaagaacctgggatggcagattgacgattccgttcaagatgcccttcattggaaaaaggtgtatctgaaagctatcctgaggatgaagcagctggaggaccatgaagcatttgaaacttcatctcttatcggccactcagcccgagtgtatgcactctattacaaagatggcctgctgtgtacagtgttcagcgtcgattacaacgacgagctggatatactggtctcaggcagcgccgatttcactgtaaaggtgtgggcccttagcgccggaacatgtctgaatacgctcactggccatacagagtgggtgacaaaggtggtccttcagaagtgcaaggtgaaaagcctgttacattcacctggcgactatatactgttgtccgccgacaaatacgaaatcaagatctggcccattggcagagagattaactgtaagtgcctgaagaccctgtctgtctccgaagatagatccatttgcttacagcccagacttcatttcgacggcaagtacatcgtatgctcctctgctctgggcctgtaccagtgggattttgcatcctatgacatcctaagggtgatcaagacccccgaaattgctaatctggctctgctgggcttcggagatatctttgccctacttttcgataatcgatatctgtatattatggatctacgaacagagagtctgatttcccgctggcctctgcctgaatatagaaagtccaaaaggggatctagttttttagcgggtgaggctagctggcttaatgggttagacggtcataatgatacagggctcgttttcgccaccagcatgccagatcatagtatccacctagtcctatggaaagaacatgggtag

SEQ ID NO: 28293 - DNA, 2439 bp, synthetic construct
  source 1..2439: mol_type = other DNA; note = Synthetic coding sequence
atgaaaaaacaatttaaccgcatgcggcagctcgccaatcagaccgttggtcgggcagaaaagactgaagtgctgtctgaagatttgctgcaggtggagaaacgactggaactggttaaacaggtatcccacagtacacacaaaaagctaaccgcatgcctgcaggggcagcagggcgctgaagccgataagcgtagtaagaaactcccccttaccaccctggcccagtgtctgatggaggggagtgccatcttgggggatgatacactgttggggaagatgttgaagttgtgcggggaaaccgaggataaactggctcaggaactgatccattttgaactgcaggtagagcgagacgtgatcgaaccactgttcctcctggctgaggtcgagattccaaatattcagaagcagcgcaagcatctggcaaaattggtcttagacatggactcatcacgcaccagatggcagcaaacctccaagagttcaggccttagctccagtctgcagcctgctggggctaaggccgacgctcttcgtgaagagatggaggaagcggctaacagagtcgagatttgccgcgaccagttaagtgctgatatgtatagttttgtggccaaggagattgactacgcaaattactttcaaacactgatcgaagtgcaggcggagtatcacagaaagagcctgaccctgctgcaggcagtgctgccccagattaaggcccaacaagaggcttgggttgagaaacccagcttcggaaagcccctggaggaacatctgactatcagcggaagggagatcgcatttccaatcgaggcctgcgtgacaatgctgctggagtgtgggatgcaggaagaggggctgttccgagtagctccgtctgcttctaagctgaagaagttaaaggcagccctggattgttgtgtggtagatgtccaggagtacagtgctgatccacacgccatcgctggggctttgaagtcgtatctgcgggagcttcccgagccccttatgactttcgagctgtatgacgagtggattcaggcttcgaacgtacaggaacaggacaaaaaactccaggcactatggaatgcgtgtgaaaagttgccgaaggcaaatcacaacaatatccggtacctgatcaaatttctctcaaagttgtctgagtatcaggatgtgaacaaaatgaccccctccaacatggcaattgtccttgggccaaatctgctgtggcctcaggccgaggggaacataaccgaaatgatgactaccgtctctctgcagatcgtcgggattattgagccgatcattcagcacgccgactggttttttcccggagaaatcgagtttaatataacagggaattacggctctccagtccatgtcaatcataatgcgaattattcatcgatgccttctccagacatggatcctgccgaccggcgacagcccgagcaggctcgtcgacctttgtccgttgccacggacaatatgatgctggaattctataagaaagacggtatgggtgtgcgggtgatggacaccaactgggtggctcgaagaggcagtagcgcgggtaggaaagtgtcctgcgcgccaccatctatgcaacctccagcgcctcctgctgaattggccgcaccactgccatcccccctccccgaacaaccactagacagtccagccgcaccagcactgtctcccagtggattggggctccagccgggtccagagagaacctctactaccaaatccaaggagctttctcccggatccgcccagaaaggttcacccggatcttcccagggaactgcatgcgccggaacccagcccggagctcaaccgggtgcgcagccaggggcaagtccgtcgccttcacagcccccagcagatcagtctccacatacactgcgcaaagtgtcaaaaaaactcgcccctatcccgcctaaggttccttttgggcagcctggtgctatggctgatcagagtgccggacagccttcacctgtgtctctgtctcccacccccccaagtacacctagcccttacgggctcagctatccgcaagggtacagtctggcctcgggccaactctcacctgctgctgctcccccattggccagcccctcagtctttactagtaccctcagcaaaagccggccaaccccgaagcccagacagaggcctactcttcccccaccccagcccccaaccgtcaatctgtccgcctcttctccgcagtccaccgaggcgccaatgctcgacggaatgtcccccggagagtcaatgagcacagatctggttcattttgatatcccctcaatccacatcgagcttggctccactctgagactgagcccactagagcatatgagacgccattcagtcaccgataaaagagattcagaggaggaaagcgagagcactgcactatag

SEQ ID NO: 28294 - DNA, 1119 bp, synthetic construct
  source 1..1119: mol_type = other DNA; note = Synthetic coding sequence
atgtccaaaagcgagagtccgaaagagcccgaacagctgcgaaagttgttcatagggggattatcttttgagactacagacgaatccctccggagccattttgagcaatggggtacgctcaccgactgtgtcgtcatgcgcgaccccaacacaaaacgttcccgcggttttggatttgtgacctacgccacggtagaggaggtggacgccgctatgaacgcgcgaccccacaaagtagatgggcgagttgtagagccaaagcgggcagtcagcagagaagattcccagaggccaggcgcacatcttacagttaagaaaatttttgttggaggaattaaagaggacactgaggaacaccatctccgggactactttgagcaatatggtaaaatcgaggttattgaaattatgacggaccgcggaagtgggaagaaaaggggtttcgcatttgtcaccttcgatgatcatgatagtgtggacaaaatcgtgattcagaagtaccacacggttaatgggcacaattgtgaggtacggaaggcactgtccaaacaagagatggcctccgcctcatccagtcagagagggcgatcaggcagtgggaactttggcggaggacggggaggcggatttggcggaaatgataattttgggcgagggggaaacttctccggcaggggcggttttgggggaagtcgaggcggaggcggatacggaggatcaggcgacgggtacaacggcttcgggaacgatggaggctacggaggaggagggccagggtattccggcggatcccgcggttatggctccggcggacaggggtacggaaaccaggggagcggatacggaggctcgggctcctatgacagttacaataatggcggtggaggaggttttgggggaggctccggttcaaactttgggggagggggatcctataacgatttcggtaactacaacaatcagagtagtaattttgggcctatgaagggcggaaattttggtggacgatccagcggtccttacggtggtgggggacagtactttgccaagccccgaaaccaaggcggatacgggggttcctcatcctcttccagctatggatccggtaggagattctag

SEQ ID NO: 28295 - DNA, 1491 bp, synthetic construct
  source 1..1491: mol_type = other DNA; note = Synthetic coding sequence
atgaaactgggcaagaagcctatgtataaacccgtggacccatacagtaggatgcagtccacctataattacaatatgaggggcggtgcttaccctcccagatacttctacccatttcccgtccctcctctcttgtatcaagtagagctttctgtcggagggcagcagttcaatggcaaaggtaaaaccagacaggccgcaaagcacgacgccgcagccaaggctctgagaatactgcagaacgagcccctccccgagaggctggaagtaaacgggagagagtccgaagaggagaatcttaacaagtctgagataagccaggtgttcgaaatcgccctgaagaggaacctccccgtgaattttgaagttgctcgagaaagcggacccccacacatgaaaaacttcgtgacaaaggtgtcagtgggcgagttcgtgggggagggtgaagggaagagcaagaagatctccaaaaagaatgctgcgattgccgtcctggaggagttaaaaaagctgccccctctccccgcagtggagcgggtgaaacccagaattaaaaaaaagacgaaacctattgtgaagccccagacaagccccgaatatggacagggcatcaaccccatatcaagattggctcagattcaacaggcaaagaaggagaaggaacccgaatacacgctgctgactgagcgaggtctccctaggcgacgtgaatttgtgatgcaggtgaaggtggggaatcacacggctgaggggacgggcactaataagaaggtggcaaaacgtaatgccgcagagaatatgctggagattctcgggttcaaggtgccccaggcacagcccactaagcctgctctgaaatccgaggaaaagactcccataaaaaaacccggagatggccgaaaagtgacctttttcgaacccggaagcggcgacgagaacgggactagtaataaggaggatgaattccgaatgccatatttgtcgcaccagcaattgcctgcaggaatcctgccaatggtgcctgaagtggcccaagctgtcggtgtgtctcaggggcaccacactaaagattttacacgtgctgctcctaatcccgctaaggccaccgtcaccgcgatgattgcccgagagctcctgtatgggggtacgagccctaccgctgaaactattctaaagaataatatcagcagcggacacgtgccccacggacccctcacacggccaagcgagcagctggattaccttagccgtgttcaggggtttcaggtagagtataaagactttccaaaaaacaacaaaaacgagtttgtttctctcattaattgctcatctcagcccccacttatcagccatggcatagggaaagatgtggagagctgccacgacatggccgctctaaacatccttaaattgctatctgagctagaccaacaatccacggaaatgcccagaaccggaaacgggcctatgtccgtgtgcggaaggtgttag

SEQ ID NO: 28296 - DNA, 5834 bp, synthetic construct
  source 1..5834: mol_type = other DNA; note = Synthetic coding sequence
atgtccaacttttacgaggaaaggaccaccatgatcgctgctagggacttgcaggaatttgttccttttggcagggaccactgcaagcatcaccctaacgccctgaacctccagctcagacagctgcagccagcgagcgagctgtggagtagcgatggcgcagccggactggttgggagtttgcaggaggtcacaatccatgaaaagcagaaggaatcctggcagctccggaaaggcgtgagcgagataggtgaggatgtcgattatgatgaggagctgtatgtggccggtaatatggtgatctggagcaaaggctccaagtctcaagccctcgccgtctacaaggctttcactgtggactcccccgtgcagcaggccctgtggtgcgatttcataataagccaagataaatctgaaaaggcctatagcagcaacgaggttgaaaaatgtatttgcattcttcaatcctcttgcatcaacatgcactctatcgaagggaaagattatatcgcatcattgccgttccaggtggcaaacgtctggcccaccaaatacggcctgctgtttgagcgatcagcgtcttctcacgaggtccccccagggtcacctagagagcctctgcccacaatgttttccatgctgcacccattggatgaaattacacccctggtttgcaagtccggtagtctgtttgggtcatcccgagtacagtacgtcgtggaccacgctatgaaaatagtcttcttgaacactgatcctagcatcgtcatgacctatgatgctgtccagaacgtgcactcggtgtggactttgcggagggttaagagcgaagaagaaaacgtggtcctgaagttctccgaacagggtgggacaccccagaacgtggccaccagctcctcacttactgcccatctgcggtcactttccaaaggagacagccctgtgacaagccccttccagaactactcaagtatccattcccagtctcgatctacttccagcccttctctgcattcccggtcgccaagcattagcaacatggccgcactgagtcgggctcactccccggctctaggtgttcattctttcagcggtgtgcagcggttcaacatctccagtcacaaccagtcaccaaagcgtcattccatcagtcattctccaaatagcaatagcaatggcagcttcctggctcctgaaaccgaacccatagttccagaattgtgcatcgaccacctctggaccgagaccattaccaatatccgcgagaaaaacagccaggcctccaaagtgttcataactagtgatctgtgcggacagaagtttctctgcttcctggtggagtcgcagctgcagttgcggtgcgttaagttccaagagtcaaatgataaaactcaactcattttcggctctgtcactaatatccccgcaaaagacgcagccccagttgaaaaaatcgacacgatgctcgtactggaaggatcaggaaacttagtcctgtatacgggagttgtgagggttggaaaggtgttcatcccaggccttccagccccatcactcacaatgagcaacactatgcccaggcccagcaccccgctggatggagtttcaactccaaagcccctgtcgaagctccttggaagccttgacgaggtggtactgctgagccctgtgcccgaattacgagattcaagcaaattgcacgactccctgtataacgaggattgtacctttcagcaactggggacttacattcattccattagagatccagtgcacaatcgggtcaccctggaactctcgaacggctctatggtgagaataaccattcctgagatcgctacatccgaactagttcagacctgtttgcaggcaataaaatttatattaccaaaggaaattgccgtgcagatgttagtcaaatggtataacgtccactcagcaccaggaggtccttcataccattcagagtggaacctgttcgtaacatgtctgatgaacatgatgggctacaacaccgataggctagcctggaccagaaactttgacttcgagggttcgctttcacctgtcattgcccctaagaaggctaggccatcggaaacagggagcgacgacgactgggagtatttgctgaatagtgattatcaccagaatgtcgaaagccatctgctgaatcgctctctttgccttagcccttcagaagcgtcccagatgaaggatgaggacttcagtcagaatctttccctggacagctctacactgctgttcacgcatatccctgctatattctttgtgctacacttagtgtacgaagagctaaaactgaatacccttatgggagagggaatctgctccctagttgagctactggttcaattggccagggacctgaagctgggaccttacgtggaccattactatagggactacccaactctggtgcgcaccaccggacaggtctgtaccattgaccccggtcagaccggcttcatgcaccatcctagtttcttcacatccgaacctccatccatatatcaatgggtttcctcctgcctgaaaggcgaggggatgcccccatatccctacctgcctggcatctgtgaacgcagccggcttgtcgtgctgtccattgctctgtacattctcggcgatgaaagtctggttagcgatgaatccagccagtacttgacaagaataaccattgctcctcagaagctccaggttgagcaggaggagaacagattcagtttccgccactcgacttcagtgtcctccctggccgaacgcttggttgtgtggatgaccaacgttgggttcacactgagagacctggagacattgccttttggcatcgcactacctattcgagatgccatttatcattgcagagaacagccagcaagcgattggcctgaggccgtttgtctgctcattgggaggcaggatctcagcaaacaggcctgtgagggcaatctccccaaagggaaatccgtactgtcaagcgatgtccccagtggaactgaaaccgaagaagaagatgatgggatgaacgacatgaatcacgaagtgatgtcccttatttggtccgaagatctgcgagtacaggacgtgcgcaggcttctgcagagtgctcacccagtgagagtcaatgtcgtccagtatcctgagctaagcgaccatgaatttatagaggagaaggagaaccggctgctgcagttatgccagcgaacgatggcacttcctgtcgggaggggtatgttcacactgttcagttaccatccggtgcccaccgaacccctccccatccccaagctgaatctgaccggacgagcaccaccgaggaatactaccgtggacctcaactccggcaatatcgacgtgcctcccaatatgacctcctgggctagctttcataacggcgtggcagcgggactgaagatcgccccagcaagtcagatagactcggcctggattgtgtacaataaaccaaagcatgccgaactggcaaatgagtacgcagggttcctgatggcactgggtttaaatgggcacctcacaaagctcgcaactcttaatattcacgattaccttaccaagggccatgaaatgacctcaatcggtcttctgcttggagtaagcgcagccaagctcgggaccatggacatgtccattacgcggttgcttagcattcacatccctgccttactgcctccaacctctaccgagcttgacgtcccccataacgtacaggttgccgcagtagtcgggatcggcttggtttaccagggcacggctcacagacatacagcggaagtcttgcttgcggagatcggaaggccccctggcccagaaatggagtactgcaccgacagagagagctactcacttgccgcaggtttagctctcgggatggtctgcttagggcatgggtccaatctgatcggtatgtctgatctcaacgtccctgagcagctgtaccaatacatggtaggcggacatcggcgtttccagaccggtatgcatagggaaaagcataagtcaccaagttaccagattaaagagggagatacaatcaatgtagatgtgacttgccctggcgctacactagctttggcaatgatttacctgaaaacaaacaaccggtccatcgccgactggctcagagcgcctgatacaatgtatcttctggatttcgtcaaacctgagttccttctgctgaggacgctcgctcgctgtttgatcctctgggacgacatcttacccaactcgaagtgggtggattcaaacgtgcctcagattattcgcgaaaacagcatatcactttctgagatcgaactgccgtgtagtgaggatctgaacctggaaaccctcagtcaggcccacgtgtacatcattgcaggcgcttgcttatctttgggcttcagattcgccggatccgaaaacttgtctgcctttaactgcctccataaatttgccaaggattttatgacgtatctttctgcccctaacgcatccgtgactggtcctcacaacctggaaacctgtctgtcagttgttttgcttagcctcgccatggtgatggcaggttccggcaatctcaaggtgctgcagctgtgccgcttcctgcatatgaagaccggaggggaaatgaactacggtttccatctggcacaccacatggcgctgggcctgctttttcttggaggaggtcggtatagtctgtcaacatccaattcttccatagctgccctgctctgcgcactgtatccgcatttcccggctcactccacggataaccggtaccacctgcaggctctccggcacctctatgtactggctgccgagcccaggctgctagtccccgtagacgtggacaccaacacgccctgctatgctctgctggaggtcacatacaagggtactcaatggtacgagcagactaaagaggagctgatggctcctacactcttgcccgagttacacctgttgaagcaaattaaagtaaagggaccaaggtattgggagctccttattgacctatccaaaggtacacagcatctgaagtccatactgtctaaagacggggtcctgtatgtcaagctccgtgccggtcagctgagttataaagaggacccgatggggtggcagagtctactcgcccagacagtggcgaacaggaatagcgaagccagagctttcaagccagagaccataagcgccttcacctctgatcctgccctgttaagctttgccgagtatttttgcaagcccactgtgaatatgggccaaaaacaagagatcttggacctcttttcgtctgtgctgtacgagtgcgttacccaagagactcccgaaatgttgccagcttacattgccatggatcaggctataagacgtcttggccgtcgagagatgagcgaaacttcagagctctggcagattaaactagtgctggaattttttagcagcaggtcccaccaggaaaggctccagaaccatcccaagagaggtctctttatgaattctgagtttctccccgtcgtaaagtgtacaattgacaatactctcgatcaatggctccaggtggggggtgacatgtgcgtgcacgcatacttgtccgggcaacccctggaggagagccagttatccatgcttgcttgtttcttagtctaccatagtgtcccagcacctcagcatctcccacctattggccttgaaggcagcaccagctttgctgaacttctttttaaatttaaacaactaaagatgcctgtgcgggctttgctccggctggctcccttgctccttggaaatcctcagcctatggtgatgta

SEQ ID NO: 28297 - DNA, 1263 bp, synthetic construct
  source 1..1263: mol_type = other DNA; note = Synthetic coding sequence
atgttaaaagccgtgattttaatcggcggaccccaaaagggaactaggttccggccactatcgtttgaagttcccaagccactgtttccagttgctggtgtgcctatgattcagcatcacatcgaagcatgcgcccaggtacccggaatgcaggagattcttttaatcggattttatcagcccgacgaacctctgacccagttcctcgaggcggcacagcaggagttcaacctgcccgtccgttatctgcaagagtttgctcctctcggcaccgggggaggcctgtatcattttagggatcagattctcgctgggtcccccgaagcattctttgttctgaacgctgatgtctgcagtgactttcctctttcagccatgctcgaggcgcaccgtcggcagagacatcctttccttctcctcgggaccacagcgaaccgaacacagagtctcaactatggctgcattgtggaaaatccacagacccacgaggtgcttcactacgtggaaaagccgtccacatttatatcagatattattaattgcggaatctatctgttcagcccagaagcactgaaaccgctgagggacgtcttccagcggaaccagcaggatggccagctggaagattcgccgggattgtggccaggggcaggtactattagactcgaacaagacgtgttcagcgccctggcaggtcagggtcagatatacgtgcacctcactgatggcatatggtcgcagatcaagtccgcaggaagcgcactgtatgcgtctaggctttatctgtcccgctatcaggacacacaccccgagagactggctaaacataccccaggtggaccctggatacggggtaacgtgtatatccaccctacggccaaggtcgcccctagcgcggtccttggtccaaacgtatccataggaaaaggggtgactgttggcgagggggttagactcagggaatccatcgtgctgcacggggcaaccctgcaggaacacacatgcgtgctccatagcatagtgggctggggttccaccgtgggcagatgggctagggtggaggggaccccctccgaccccaatcccaatgacccgcgagccaggatggactcagaatctctgttcaaggatggtaaactcttaccagccatcacgattctgggatgtcgggtccgtatccccgcagaggttctgattttgaattctatcgttttaccacacaaggagctgagcaggtcctttacaaatcagatcatcctttag

SEQ ID NO: 28298 - DNA, 1257 bp, synthetic construct
  source 1..1257: mol_type = other DNA; note = Synthetic coding sequence
atgcgcgaatgcatttcgattcatgtggggcaggccggtgttcaaatcggcaatgcctgctgggaactctactgcctcgagcacggtattcagcccgacggacagatgcccagtgataaaaccattggcggaggcgatgattccttcaataccttcttctcagagaccggcgctggaaaacatgtcccccgagctgtgttcgtcgacctggaacccactgtggtcgacgaagtgcggaccggcacttatcggcaattgtttcatcccgagcagttgattaccgggaaagaggacgccgcaaacaactacgcgaggggacactacaccattggcaaagaaatagtcgatttggttcttgacagaattcgaaaactggctgacctctgcacagggttgcaaggcttcctgattttccacagcttcggtggcggaacaggctcaggatttgcctctctcctgatggagcgtctgagcgtggattatgggaagaagagcaagctcgaatttgcaatttacccagcaccgcaggtatctaccgctgttgtggaaccctataacagcattttaacgactcacaccacactggaacactctgattgtgcgttcatggtggataacgaggccatctatgacatctgcaggcggaacctcgacattgagaggcccacctataccaatctgaatcggctgatcggacaaattgtatcctccattacagctagccttagatttgacggagcgctcaacgtggatttaaccgaattccagaccaatctggtaccttaccctaggatccactttcccctggctacatatgcccctgttatctccgcggagaaggcatatcacgagcagctgtccgtggccgaaattacaaacgcgtgtttcgagcctgctaatcagatggtcaagtgcgatccacggcatggtaagtacatggcttgctgtatgctgtaccgcggtgatgttgtaccaaaggatgtcaacgccgctatcgctacaatcaagaccaaaaggacaatccagttcgtggactggtgccccaccggcttcaaagtgggcataaactatcaaccccctactgtggtgcccggtggcgacctggccaaagtgcaaagggccgtttgtatgttgtcaaatactactgccattgctgaggcatgggcgagacttgacctggcagcactggaaaaggactatgaagaggtaggcgtggattcggtagaagcggaagcagaggaaggtgaagaatattag

SEQ ID NO: 28299 - DNA, 417 bp, synthetic construct
  source 1..417: mol_type = other DNA; note = Synthetic coding sequence
atgcagctgcccccattcgatatgtggaaggactatttcaacctaagtcaggtagtatgggcacttatcgcttctcgcggacagaggctagaaacacaggagatcgaggaaccctcaccagggcctcctcttggccaggaccaggggctgggggcacccggtgctaacggcggtctggggacactgtgtaacttctgtaaacataacggggagtccagacacgtatattcatcgcatcagctcaagacccccgatggagtggtagtatgtcccatcctgcgccattacgtgtgccctgtctgcggcgctacaggcgaccaggctcacacactgaaatattgtccccttaacggcggtcaacagtccctctatcgtcggtcaggaagaaacagtgctggcaggagggtcaagagatag

SEQ ID NO: 28300 - DNA, 375 bp, synthetic construct
  source 1..375: mol_type = other DNA; note = Synthetic coding sequence
atgagagccagtccttgtatatcccagccagccgctagctggcatccacgcccaagcgcactccgaccaaccgccggaagcgggcctgataccaggacccctgggaccgtggaggatggatcagctccctgtcccgctttccgatccccagctgtctccccatgcggggaagagccctgctgttttcaaatctcaccagccgaagagaccctcgagttggggcgactggtctccccaggaaactgtgataccctgtctcctcgcgctgcgggattctatgcctgccacgtgaggagtttaatcccctgccgctcaactaaagggcgatggcccttgaccgcttctgcggctggtttgtcatcatttagcgggtag

SEQ ID NO: 28301 - DNA, 363 bp, synthetic construct
  source 1..363: mol_type = other DNA; note = Synthetic coding sequence
atggccgaacctagcagcgcacgccgacccgtaccactcatcgagtcagagctatactttctaatcgccagatacctgtccgccggaccctgtcgtcgcgctgctcaagtactagtccaggaactggagcaataccaactgctgccgaagcggttggattgggagggaaatgaacataacaggtcctacgaggaattggtgctctccaataagcacgtcgccccagatcatttactgcagatctgtcagcgaattgggcctatgctggataaggagataccaccctcaatcagtcgcgtgacctcgctgctcggggctgggaggcagagcctcctgaggaccgcaaagggcacactgatatag

SEQ ID NO: 28302 - DNA, 2607 bp, synthetic construct
  source 1..2607: mol_type = other DNA; note = Synthetic coding sequence
atgatacccaagtccctggtccaggccgcagaaacacagcggggactctgtgaacccggaggcaaaggcagagagggaaggtctggcggaaaaggggagactaggcctaggggggttggaacccaggaaggtaaagggaccatacctggctccccgagagagaagcggggagagcgcggagaaggtgatcctgctttgctccccgcagaagacctatggaggctgcctggcagcaaggaccgtctgcgaagctccttgctccctcctccagggccaccctcttctgactcaggccctggccctccgtccagtcacagcggcaaaacggcgcagggccctcgtaccttgaattgggccaggaagcaaagtgcaagaaccagcagcaatctgtgtgcctggagcctggctatggctactaagatggcggagattcctagctccccatatgagccaggccaacgtgggatgaaggacactcagaggggcgacgcaccacaaaggggcagtccggagccaagaatcttgcaactggcaagggtgggaaatgtgtacctgaaagaggagtcatctagaagtggacggctcgaagctaaaaagtggatacccacaaaattcctagagaatctctctgtgccccacgtggatctaggagggaatcaactgtggagcggcggaatggaggcactcactactcagcttggccctgggagagagggtagctcaagccccaattccaagcaggaattgcagccctactccgggtccagcgccctgaaaccgaaccaggtcggagaaactagcttgtatggagtgcccatcgtgagcctggtgattgacggacaggagaggctatgcctagcacaaatttctaacaccctgctcaagaactactcatataacgagatacacaataggcgcgttgctttgggcattacatgcgttcagtgcacacctgtgcaacttgagattctgcggcgtgccggtgccatgccaatatccagcagacggtgcggtatgatcactaagcgggaagccgaacgcttatgtaaatctttcctgggcgaacacaagccacccaagttgccagaaaattttgcttttgacgtggtccacgaatgcgcctggggctccagggggtccttcatacccgcacgctataactcttcgcgtgctaaatgcatcaaatgcggatactgttctatgtacttttctcctaataaatttatattccactcccaccgcacgcccgacgcaaagtacactcagccggacgccgctaattttaattcctggaggcgacacctaaagctttccgacaagtcagcgaccgatgaactgagccatgcttgggaggaccgagggcttggcctggccacaggggcaagcgggccagcaggccctggaggcccagggggaggcgctggagtcagaagctaccctgttatacccgtcccttctaaagggttcggactgttgcagaagttgccaccacctctgtttccacacccatatggatttcccacggcattcggcctttgtccaaagaaggacgatccagtcttaggagcaggagaacctaaaggcggtagctacgtgtctgctttcagacccgtggtgaaggatacagagtctattgccaaactctatggcagcgccagagaagcctacggggctggacccgctagagggccagggcctggagccggaagcggcggatacgtttctcccgactttctatccgagggtagctcctcctacaatagcgcaagccctgacgttgatactgccgatgaacccgaagtagacgtcgagtcaaacagatttccagacgacgaagatgcccaggaggagaccgaacctagtgctccgagtgccggtggcggacccgacgcaggacgtcccgcttttggcgacctggcagcagaggacttagtgcgtcgtcctgagcgcagcccaccctctggaggagggggttatgagctgagggaaccatgcggaccgctcggcggtcctgcaccagctaaagtgttcgccccagaaagagacgagcacgttaaatcagcagcagttgctctgggacctgcagcatcatatgtttgtaccccagaggcgcatgagccagacaaagaggacaatcactcacccgcagacgatctcgagaccagaaaaagctacccggaccagcggtccatctcccaaccaagtcccgctaacacagataggggtgaagatggcctgacgctggacgtgactggtactcacttggtggagaaggatattgaaaatctggcgagggaagagctgcagaagctcttgttagaacagatggaactccggaagaaactggaacgggagtttcagagcttgaaggataatttccaggaccagatgaagcgtgaactggcgtaccgcgaggaaatggtacaacagttacagattgtgcgcgatacgctctgcaacgagttggatcaagagagaaaggctagatacgccatacagcagaaactaaaagaagcccacgatgctcttcatcattttagttgtaaaatgctgaccccacgccactgcacaggtaattgttcttttaaaccaccccttttgccttag

SEQ ID NO: 28303 - DNA, 3585 bp, synthetic construct
  source 1..3585: mol_type = other DNA; note = Synthetic coding sequence
atgcacgaccttccgccagattcaggagcacggagggggggtagaggactcgccgaccactcctttcccgctggcgctcgcgcacccggtcagcctcctagcaggggggcagcctatcggagagcctgtccgagagatggggaacggggaggcggtggtaggcccaggcagcaggtgagccctccaaggtcaccccagcgagagcctcgcggaggccaactgcgcaccccaagaatgcgcccaagctgctcacgcagtttagaatcgctgcgcgttggggcaaaaccaccaccattccagcgatggccttccgactcatggatcaggtgtggggctcatagggactgggacgagccccctcctagaggcggtcggatggacggctggtccggcgaccgtgctagagcagcggcacccaccggactacaacccccaggctgcaaggaccacggttgctcatctggctcccctttcagagaccctgcgggtagtagtgtgatacgctcaggaaagggggaccgtcaggaaggacccagtttcctgaggccacccgctgtgaccgttaagaagctgcagaaatggatgtacaaagggaggttattgagtcttgggatgaagggccgagcccgagggaccgcccctaaagtgactggtacccaggcggctagtccaaatgtcggtgcgctcaaggtgcgtgaaaaccgcgtcctctcagtgccacctgatcagcgcattaccctaacagacctgttcgaaaacgcctacggaagcagcatgaaaggtagggaactcgaggaactgaaagacaacatcgaatttcgaggacataaacccctgaactccataactgtcagcaaaaagagaaattggctctaccagagcacactgcgccctctgaatctggaggaagaaaacaagaagtgtcaggacaggagccacctgtccatcagtcccgtgagcttgccaaagcatcaactcagtcagtcgtttctcaagagctccaaagagtattgcacgtatgttgtgtgcaatgccacaaactcatcactatctaagaactgtgctctggactttaatgaggaaaacgacgccgatgatgagggggagatctggtataatccaatccctgaagatgatgacttggggatatcatcagctttaagcttcggggaagcagacagtgccgtccttaagttgccagccgttaatctaagcatgctgtctggctccgacctcatgaaagccgaacgtcatactgaagattctctttgtagttctgagcacgcaggcgacattcagaccacaagaagcaatgggatgaacccaattcacccagcccactctaccgagttcgtgcagcagtataaacaaaagctggggcataagacacaggaagggattatggtcgaggatagccccatgctgaaaagtccgtttgccggttctggcatcctcgccgcaaccaatagcaccgaactcggaatcatggagccttcgtctccaaaccctagccccgtcaagaagggatcctctattaattggtcactccctgataagatcaagtcacctaggaccgtgaggaaactgtcaatgaagatgaagaaactgcctgaattcagtagaaaactctcggttaaaggtacactgaactacataaacagccccgataatacaccttccctctccaagtataattgtcgggaagttcatcacactgacattttgccgtctgggaatacgactacagcagctaagaggaacgtgatctcccggtaccatttggatacttccgtaagctcccaacagagctaccaaaagaagaattccatgtcttcaaaatactcgtgcaagggcggatacctgtctgatggggactccccggaactcaccaccaaagctagcaaacacgggagtgagaacaaattcggtaagggcaaggaaatcatttctaactcctgttcaaagaacgagatcgacattgatgcctttcgacattactccttctccgaccagcccaagtgcagccaatacataagtgggctgatgtctgtccatttttacggcgctgaagacctcaagccacctcggattgatagcaaggacgttttctgcgccattcaagtggatagtgtcaacaaagcacgcaccgccctgctaacatgccgcactacttttttggacatggaccacactttcaacattgagatcgagaatgctcagcaccttaaattggtcgtattctcctgggaaccaacccccaggaagaacagagtctgctgtcatgggaccgtcgtgcttccaacgctgtttagagttaccaagacccaccagcttgctgtgaagctggagcctcggggtctaatttatgtgaaggtaaccctcatggagcagtgggagaatagtttgcatggcctcgacatcaatcaggagccaataatctttggcgtcgacattcagaaagttgtggagaaggagaatattggtttaatggtgcctttgctgatacaaaaatgtattatggagattgaaaagagaggctgccaggttgtgggcttgtatagactgtgcggtagtgctgccgtcaagaaagagttgcgggaggcgttcgaacgagatagcaaggcagtaggcctgtgtgagaaccagtaccccgacatcaatgtaattacaggggtcctcaaggattatttgcgagagctgccgtcacccctgataacgaagcagctttatgaagcagtgttggatgccatggccaagtctcccttgaaaatgtcatccaatggatgcgagaatgatcccggtgactctaagtacaccgtggatttattggactgcttgcccgagattgaaaaagccaccctgaaaatgctgcttgatcatctcaaactcgtcgcaagctatcacgaggtgaacaaaatgacttgtcagaacctggcagtctgcttcggccctgtgctgctgtcccagagacaggagcccagcactcataataaccgggtgttcacggactcagaggagcttgcgtctgctctggatttcaagaaacacattgaggttttacactatttgctgcagctctggcctgtgcagcgccttacagtaaagaaaagcacggataatctgtttcctgaacaaaagtcttccctgaattacttgaggcaaaaaaaagaaaggcctcacatgctgaacttaagcggaactgattcctcaggcgtgttacgaccaagacagaacagactggattctcctttaagtaatcgatacgcaggcgactggagcagctgcggggagaattattttctgaacactaaggaaaatcttaacgatgtcgactacgatgacgttccttcagaagaccgcaagatcggcgagaactactcaaaaatggacggacctgaagttatgatcgaacagcccattccgatgagcaaggaatgtacattccagacctacctgacaatgcaaaccgtcgagagtaccgtggaccggaagaataatttaaaagatcttcaggagagtattgataccctgatcggcaacctcgagcgcgaacttaacaaaaataaactaaacatgagcttttag

SEQ ID NO: 28304 - DNA, 1353 bp, synthetic construct
  source 1..1353: mol_type = other DNA; note = Synthetic coding sequence
atggacccgggaaatgaaaactccgccaccgaagccgcagccatcatcgacttggacccggattttgaaccacagtcccggcctagatcctgtacatggcctcttcctaggcctgagatcgctaaccaacctagcgaaccgcctgaagtcgagcccgacctcggcgagaaagccatcgaaagtgcccctgaaaagaggctcactcttgcccagatatatgagtggatggtgcgcaccgtgccgtatttcaaagataagggagacagcaacagtagcgccggatggaaaaattctattaggcataacctttccctgcatagcaagttcatcaaagttcataatgaggccactggaaagtcgtcatggtggatgctgaacccggagggcggtaaatctggtaaggctcctcgcagaagagctgccagcatggactccagttcaaaacttctgcgcggacgttcgaaggctcccaagaaaaagccttcagtactccccgcacctccagagggcgctacccctacaagcccagtggggcattttgcaaagtggagcggatcaccatgcagtagaaatcgggaggaggctgatatgtggaccacattcagaccaagatcttctagtaacgccagcagtgtgagtaccagactctcccctcttaggcccgaatcagaggtcctcgcggaagaaatccccgctagtgtgagttcatacgccggtggggttcctcctactctcaatgagggactggagctgttagacggacttaacctgactagcagccatagtctcctcagccgctctgggctgtctggattttctcttcaacatcctggggtgacaggccctctgcacacatattcttcctctctctttagtccggcagaggggcctctcagtgccggagaggggtgtttcagcagcagccaggcactagaggccctgttgacaagtgatacccctccacccccagcagatgttctgatgacccaggttgatcctatcctttctcaggcgccaactctgttgctgctggggggtctgccatctagctccaagctggctactggtgttgggctctgtccaaaaccccttgaagctccgggtccgagttctcttgtccctacgctcagcatgatcgccccacccccagtgatggcatccgccccaattcctaaagccctcgggacacctgtcttaactccccctactgaggcagcaagccaggacagaatgcctcaggatcttgatctggacatgtatatggagaatctcgagtgcgacatggacaacatcattagcgacctgatggacgagggagagggcttggattttaacttcgagcccgacccctag

SEQ ID NO: 28305 - DNA, 1125 bp, synthetic construct
  source 1..1125: mol_type = other DNA; note = Synthetic coding sequence
atggctggttatttatctgaatctgactttgttatggtcgaggagggattctctacgagagatctgttaaaggagctgacactcggggcatcccaggctacgacggatgaagtagccgctttttttgtcgccgatctcggagcaatcgtgaggaaacatttctgctttctaaaatgcctgcctcgggtgcgaccattttacgccgttaagtgcaacagcagccctggagttctgaaagtactggcccagctgggactgggattctcttgcgctaataaggcggagatggagttagtgcagcatattggaattcctgcttccaagattatttgtgcaaatccgtgcaagcagattgcccagattaagtatgccgctaaacacggcatccagctgttgtctttcgacaatgagatggaactggccaaggtggtcaagagccatccttccgccaagtttgtccagcagagagggacagcatgccttatacggatggtgttgtgcatcgcaactgatgattcccacagcctcagttgccttagtctcaagtttggtgttagtctcaaaagctgccgccatctgctggagaacgccaaaaaacaccacgttgaagtcgtcggggtcagtttccacattggcagtggctgccccgaccctcaggcttatgcccagagtatagctgatgccaggcttgtctttgaaatgggcaccgagttgggacacaagatgcatgttctggacttgggagggggttttcctgggacagaaggcgctaaagtgagattcgaagagattgcttccgttatcaactcagccctggatctgtacttccccgagggttgtggagtcgatatttttgctgagctgggaaggtattacgttacatcagcatttacagtggccgtgtctattattgccaaaaaggaagtgctgcttgaccaaccagggagagaggaggagaacgggtccacaagcaagactatagtttatcacctggatgaaggagtatacggaatctttaacagcgtcttatttgataacatttgcccaaccccgatactgcagaaatctaaaaaccattctccgtgctatatgtctctggagtccattcacttcatcgcagtttag

SEQ ID NO: 28306 - DNA, 1629 bp, synthetic construct
  source 1..1629: mol_type = other DNA; note = Synthetic coding sequence
atggatcgttcaaaacgaaatagcatagctggcttcccaccccgagtagagcgtctggaggagtttgaagggggagggggtggcgagggaaacgtgtcacaggtcggcagggtgtggccaagctcctatcgagcactgataagcgctttttcaaggctgacaaggctggacgatttcacctgtgagaagattgggtctggtttcttttctgaggtcttcaaggtccgccaccgtgcctctgggcaggtgatggctcttaagatgaacaccttaagctccaaccgcgctaacatgctcaaagaagttcagcttatgaatcgcttgtctcaccccaacatactcaggttcatgggggtgtgtgttcaccagggccaactgcacgctcttacagagtacattaatagcggcaacctcgagcagctactggactccaacctgcacctgccctggactgttagagttaagcttgcctacgacatcgcagtgggcctaagttatcttcactttaagggaatctttcatcgcgaccttacctctaaaaactgtctaatcaaacgcgacgaaaatggctactccgcggtcgtggccgacttcggactggcagagaaaatcccagacgtgagtatgggatctgaaaagcttgccgtggtcgggagccctttttggatggcccctgaagttcttcgagacgaaccctacaacgagaaagccgacgttttctcttacgggatcatcctttgcgagatcatagcacggatccaagctgatccagattacctgcccagaacagagatggaccccaagctcaggccatcttttgtggaaattggcaaaaccctcgaagagatcctctctcgtctacaagaagaagagcaggagagggaccggaagctgcaacccaccgccagggggctgctggagaaagcacctggcgtgaaacggctcagtagcctggacgacaaaatccctcacaaatcaccatgtcctcggaggacaatttggctgagccgctctcagtcggacatcttttctcgcaagccccctcgcacagtgagtgtgctcgatccttactatagacccagggacggagccgcacgtacacccaaggtgaatcctttttccgctcggcaggacctgatgggcggaaaaatcaagttctttgatctcccttctaaatcagtcatctcattggtgtttgatctagatgcaccaggacctggcactatgcccctggctgactggcaggaacctctggcccctcctattaggaggtggcggtccctgcctggcagccccgaattcctgcaccaagaggcctgcccattcgtgggcagagaggaatccctttccgacggtcccccacctcgcctgagctccttgaagtaccgcgttaaggagatccccccatttagggcctcggcactgcctgccgcacaggcacacgaggcaatggactgctctatcctgcaggaagaaaatgggttcggtagtcggcctcagggcacatcaccttgtcccgctggcgcttccgaggagatggaagtcgaagaacgtcctgcgggaagcacacccgcaacgttttccacatccgggattgggctgcagactcagggtaagcaagatggctag

SEQ ID NO: 28307 - DNA, 786 bp, synthetic construct
  source 1..786: mol_type = other DNA; note = Synthetic coding sequence
atggggagcaggaagaaagaaatcgccctgcaggttaacatcagcacccaggagttatgggaagaaatgctttcttcaaaaggtctcacggtagtggacgtgtatcagggttggtgcggcccatgtaagcctgtcgtgtctctatttcaaaagatgcgaatagaggtgggacttgatctgttgcatttcgccctgatcaaggacgaggctctgagcgatgaagacgagtgcgtttctcacggaaaaaacaatggggaggacgaagacatggtgtcttcagagagaacttgcactctggcgattatcaaaccagatgctgttgcccacggaaaaactgacgaaatcataatgaagattcaggaggctggcttcgagatcctcaccaacgaggaaaggactatgacagaggcggaggtcagactgttctatcagcacaaagctggcgaggaagccttcgaaaaactggtccaccacatgtgctccggaccgagccatctactgattctcacaagaacagagggatttgaggacgtcgtgacaacctggaggacggtgatgggcccaagggacccaaacgttgctagacgagaacagccagaatctctcagagcacagtatggaacggagatgcctttcaacgctgtgcatgggtcaagggacagggaagacgctgatcgggagctggcgctactgtttcctagcctcaagttctccgataaagataccgaggcccctcagggagagtcttcaacacaacccagattaaaaatcactgacctcgactag

SEQ ID NO: 28308 - DNA, 1767 bp, synthetic construct
  source 1..1767: mol_type = other DNA; note = Synthetic coding sequence
atggaggcagccgacgcgagtcgttcaaacggcagcagcccagaagcgcgagacgctagaagccctagcgggccaagcgggtcccttgagaatggtaccaaggctgacggtaaagacgccaaaactactaacgggcatggcggagaggccgctgaaggaaaaagtctgggttctgccttgaaacctggagaggggagatccgcccttttcgctggcaatgaatggaggcggccaatcatacagtttgtcgagagcggtgacgataaaaattcaaattattttagcatggattctatggaagggaaacgcagcccctatgccggtttacagttgggcgcagctaagaaacctcccgtaacctttgctgagaagggggagctgcgaaagtctatcttctcagagtcccggaagcccaccgtgtccatcatggagcccggtgaaaccagaagaaattcctatcccagggcagacacagggttatttagccgctctaagtccggctcagaggaagttctgtgtgattcatgcatcggtaacaagcagaaggctgtgaagagctgcttagtgtgtcaggctagtttctgcgagctccacctcaagcctcacctcgagggcgctgcttttcgagaccatcagctgcttgaaccgatccgcgattttgaggcgaggaaatgccctgttcacgggaaaactatggagctgttctgccagaccgatcagacatgcatatgttacctgtgtatgtttcaggagcataagaatcactccaccgtcactgtcgaggaagcaaaggctgagaaggagacagagttatcactgcagaaagaacagctccagctcaagataattgaaatcgaagacgaagccgagaagtggcagaaggagaaggaccgaatcaagtcttttacgactaatgaaaaggctattttagagcagaactttcgcgacctggtgagggacctcgagaaacagaaggaggaagtgcgcgctgccctggaacagcgggagcaggacgcagttgatcaggtgaaggtcattatggacgcccttgacgagcgcgcaaaggtgctgcatgaggacaaacagacgcgggagcagcttcacagcatctccgacagcgttctgtttctgcaggagtttggtgctttgatgtctaactattctctgccgccacctctgccgacctatcatgtgctgttggaaggggagggactgggacagtccctcggaaattttaaggacgacctccttaacgtgtgcatgcggcatgtggaaaaaatgtgcaaagccgaccttagcaggaactttattgaaaggaaccacatggaaaatgggggagaccacagatatgtcaataactacaccaattccttcggcggtgaatggtcagcccctgatacaatgaaaagatacagtatgtatctgaccccaaaaggcggagtgcgcacctcgtaccagcctagctccccaggacggtttacgaaggagaccactcagaagaatttcaacaatctgtacgggactaaggggaactatacctcccgcgtgtgggagtattctagctcaatccagaacagtgacaatgacctgcctgtcgtgcaaggtagttcctccttttcattgaaaggctacccctcccttatgaggagccaaagtccgaaagcccagcctcagacttggaagagcggtaagcagacaatgttaagccactaccggcctttctatgtgaacaaaggaaatggcatcggatctaacgaagctccttag

SEQ ID NO: 28309 - DNA, 3567 bp, synthetic construct
  source 1..3567: mol_type = other DNA; note = Synthetic coding sequence
atgaagaagaaacagacagtgcaaggcaccttcagtaagctgttcggaaagaagcatacaactaccccatccacctctctgtatgccaccaacccaccctggatctttactcaggaagcccctgaagaaggaaccgggggattcgatggaatttactatggagataatcgattcaacacagtcagcgagagcgggacagcgacactcaaggctagacccagagttagaccgctgctgacgttcctccccctaaatgcccaagaaaatcatggactcgccgtacccaccccatctgtgccggacgacttcgctgacaaggaagtcaccgggacaagcagcttggtgaatggaaatctccgcctgtattcttctgttggagatctgcgcccaggacaatacgggcaggacctgctgatcccacctcctccgcctgggccagcccctgggccaccgcaggacatatctgaaccgcctggaggcagcccactgccaagtccaccctccactgccccaccaccgccaccactcctactggagccaccgccacctccgtcaatggcgccaccccctccaccagtcctggaggctttgtcaccccctcacacgctgtcaagcccatcaatacccactccccctgattttattccaccagcccctccacttgcttttctggcacctccacccccaccagtgcccgctccagcgcctcccgctccagcttctccccacacagtgggcacaaggctgttcccacctgggggagttaccaagtggaagagtgatgtggcgctcaacggacggcaagcggaggctacccgggcttctccacccagatctcctgcggaacccaagggttcagctctgggaccaaatcctgagccacacctcaccttccccagatcctttaaggtcccccctccaaccccagtgcggacttccagtatccctgtgcaggaggcccaagaagcccctaggaaggaggagggtgccacgaagaaagccccttctcgcttgccactgccccctagttttcacatacgacccgctagtcaggtctacccagacagggcaccagagccagactgccccggagaactgaaagccaccgccccagccagcccacgtctcgggcagtctcaatcccaggccgacgagcgggctgggacaccacctccagccccacctctgccccctcctgcgcctccgctcccgccacccgcacctcccctgcctcccgcagctccaccactcccttgtgctcagaaggccgcacacccccctgccggattcacaaagacacctaagtcctcctcccccgctctcaaacctaaaccaaacccccctagtcctgaaaacaccgcctccagcgctccggtggactggcgcgacccctctcagatggagaaattgaggaacgagctggcggcttatttgtgcggaagtagacgcgaagatagatttctcagccataggccgggacctactgtggcaccccaatctaaggaaggaaagaagggccctagattacctgagaaagagaccctgctgtcgctcccagctaaggacaccccacccggagtgcctgaaaagtctcttggagggtccagtctaactgagactgaggcagcgccaagcttaaccctaccatccgtcgactatatccctcaggactcaccgaccccctctgtccggcaaatcagaaatgagctggaggctcggttgagctcagcagctgagaaggaggctaagccatctatcggctcccttcctccaaaacctcgtctcgagggcggtcggatatgcgaaaacggcgcagatgacgacaagctctccaagcccgtcgctaaaaacctgccgcctcaaagtaccaccttgctccctaccaccagtttacagcccaaggcaatgctcggcccagcgatcccacccaaggcgactccggaaccggcaatcccccctaaggccacactctggccagccaccccacccaaggcgacgttaggccctgcgaccccactaaaagccacttcagggcctaccacaccattaaaggctacaagcggcccagcaatagccagcactgccaccacgctgccaacaaccactagccagttaatggcagagaaggattcagggccagctgggcagccagaaaagccagccagtcaagaggtctctacaccatctcaggccagaggcgagggctcaccctccgaggccactcggctgcccacccagggcgcaagatcatcagccgcattccctccaaagacgagcccgggaggaggcgaagtgccatgtctttataaacctcattgccatcagtccagccttagcagggaggtcgcagtagtcatgcctaccctggccagagggggtgccgcaggcccaggcgaacctgtggaagtaaaggaaccccctggactgcccgctaagccccctgcaagtgctcaacccaccgatgagttgcttagacatcccgtcactggtgaagtcgttgagcgtggctctccgatggccctgcttttagctgcccgtcagagggcccaaaaaggccgttcagtgggcgcagccttgggcaggtctagtctgccgggatccctgcgggatcattcgcaccaggcagaggccagctccgacagcatcttccatagtcagggaacgcccaattcatttacagttgtgccgaagctgcctaaagaggcggagaaggactcaccactgacgactgagattccgaataagtgggggccacgcctgggaagagatgccgagggtactgagctgagtcggaggcacaactggaccaagccggaaccacaggccccagtggcttgggagcgcgttgccccatctaatctgccacagggtcacccactgccaaagtcatttagttcacctccctctcccagtaacaagagagaggaagaagaggaggagtttaactttgaggtgatcccaccacctccggaattttccaacgatccagagccaccagcacccgctctccagtatttggggaggcaatctagcccgcctcgcaataattattcagatctgcggcagctgccgaatgctggcccaggagccccaccggctctgggcttctcaaggttccctgccggtgcacggtacgcgggagcgggtggcctcgagagattctcagggggagggcgttccctcatcaagaaacgcctatatgtcggcgagcctcacaggggcccaggtctcccacacggagggacaggcaggagtctttcgagccccaattgttttggaccccagccaggaggccctgagatgaggcgggtgaattcagctggaagagctccacctgggggtctacacgcaccaagactctctcttgaaggggcagcccgtggcgcagcggaggcaaagcacaaggctccagggtccgccgattatgggttcgcacctgctgcaggccgtagtccatacaccaccaccaggtacggcagtcccattaacacattcaccgtccgacctggaacacgccaccctatatcctatgtgtgctccggcgctcatcggaaagccacctcatag

SEQ ID NO: 28310 - DNA, 2598 bp, synthetic construct
  source 1..2598: mol_type = other DNA; note = Synthetic coding sequence
atggccgtggcccgtgtggacgcggctctgccacctggagagggtagcgtagttaactggagtggtcagggactccagaaactcggtccaaatctgccgtgtgaggcggacatacacacactgatcctggacaagaatcagatcataaaactggaaaatctcgagaagtgcaagcggctgatccagctgtccgtggccaataatcgcctggtgcgaatgatgggagtggccaagctcactctcttgagggtgttgaacctaccacacaacagtataggctgtgtggagggtctgaaagagctcgtgcacctagagtggcttaaccttgccggaaataacctgaaagccatggagcagattaattcatgtaccgcactgcaacatctcgatctgagtgacaacaacatttctcaaatcggagacctatccaagcttgtatctttgaaaacactgcttttgcacgggaacataatcacttccctgaggatggctccagcgtacctgcctcgaagcctcgccattctctctctcgccgaaaacgaaattagggatttgaacgagatatcattcttggctagcctgaccgagctggaacagctgagtataatgaacaatccatgtgtgatggcaacgccatcgattcccggtttcgattaccgcccttatatcgtgagctggtgtctaaatttgcgtgtgctggacggctacgtaatcagccagaaggaatcgctgaaggccgagtggctgtacagccagggaaaggggagggcgtataggcccggtcaacacattcaactcgtccagtacctcgcgaccgtgtgtcccctcacctccactctcggacttcagacagcagaagacgcgaagctcgagaagatcctgagcaaacagcggttccaccagcgccagctcatgaaccagtcacagaacgaagagctctcccccctcgttccagtggaaacacgagcgagcttgatccctgaacattcttcccccgtccaggattgccaaatcagccaagaatccgagcctgtgatccaagtgaactcttgggtgggaatcaactctaacgatgaccagctctttgccgtcaagaacaacttccccgcatctgtccacactacccggtacagccggaatgaccttcaccttgaagatatccagacagacgaagacaagcttaactgcagtcttctaagttccgagtccacatttatgcccgtcgcctctggcctgtcaccactctcacccacagtcgaactacgacttcagggaataaacctgggattggaggacgacggggtcgccgatgagtccgtgaagggcttggagtcccaggtccttgacaaggaagaggagcaacctctgtgggccgctaatgaaaactccgttcagatgatgcgcagtgagatcaatacggaagtcaatgaaaaagcgggtttgctcccttgcccagagcctactattatttctgctatcctgaaagatgataaccactccttgacattttttcctgaaagcaccgaacagaaacagtccgatataaagaagcccgagaacacacaacccgagaataaagaaactatttcccaggccacctctgaaaagctccccatgatactcacccagcggtccgtcgctctcggccaggacaaggtggccctacaaaagctgaatgatgcggcaacgaagttgcaggcatgctggcgcggattctacgcacgcaactacaatccacaggctaaggacgtgaggtacgaaattcggcttaggcggatgcaggagcatattgtgtgtctgacagacgagattcggagactgcggaaagaaagagatgaggaacgcattaaaaagttcgtacaagaggaagccttcaggttcttatggaaccaggttagatctcttcaggtgtggcaacagactgtggaccagcgcttgtcgtcttggcacacagatgtgccgccaatcagtagtactctcgtccccagcaagcatccactgtttacccagtcgcaggagagtagctgtgaccagaacgctgattggttcatcgcaagtgacgtggctcctcaggaaaagagtctgccagaatttcctgattctggtttccactcctcattaactgagcaggtacactcattacaacacagtttagacttcgagaaaagttccactgaggggtcagagtctagcattatgggcaattcaatagatactgtgagatatggaaaggaatccgatttaggggatgtgtccgaggagcacggagagtggaataaagagtcttcaaacaacgagcaggacaattctctgctggagcagtacctcacctccgttcagcaactcgaagacgccgacgagagaaccaacttcgacaccgaaaccagagatagcaaactgcacattgcctgtttcccagtgcagctcgacacactgtctgacggtgcatctgtggacgagagtcatgggatttctccccctttacagggagaaattagtcaaacccaggaaaatagtaaactcaatgctgaagtgcagggacagcagcctgaatgcgactcgacctttcaacttctgcatgtcggagttaccgtttag

SEQ ID NO: 28311 - DNA, 1275 bp, synthetic construct
  source 1..1275: mol_type = other DNA; note = Synthetic coding sequence
atgtccgtgggttgtcccgaacccgaacccccacgaagtctgacctgttgtggtcccggaacagcacccggacctggggcaggagtaccgctcctcacagaggatatgcaggcactcaccttgagaaccctcgctgcgtcggatgtcactaagcattacgaattggtgagagagttggggaaaggtacatatgggaaggtagacctggtcgtgtacaagggcacgggcacaaagatggcactgaaatttgtaaacaagtccaagaccaagctgaagaacttcctacgggaggtatcaataaccaacagcctgtcgagcagtcccttcataattaaagtctttgacgtggtgttcgagactgaggattgttacgtgtttgcccaagaatacgcgcctgcgggtgacctgttcgacattatcccccctcaggtgggcttgcctgaagatacagttaaacgatgcgtgcaacaattggggctggccttagacttcatgcacggaaggcagctggttcaccgggacattaaacccgagaacgttctgcttttcgacagagaatgccggagggtaaaactggctgacttcgggatgacccggagggtgggttgcagagttaagagagtgagtggcaccatcccgtacactgccccagaagtatgtcaggctgggagagccgatggattagcggtggacaccggtgtggacgtttgggccttcggcgtgcttatcttctgcgtgctgaccggtaattttccatgggaggctgctagtggcgctgatgcctttttcgaagagttcgttcgctggcagagaggtagattaccaggcctcccctcccagtggcgtagattcacagaacctgccctgagaatgtttcaacggctgctcgctttggagccagaacgtaggggcccagccaaggaggtatttagattcctgaagcatgaattgacttcagagctgaggcgtagaccctcccacagggcaagaaaacccccaggggatcgacccccagcagcaggccctttaaggctagaagctcctggccctctcaaacgcacagtgctgactgagagtggttcaggttcaagacctgccccaccagccgtcggttctgtaccactgccagtgccagtgccggtaccagtgccagtgcctgtccccgtgcccgaacccggactggcaccacagggacctccgggtcgtactgacggcagagccgataaatccaaaggtcaggtggtgcttgcgactgctatagagatttgcgtgtag

SEQ ID NO: 28312 - DNA, 1632 bp, synthetic construct
  source 1..1632: mol_type = other DNA; note = Synthetic coding sequence
atggctacccgacgcctgggagtgggggaaaccctgggggcactgaatgccgctctcggccctggtggacccgtgtggatcaaggagacccgcacacgtcatctgcgctctagagacttccttgcacctcacagggctctgcaggcccgattcgatgacggccaggtgcccgagcatttgttgcacgctctagcttgcctgcagggccctggcgttgcacccgttcttcgatgcgccccaactcctgctggcctgtccttgcagctccaacggtccgccgtgtttgaacgggttctctcagctgtcgccgcttacgcgacccctgcttctcccgcttctcttggtcagcgtgtattactccattgccctgcgctaagatctagcccctgcgccctgcggctgtctcaattacggaccgtcttggtggccgatcaccttgcacgggctctgcgagcacatggggtatgcgtgaggctggtgcctgcagtgcgagaccctcacatgctgacttttctccagcaattgcgcgtggattggccagcagcaagtgagagggcaagctcacatactcttaggtcccacgctctggaggagctcacgtcagctaacgacggaaggacccttagcccgggtatcctggggcgactgtgcttgaaggaactcgtcgaggagcagggaagaaccgccggatatgatcccaatctggataattgcctggtgaccgaggatttgctgtccgtgctcgcggagttgcaggaagctttgtggcactggcctgaggatagccaccccggactcgctggcgcatctgacaccggaaccggaggatgtctcgtcgttcatgtggtgagctgcgaggaagaattccagcagcaaaagcttgacctcctttggcagaagctggtcgataaagctcctttacgccaaaagcatctcatctgcggcccagtcaaggtggcaggggcaccagggacgctcatgacagcaccagagtactacgagtttcggcacacccaagtttgcaaggcctctgctttaaagcacgggggagatcttgcccaagacccagcctggacggaaattttcggcgtgcttagcgtggctaccataaaatttgaaatgctctccaccgcaccacagtctcagcttttcctggcacttgctgactccagcataagcaccaaggggacaaaatctggaaccttcgtgatgtacaattgcgcccgtcttgccaccctttttgagagttataaatgtagcatggagcaaggattatacccaacatttccacctgtatccagcctggacttttctctgctccacgacgagggcgagtggcttctacttttcaactctatcctccctttccctgacctcctgtcacgaaccgccgtgctggattgcacggcccctggactccatattgccgtaaggaccgaaatgatctgtaagtttctggtccagctttccatggacttctccagttattataatagagttcacatcctcggagagccaagacctcacctctttggccagatgttcgtgaggctgcagctgctccgggcagtgagggaggtcctgcacacagggctggctatgctaggcctcccacccttatcccacatctag

SEQ ID NO: 28313 - DNA, 1353 bp, synthetic construct
  source 1..1353: mol_type = other DNA; note = Synthetic coding sequence
atgggcaagtccttcgccaattttatgtgcaagaaagacttccaccccgcttccaaaagtaacattaagaaggtctggatggcagaacagaaaattagctacgataagaagaaacaagaggaattgatgcaacaatatctgaaggagcaggagtcctacgataacagattgttgatgggagacgaacgtgttaagaatggtttgaattttatgtatgaggctcccccaggggctaaaaaagagaataaagagaaggaggagacagaaggggagacggagtataaatttgagtggcaaaaaggtgcaccaagggagaagtatgccaaagatgacatgaacatacgcgatcaaccctttggaatccaggtacgcaacgtcaggtgtattaagtgtcataaatgggggcatgtgaacacggaccgagaatgccccctctttggactttcgggcatcaacgcttcttcagtaccaacagacggatctggacccagcatgcatccctccgaactgatagccgaaatgcgcaattccggatttgctcttaaaaggaatgtgctgggcagaaacttgactgccaacgatcccagccaggagtacgtggcctctgaaggagaggaggatcccgaagtcgagtttcttaagagcctgacgaccaagcaaaaacaaaaattgctgcgaaagctggatagactggagaaaaaaaagaaaaaaaaagacaggaagaaaaagaaattccaaaagtcacggtctaagcacaagaaacataagagcagttcatccagctcttcatcttcctcgtcatccagtagtaccgagacaagtgagagctcgagcgagtcagagagcaacaacaaagagaaaaaaatacagcgcaaaaagagaaagaagaacaagtgtagtggacacaataatagtgatagcgaagagaaagacaagtccaaaaaaaggaaactgcatgaagaattatcgtccagtcaccacaatcgagagaaagcaaaagagaagccaaggttcctaaaacacgagtctagccgagaagacagcaaatggagtcattcggacagcgacaagaagagtcgcacacacaaacattctccggagaagcgaggtagtgagagaaaagaaggctcctcccggtctcatgggagagaggagcgatcccgcagaagcagaagtcgatctccaggctcttataagcagcgagaaacaaggaaacgggctcagcggaatccaggcgaagagcagtcacgcagaaacgattctcgttcccatggcactgacctttacagaggtgagaagatgtaccgtgagcatcctggcggtacacacaccaaagtaacacagagagaatag

SEQ ID NO: 28314 - DNA, 1152 bp, synthetic construct
  source 1..1152: mol_type = other DNA; note = Synthetic coding sequence
atgagcccagaggtggctctcaacagaataagtcccatgcttagcccgttcatcagttcggtggtgcggaatggtaaggtaggactggacgcgacaaactgccttcgcattacagatctcaagtccggttgcacttcgttgacccccggtcctaattgtgataggttcaaattgcacataccctacgccggagagaccttaaagtgggacatcatttttaatgcacagtacccagaactaccgcctgatttcatcttcggagaagacgctgaattcctgcctgatccgtctgccctacagaacttagccagttggaacccgagtaaccccgagtgtctgctgctggtggttaaagagctggttcaacagtaccaccaatttcagtgcagccgactgagagagtcctcgaggctcatgtttgagtatcagacgctcctcgaggaaccgcagtatggggaaaatatggaaatttatgccggtaagaaaaacaattggacaggagaatttagcgctaggtttctgttgaagttgccagttgatttcagcaacatacctacgtatctactgaaggacgtcaacgaggaccccggagaagatgtcgctctgctctcagtgagctttgaagacactgaggccacacaggtgtaccccaaactttatttgtcgccgcgtatcgaacatgcccttggcggatcatcggcacttcacatccccgctttccctggtggagggtgtctgatagattatgtgccacaggtatgtcacttgttgacgaacaaagtccagtatgtcatccagggctaccataagaggagagagtacatagcggcatttctctcgcattttggcacaggagtggttgagtatgacgccgaaggctttactaagctcaccctcttattgatgtggaaggacttttgctttctagttcatatagatctacccctctttttcccacgagatcagcccactctaaccttccagtctgtttatcatttcactaactctgggcagctctattctcaagctcagaaaaattatccatatagtccgaggtgggatggtaatgagatggccaagagagcaaaggcctacttcaaaacgtttgttccccagttccaagaagccgcattcgctaacggtaaactatag

SEQ ID NO: 28315 - DNA, 675 bp, synthetic construct
  source 1..675: mol_type = other DNA; note = Synthetic coding sequence
atgcccaaccggtgcggtatcatccatgtgagaggcccaatgccccctaaccggatcagtcacggggaggttctcgaatggcagaagactttcgaggaaaaacttacgccactgctctccgtgcgcgagtcactgagcgaggaggaggcacagaaaatgggccgaaaagatccagaacaggaggttgaaaaattcgtcacgtcgaacacacaagagctgggcaaggacaaatggctttgtcctctgtccgggaagaagtttaagggccctgagtttgtccggaaacatatcttcaacaagcatgccgagaaaattgaggaggtaaaaaaggaggtggccttcttcaataactttctgaccgacgctaagaggcctgccctccctgagatcaagcctgcacagccacctgggccagctcagattctcccccctggcctgacaccaggtctgccctatccccatcaaacaccgcagggtctgatgccatatggacaaccacgacctcccataggcttatggtcttggtgctgtccaccttgcagtccacaggaggctctccacactcccatgcctaggatggtcctcgtggagggaacaatgatgccttccgaagctcgcgaagtcatcttggggaatctagctaccggctggtttgtggagacccaaggtccttag

SEQ ID NO: 28316 - DNA, 4806 bp, synthetic construct
  source 1..4806: mol_type = other DNA; note = Synthetic coding sequence
atggaggccggatccgtggttagagctatttttgacttttgcccatccgtgtctgaggaactgccactctttgtgggggatattattgaagtgcttgctgtggtcgatgagttctggctcctgggcaagaaagaagacgtgacaggacagtttccttcgagcttcgttgaaatagtcactatcccctccctcaaagagggtgagcggctctttgtctgcatctgcgaatttacgtctcaggagctggataatcttcctctccaccgcggagatctcgttattttagacgggatcccaacggcgggttggctgcaggggaggagctgttggggcgctcgagggttttttccatcaagctgcgtccgggagctctgcctgtcctcccagtcacgccagtggcacagccagagcgcacttttccagattccagagtactcaatggggcaggctagagccctcatgggcttgtccgcccagttggatgaagagctcgacttcagagagggagatgtcattacaattattggggttccagagcccggatggttcgagggtgagttagaaggcaggagaggcatttttcccgaggggttcgtagagcttctagggcctcttcgcactgttgacgagtctgtatccagcgggaaccaggatgactgtattgtgaatggcgaggtcgacacaccagtgggagaggaggaaatcggacccgacgaggacgaggaagagccaggtacatatggcgtggccctgtacagattccaagccctcgaacctaatgaattagactttgaagtaggggacaagatcaggatccttgcaaccctcgaagacggctggctcgaaggcagccttaagggccgaaccggaatttttccttatcgattcgtgaagctgtgccccgacacccgcgtggaagaaacgatggctctgccacaagaaggtagccttgcgaggatccccgaaacttcattagattgtcttgagaatacactgggggtcgaggaacagagacacgagacatccgatcacgaggctgaggagccagactgcatcatttctgaggcaccaacatctccgctcggacacctaaccagcgaatacgacacagaccgcaattcataccaggatgaggataccgccggaggccctcccagatcgcctggcgtggaatgggaaatgccgttggcaacagattccccgacatcggatccgaccgaggtggtgaacggtatcagcagtcagcctcaggtaccctttcatcccaatctccagaagagccagtactattccaccgtggggggaagccacccccatagcgagcagtacccagaccttttaccactggaagcccgaactcgtgactatgccagcctgcccccaaagcggatgtacagccagctcaagactttgcaaaagcccgtcctgccactgtatcgcggtagctccgtgtccgcctcacgcgtcgttaaacccaggcagtcctccccacagctgcataacctggcttcctacacaaaaaaacaccacacctctagcgtgtacagtatcagcgagcggctcgaaatgaagcctggccctcaggcccaaggattggtcatggaagccgctactcattcacagggcgacgggtctacagacctcgacagtaagttgacacaacagctcattgaattcgaaaaaagcctggcgggtcctgggaccgagccagataagatactcagacactttagcattatggatttcaactccgagaaagacattgtccggggatccagcaagctgatcaccgagcaggagcttccagaacgtcggaaagctcttcggcctccgccacctagaccctgtacccccgtatctacgtcgcctcacctcctggtcgatcagaacttaaagcctgctccaccgctggtggtcagaccctcccgccctgcccctctgcccccatcagcacagcaaagaaccaatgctgtttctccaaagctgctatcccggcaccggccaacctgcgaaaccctggagaaagaagggcctggtcatatgggacgatcccttgatcagaccagcccatgtcccctcgttctggtcagaattgaggagatggaacgggatctggacatgtactcacgtgcgcaggaagaactcaatctgatgttagaggaaaaacaggacgaaagttcaagggccgaaaccctggaggatcttaagttttgcgaatctaacatcgagagcctgaacatggagcttcagcagcttagagaaatgacactactgagcagtcagtcgagctccctggtggcaccctctgggtctgtgagcgccgagaatcccgaacagagaatgttggaaaaacgcgctaaggttattgaggaactgttgcagactgagcgggactacatccgtgatcttgagatgtgcatcgagagaatcatggtgccaatgcagcaggcccaggtgccaaatattgacttcgagggactgttcggaaacatgcagatggtgattaaggtctccaagcagcttttagccgctctcgagatatctgacgccgtgggcccagttttcctggggcatcgcgatgagctggagggaacctacaaaatttattgtcagaatcacgatgaggccatcgctcttctagagatttacgagaaggatgagaaaatccagaagcatctccaggactcgctggccgatcttaaatctctgtataacgagtggggttgtaccaattacataaacctgggcagctttctgattaagcctgtccagagagtgatgaggtacccattactcctgatggaacttctgaattctacccccgagagtcaccccgacaaagttccgttgaccaatgctgttctcgccgttaaggagatcaatgtcaacataaacgaatataaacgaaggaaggacctgggaaaaaactccattatagcagaaaaagagtatgcccacgctgaagagtctgcctttttaacgtactcacttgtgctgaaatataggaagggcgacgaggactccttgatggaaaaaataagtaaactaaatattcacagcattatcaagaaatcgaacagggtctcttcacaccttaagcacctgacagggtttgctccacagatcaaggacgaggtctttgaggagacagagaaaaactttaggatgcaagagcgactaattaagagtttcatcagggacctctcactgtatctgcagcatatcagggagagcgcgtgcgtgaaagtggtcgctgcagtttcaatgtgggacgtgtgtatggaacggggacaccgggatctggagcagttcgagcgagtgcataggtacattagtgatcagctattcaccaatttcaaggagcgcaccgaacgcctggttatttcccctttgaatcagttgctaagcatgtttaccggaccacacaaattggttcagaaacggtttgacaaattactggacttctacaattgtacagaaagggctgaaaaactaaaggacaaaaagaccctggaagagctccagtccgcccgaaacaactacgaggcactgaatgcccaactgctcgacgagctgcctaaatttcaccagtacgcacagggattattcacaaattgcgtccacgggtatgcagaagcgcactgtgactttgttcaccaagcgttagagcagctgaagcctctgctctctctactgaaggtcgctggccgagagggcaacttgattgccatttttcatgaagagcacagtcgcgtactgcagcagctgcaagtgtttactttttttcccgagagcctgccagcaaccaaaaagcccttcgaacgaaagaccatcgatagacaatccgccaggaaaccattattaggcctgccttcttacatgcttcaaagtgaagagctgagagcctccttgctagcacggtacccaccagaaaagctctttcaggccgagagaaacttcaacgccgctcaagacctcgacgtctcgctgttagaaggagaccttgtcggagtgataaaaaagaaggatcccatggggtcccagaacaggtggctcatcgataacggcgtcactaaagggttcgtctattccagctttctgaaaccctacaatccgcgacgctcacacagcgacgcctccgtgggttcacacagcagcactgagtcagagcacggatcaagttccccaaggtttcccaggcagaattctggatcgactctcacatttaatccttcaagcatggcggtgtcatttacgtctggctcctgccaaaaacagcctcaggatgccagtccacctccgaaagaatgtgatcaaggcacactctcagcttccctgaatccctctaattcggagagcagccccagccgctgtccctccgaccccgacagcacttctcagccgagatcgggagatagtgcagacgtcgccagggatgtcaaacagcccaccgctactcctagatcctataggaactttcgccacccagagatagtaggctatagcgtgcctggccgaaatgggcagagccaggaccttgtcaagggttgcgcaagaactgcacaggccccagaggatcgatcaactgaacctgacggctccgaggcagaagggaatcaggtttatttcgccgtgtatacctttaaggcccgaaaccctaacgaattaagcgtgtctgcaaatcaaaaactgaagattctggaatttaaagatgtaactggcaatacagagtggtggttagcagaagtgaacggtaaaaaaggctacgtacctagcaactacatcagaaaaacagaatatacctag

SEQ ID NO: 28317 - DNA, 1596 bp, synthetic construct
  source 1..1596: mol_type = other DNA; note = Synthetic coding sequence
atgaaatgtcattacgaagctctcggggttaggagggacgcatctgaggaggaactcaaaaaagcataccggaaactcgcccttaagtggcacccagacaaaaatctcgataacgcagcagaggcagcggagcagtttaagctgatacaggcagcctatgacgtgctttccgacccgcaggaacgagcgtggtatgacaaccatcgtgaggccctgctcaagggaggtttcgatggcgagtaccaggatgatagcctagacttgctgaggtacttcacagtgacctgttacagcggatacggcgatgacgaaaagggattttacactgtgtaccgaaacgtgttcgaaatgattgccaaagaggagctggaaagcgtcctggaggaggaagtggacgatttccccacctttggcgactctcagagcgattatgacactgtagtacaccccttctatgcctactggcagtccttttgcacacagaaaaactttgcgtggaaggaggagtacgacaccagacaggccagcaacaggtgggaaaagagggccatggagaaagagaacaagaagatcagggacaaagctagaaaggaaaaaaacgagctggtccgtcagttggtggccttcattcggaaacgtgacaagagagtacaggcccaccgcaagctcgtcgaggagcagaacgccgagaaggctcgcaaggctgaggagatgagacggcagcagaaactaaagcaggccaagctggtggaacaatatagggagcaaagttggatgactatggctaatctggagaaagagctccaagaaatggaggccagatatgaaaaggaattcggtgatggatccgacgagaacgaaatggaggaacatgaactgaaagacgaagaagacggtaaagactccgacgaagctgaggatgcagagctttacgacgacctgtactgcccagcttgcgataagtcttttaagacggagaaggcaatgaaaaatcacgagaaatcgaagaagcatagagagatggtcgctctactcaagcagcagttggaggaggaggaggaaaatttcagcaggccccagatcgatgaaaacccactggatgacaattcggaagaagaaatggaggacgctccaaaacagaagctgtcgaagaaacagaagaagaagaagcaaaaaccagcacagaattatgatgacaactttaatgtgaacgggccaggggagggcgtaaaggtcgaccccgaggacacgaatttaaaccaagattcagccaaagagctggaggattctccccaggaaaatgtaagcgtgacggaaattattaagccatgcgatgacccgaagtccgaagctaagagcgtccctaaaccaaagggtaaaaaaactaaagacatgaagaagccagtgagggtccccgcagagccccagacaatgtccgtgctgatctcctgcacaacgtgtcactctgagttcccaagtcgtaacaagctgttcgaccacttgaaggctactgggcatgcccgtgcaccttctagtagctcgctgaactcagctacatctagccagtccaagaaagagaagaggaagaatagatag

SEQ ID NO: 28318 - DNA, 1353 bp, synthetic construct
  source 1..1353: mol_type = other DNA; note = Synthetic coding sequence
atggtggtacaagctgcagtggccccaaatcggagccagcgattactgcttaaaattccctatgggtctcttcgcaggaggtctgtggaaaggatgactgaaggcagacggtgccaggtccacctgctggatgatcgaaaattagagctacttgtgcagccaaaactgctggcaaaggagctgctagacttggtggcatcccacttcaacctgaaagaaaaagagtactttggaatcgccttcacagacgaaactggacacctcaactggttgcagctcgacagaagggtgctagagcacgactttcctaaaaagagtggcccagtggtcctgtatttttgtgttcgattttacattgaatcgatcagctatctcaaagataacgccacgatagaattgttcttcctcaatgccaaatcttgcatctataaggagctaatcgatgtggacagcgaagttgtgtttgaactggctagctacatacttcaagaagccaagggcgatttctcgagtaacgaagtggtccggagcgatctgaagaaactccctgcccttcctacccaggccttaaaagagcacccatccctggcctattgcgaggaccgtgtgatcgagcactataagaaattgaatggccagactcgcggacaggctatcgtaaattacatgtctattgttgagagtctgccaacttatggtgtccactactatgctgtgaaggacaaacaaggcatcccttggtggctcggactgagctacaagggaattttccaatatgactaccacgataaggtgaagcctcgtaagattttccagtggcggcagcttgagaacctatactttcgggagaagaagtttagcgttgaggtgcacgaccctcggagagcctcagtgacccggaggacgtttggacactcaggaatagctgtccacacatggtatgcatgcccagcgctgatcaagtcgatttgggccatggccattagccaacaccagttctatctggacaggaaacagtccaagagcaaaatacacgctgcaagatctttatctgagattgccatagatttaaccgagaccggaaccctcaaaactagcaagctggctaacatgggatccaagggaaaaattatcagcggatcatccggctcgctcctgagttcagggagacagagaccggctgggggaacacccccagagcacggttgggatcctcgcggagacccagggagatggggggagctccaacttgggcgacttcaaggaaaattactacagagctggctgtgtttccccgatcagggttgggatccaaatgccaatttgcgaaagctactgccgggtatcaagtag

SEQ ID NO: 28319 - DNA, 1020 bp, synthetic construct
  source 1..1020: mol_type = other DNA; note = Synthetic coding sequence
atggagggggaaccacctcccgtggaagagagaagacgcctgcaggaagagcttaatgagtttgtggagagcgggtgtcgtacgctcgaggaagtgacagcatctctaggttgggatctagatagcctggatcccggagaggaggaagctgcggaggacgaagtggtcatatgtccttacgattcaaatcaccacatgcccaaatcctcgcttgccaagcacatggcttcatgtcgtctgagaaaaatgggatacacaaaggaagaagaggatgagatgtacaaccccgagttcttctatgagaacgtaaaaattccctctattacactgaacaaggactctcagttccaaattatcaaacaggcaagaacagccgtgggcaaagatagtgattgctacaaccagagaatatactcgagccttcctgtggaagtacctctgaaccataaacggtttgtgtgtgatttgacacaggcagaccgcctggccctgtacgattttgtagtggaggagactaagaagaaaaggtcagactcacagatcatcgagaacgatagcgatctttttgtcgacctggccgcaaaaatcaaccaggacaacagccgaaagtctccaaaatcctatttagagatcctcgccgaggttcgcgactataaacgcagacggcagagctaccgcgcaaaaaatgtccacatcaccaaaaagtcttacaccgaggtgattagggatgtaatcaatgtgcatatggaggagctaagcaaccactggcaggaagagcaggaaaaagccgaagacgatgcggaaaagaacgaggaaaggcgttccgcatccgtggatagccgtcagagcggtggctcctacctggatgctgagtgcagccgacatcgccgtgacaggagtaggagccctcataagaggaagcgaaacaaggacaaggataagaattgcgaatccagacgacgaaaggagagagatggcgagcgtcatcactcccataagcgccgtaagcaaaagatctag

SEQ ID NO: 28320 - DNA, 6809 bp, synthetic construct
  source 1..6809: mol_type = other DNA; note = Synthetic coding sequence
atggctgagccaagcagcgcacgacgaccggtgccattgattgaatctgagttgtactttttgatcgccaggtacctgagcgcaggcccatgtcgcagagcagcccaagttcttgtccaggagttggagcaataccaactcttgcctaagcggctcgactgggaggggaacgaacacaacagaagctacgaggaactcgtgctatccaacaaacacgtagcaccagaccacctactgcagatctgccagaggatcggaccaatgctggacaaggaaatccctccatcgatttcacgcgtgacctcactactgggggctggtagacagtccctactgcggacagcaaaggactgtcggcatacagtatggaaggggtcggctttcgccgcactgcatcggggaaggccgccagagatgcccgtgaattacggttctcctcccaacctggtggagatccataggggaaagcaattgactggctgttctacctttagcacagcttttcccggaactatgtaccagcatattaaaatgcaccgaaggatcctggggcacctgagcgctgtgtactgtgtcgcttttgacaggaccggacatcggatatttaccggttccgatgactgtctggttaagatctggtccactcacaatgggaggctgctgtccacccttagagggcactcagccgagatttctgatatggcagtcaattacgaaaacacaatgatcgccgcaggtagctgcgacaagattatccgggtgtggtgcctccgcacttgcgcacctgtggccgtgctacaaggtcacactggaagcattacgagtctccagttctcgcccatggccaagggaagccagagatatatggtatctactggagccgatgggactgtgtgcttctggcaatgggacctggagtcactgaaattttcaccccgtccattgaaattcacggagaaaccgagacccggagttcagatgctttgctcttccttttctgttggtgggatgttcctcgctaccggatcgacagatcacgttattagaatgtactttcttggattcgaggctcccgagaaaatcgcagagctcgagtcccacacagacaaagtggattcgatacagttctgtaacaatggcgacaggttcctgagcggctctagagatggaaccgcacggatttggcggtttgagcagttggaatggcgcagtattctgctggacatggccacaaggatctcgggcgatctgagctctgaagaggaaagattcatgaaaccgaaagtcaccatgattgcttggaaccagaacgattcaatcgtggtcacagctgtgaatgaccacgtccttaaagtgtggaacagctacaccggtcagcttctgcataatctaatgggacacgctgacgaagtattcgtgctggagacccatccttttgattcacggatcatgctctccgccggacacgacggctctatttttatttgggacattacaaagggcaccaagatgaaacactactttaacatgattgaaggccagggacacggagcagttttcgactgcaaattctctcaggatgggcagcatttcgcatgtacggacagccacggccaccttttgatttttggctttggctgtagcaaaccttacgagaagattcctgaccagatgttctttcataccgattacaggcccctgatccgcgactcaaacaattacgtgctcgatgaacaaacacaacaggcgccacacctgatgccgcctccttttcttgtcgacgtcgatgggaacccacaccccactaaatatcaaagactcgtgccagggagggaaaactccgcagatgaacacctcattccacagcttggctatgttgctacttctgacggcgaggtgattgagcaaataatctcccttcagacaaatgacaacgatgagaggagtccggaatcgagcatcctggatggtatgatcaggcagttgcagcagcagcaggaccagcgcatgggcgctgaccaggatactatccccagggggctatccaatggagaggaaaccccgaggcgaggctttagaaggctgtcactcgacatccagagtccacccaacatcggcttgcggaggtcagggcaggtggaaggtgttcgccagatgcatcagaatgcccctagatcccagatagctactgaacgggacctgcaggcgtggaagcgtcgcgtggtggtgcctgaggttccgcttgggatttttcgtaagctggaagattttagacttgagaaaggtgaagaggaacgcaatttgtatattatcgggagaaaacgcaaaacgctacagctgtctcacaagagcgattctgtggtcctggttagccagtcccgccaacgtacctgccgccgaaagtatcccaactatggtcgtaggaatcgcagctggagggagctgtcctctggtaacgaaagttcctcctctgttcgtcatgaaacctcttgtgaccagagcgagggcagcggatcgtcagaggaagatgagtggcgctctgacagaaaaagtgaaagctactcagagtcgtcctctgattcatcctcaagatacagtgattggacagccgacgcgggaattaacttgcaacccccactgcgcacgtcttgccgacgaagaattactagattctgttctagctccgaagacgaaatatcgaccgaaaatttatctccgcctaagcgacggaggaagcgaaagaaggagaacaagcctaagaaggagaatttgcgtcgcatgaccccagcagagctggctaacatggagcacctgtatgagttccaccccccagtgtggattaccgacacaacattgagaaagtcccctttcgtgccacaaatgggggatgaagtgatttatttccgtcaaggacacgaggcatatatcgaggccgtgcgacggaataatatctacgaattgaacccaaataaggagccatggcgtaagatggacctccgcgatcaggaactcgtcaaaatagtaggcattcggtacgaggtgggcccaccaacgttgtgctgcttaaagttggcctttatcgacccggctacagggaaactcatggataagagcttctctatcagataccatgatatgcccgatgtgattgacttcctcgtcctgcgccaattttacgacgaggccaggcagaggaattggcagtcttgcgatcgattcagaagcattattgatgacgcctggtggttcggcactgttctgtcgcaggaaccttatcaaccacagtatcctgactctcactttcaatgttatattgtgcggtgggacaatactgagatcgaaaaactgtccccgtgggacatggagccaattccagacaacgtggaccctccagaagagctgggtgcaagcatctcagttactactgacgagctggagaagttgttgtataaacctcaggctggcgaatgggggcagaaatcaagagacgaggagtgtgatcggattatttctggcatcgaccagttattgaatcttgacattgccgcagcatttgctgggcctgtagatctgtgtacttaccctaaatattgtaccgttgtggcgtatccgaccgacctgtacacaataaggatgcggttggtcaacaggttttacaggcgccttagcgccttagtgtgggaagtcagatacatcgagcacaatgccaggacattcaacgagcccgagagcgtgatcgcccgatcagccaagaagattactgaccagctcttaaaattcatcaagaaccagcattgtacaaatataagtgaattatctaatacctctgagaatgatgagcagaacgcggaggatctggacgactcagatctccctaagaccagcagtggtcgccgacgggtgcacgacggcaaaaagagcatcagagcgacaaactacgtggagtctaactggaagaagcagtgtaaggagctggttaatctaatcttccagtgcgaggactcggaacctttcaggcaacccgtggacctggtggaatatcccgattacagagacataatcgacaccccaatggacttcggcacagtgcgggagacgctggacgctggaaattatgactcacccctggagttttgcaaggacatacgacttatattctcaaacgcaaaggcttacacaccaaataagcgctcgaagatatactccatgaccctgcgcctgagtgcgctgttcgaggagaagatgaaaaagatatccagcgactttaagattggccagaagttcaacgaaaagcttagaagaagccagaggttcaagcagcgacagaactgcaaaggtgactcgcaaccgaacaagtcaattcgaaacctcaagccaaagaggctgaagagccagacaaagatcattcccgagttggtgggatctccaacacaatctacaagcagtaggaccgcctacctggggactcacaagacctcagccggaatcagctctggcgtgactagcggcgacagctcagatagtgctgagagtagcgagcgccgtaaacgtaatagacctatcaccaacggatctactctgagtgagagcgaggtggaggactccctggctactagtctgtcttcctcagcttcctcttctagtgaagagtcaaaagagagcagcagggcacgtgagtcttcctccaggtccggtctctcccgcagttccaacctgagagtgactcgcacaagagctgcccagcggaagacaggccctgtgagcttggccaacggctgcggccgtaaggctactcgcaagagggtgtaccttagtgattcagataacaactctctcgaaaccggtgagatactgaaagcgagagccggaaataaccgaaaggtgttgcggaaatgtgcggcagtggccgctaacaagattaagcttatgagcgacgtggaagagaacagcagcagcgaatccgtgtgcagcggccgtaagctgccccaccgcaatgcctccgccgtggccagaaaaaagttgctgcacaacagcgaagacgagcagtctttgaagagcgagatcgaagaagaggaactgaaagatgagaaccagcttttacccgtaagctcatcacatactgctcagtcaaacgttgatgagagcgaaaacagagacagcgaatcagaaagcgacctgagggttgccagaaaaaattggcacgcaaatggttataaatcccataccccggcaccaagcaaaacaaaattcctcaagatcgaatcttctgaggaagacagcaaaagccatgactcagaccatgcatgtaatagaaccgcaggcccaagcacaagtgtgcaaaagctcaaggccgaatccatttctgaggaggctgacagcgagcccggtcgtagtgggggacggaagtataacacctttcataaaaatgcctctttcttcaaaaaaacgaagattctgtccgattcggaggatagcgagtccgaagaacaggatcgagaagacggaaagtgccacaagatggagatgaaccctatttcggggaacctgaactgcgatccgatcgccatgagccagtgctcttctgaccacggttgcgaaacagacctggactccgatgatgataaaatagaaaagcccaacaacttcatgaaggatagtgcaagtcaggacaacggactttcccgaaaaatcagtcggaaacgggtgtgctcctcggactctgattcctcactgcaggtagtgaaaaagagcagcaaggcaaggaccggactcctccggataactcgcagatgcgctgctacggccgcaaacaagattaagttgatgtctgatgtagaggacgtgtcccttgagaacgttcacactagatctaaaaatggcaggaaaaagcccctgcacctggcctgcaccaccgcaaagaagaaattgtctgattgtgagggatccgttcattgcgaggtgcctagcgagcagtacgcctgcgagggtaaaccaccagaccccgactctgaaggcagcactaaggtcctctctcaggcgctgaacggggactcggactcagaggatatgcttaattccgagcacaaacatcgtcacactaatattcacaagatcgatgcacctagcaagcggaaaagctcctccgtgaccagcagcggcgaagactcaaaatctcacatccctgggtccgaaacagatcgcacgtttagctcagaaagcactcttgctcaaaaagcaaccgccgagaataattttgaggtggaactcaactacggcctgcgccgatggaacggtagacggctgcggacctatggaaaagcccctttcagcaagacaaaggtgatccacgattctcaggagacagccgagaaggaagtcaaacgtaaacgaagccacccagagttggagaacgtcaagatctctgagactactgggaactctaagtttcgaccagacacaagctcgaagtccagtgatttaggatcggtgaccgaatcggacatcgattgtaccgataatacaaagactaaaaggaggaagaccaagggcaaggcaaaagtagtccgcaaggggaagacctttaccgcaaacattagtaagactgtccgtcgccaaaggcagtcgaagaggcccaggttgagcgttgatgataacgactgggaggacctcgactatgctaaatctaagcgtgtgctgaggcgtagcaaaattaagaccaggaaccagggcagacgaactgttcggtatcacgatggtgacgacgaccgcagcttggaaaacgtcctggactttaacggctgtactcttta

SEQ ID NO: 28321 - DNA, 492 bp, synthetic construct
  source 1..492: mol_type = other DNA; note = Synthetic coding sequence
atgacagccccatcttgcgcattccctgtgcagtttcgccagccaagcgtgtctggcttatcacagataaccaaatcgctttacatttccaacggggttgccgctaacaacaagctgatgttgtcttccaaccaaatcacaatggtaatcaatgtgagcgtggaggtggtcaacactttatacgaggatattcagtatatgcaggtccccgtcgctgatagccccaacagcaggctgtgtgatttctttgatccgattgctgaccatatccatagcgtggaaatgaagcaaggccgaacgctgctgcactgcgctgcaggagtatctcgctcggccgctctttgcctggcttaccttatgaaatatcacgccatgagccttctagacgcacacacctggactaagagctgtcggcctattatacggccaaacagcgggttttgggagcagctgatccattatgagttccaattgttcggaaagaatacttag

SEQ ID NO: 28322 - DNA, 756 bp, synthetic construct
  source 1..756: mol_type = other DNA; note = Synthetic coding sequence
atgatctcaacaacttcaaaggaaacaaagaaagataccaaattgtactgtatctgcaagaccccctacgacgaatcaaaattctatattgggtgtgacctgtgtaccaattggtaccacggagagtgcgttggaattaccgaaaaggaggcaaagaaaatggatgtgtatatctgtaacgactgcaagagggcacaggagggatcctctgaagagctgtactgcatctgccgtaccccctacgatgagagtcaattttatatagggtgcgatcggtgtcaaaactggtatcatggacggtgtgtgggaatcctgcagtcagaggcagagttgatcgacgaatatgtgtgtccccagtgccagtcaactgaggacgctatgaccgtgctaaccccgttaacagagaaagattatgaaggcctcaagagggttctgcgctcgttacaggcccacaagatggcttggccatttcttgagcccgtcgaccccaacgatgcacccgactattacggtgtgatcaaagaacccatggatttagctaccatggaggagagggtccagcgaagatactatgagaaactgaccgaattcgtcgctgatatgactaagatctttgacaactgcaggtattacaaccccagcgactctcccttttaccagtgcgccgaggttctcgaatccttttttgtccagaagctgaagggttttaaggccagtcgatcccacaacaacaagttgcagagcactgctagttag

SEQ ID NO: 28323 - DNA, 501 bp, synthetic construct
  source 1..501: mol_type = other DNA; note = Synthetic coding sequence
atgtatagcctgaaccaggagatcaaagcctttagccggaataacttacggaaacagtgcacccgtgttactaccctcaccggaaaaaaaattattgagacctggaaggacgctaggatccacgttgtggaggaagttgagccctcctctggcggaggatgcggctacgttcaggacctgtcctctgacctgcaagtgggcgtgatcaagccatggttgctgcttggctctcaggatgctgctcacgatctcgacactttgaaaaagaataaggatggagtagtgctggtgcattgtaatgctggggtgagcagggctgccgcaatcgttattggcttcctgatgaactcagaacagacttcctttacctcagcttttagcttggtgaagaatgcaaggcctagcatttgtcccaactccgggttcatggagcaactgagaacttaccaggagggaaaagagagcaacaagtgtgaccgtattcaggaaaattcgtcatag

SEQ ID NO: 28324 - DNA, 963 bp, synthetic construct
  source 1..963: mol_type = other DNA; note = Synthetic coding sequence
atgagcaaaagtgccagcccaaaggagcctgaacaacttcgaaaactgttcattggcggattatcctttgaaacaaccgacgaatccttgagatctcatttcgagcagtggggaacgctaactgattgtgtggtgatgcgcgaccctaataccaagagaagcaggggcttcggtttcgtgacctacgccacagtggaggaagtagacgctgctatgaataccactccccataaagtggacggacgcgtggtcgaacccaaaagggcagtttcccgtgaggacagccagcggcctggcgctcacctgacagtgaagaaaatctttgtgggaggtattaaggaagacaccgaagaacaccatctccgtgattactttgagcagtatgggaagattgaagtgattgagattatgacagaccgaggatccggaaaaaaaagagggtttgcattcgtcactttcgacgaccacgattccgtggataagatagtgatccagaaataccatacagttaaaggccacaactgcgaggttcgcaaggcccttccaaagcaggagatggcttccgcgagtagcagccagcgcggaaggaggggaagtggtaattttggagggggacggggagacgggtttgggggaaacgacaacttcgggagagggggaaacttctctggtagaggcggtttcggcggttcctgcggaggcggtggatacggcggatccggggacggatacaacggctttggaaatgatggttctaattttggcggagggggaagttacaatgacttcggaaactacaacaatcagtctagcaatttcggacccatgaaggggggtaactttgggggacggtcctccgggccatatgggggtggcggacagtatttcgccaagcctcagaatcaggggggttatggcgtgtcttctagctcttctagctatggctctgggagacgcttttag

SEQ ID NO: 28325 - DNA, 357 bp, synthetic construct
  source 1..357: mol_type = other DNA; note = Synthetic coding sequence
atgagtctgctaaataagccaaagagcgaaatgacacctgaggagctccaaaaaagagaggaggaggagttcaacactggtcccctgagtgtgctgacacagagcgttaagaataacacccaggttctcattaactgccggaataacaagaaactcctcgggagagtgaaggcctttgaccgtcactgtaatatggtcctcgagaatgtcaaagagatgtggaccgaagtgcccaagagcggaaaggggaaaaaaaagagcaaaccggtcaacaaggaccgttacatctccaaaatgttcttgcggggagatagcgtaatcgtggtcctgcgaaacccattgattgcgggaaagtag

SEQ ID NO: 28326 - DNA, 1179 bp, synthetic construct
  source 1..1179: mol_type = other DNA; note = Synthetic coding sequence
atgaaagatacactcgggcaggcccagcaaagggtcgccgagttggagcctctcaaagagcaactccgtggcgcacaggagctggccgcttctagtcaacagaaggctaccctgctgggggaggaattggcgtcagcagcagcggcacgtgatcgcactatcgcagagttgcatcgttctagactcgaggtcgctgaagtcaacgggcgtctggccgagctgggattacatctgaaagaagagaagtgccagtggagcaaggagcgggctgggcttctgcagtcagtggaggcggagaaggacaaaatattgaagctgagtgccgaaattctgcgtctcgagaaggccgtgcaagaggaacggacccaaaaccaggtgtttaaaaccgagctggctagagaaaaggacagttccctggtgcagctctccgaatcaaagcgcgagctgaccgaactaaggtcagcattgagggtcctccagaaggagaaggagcagctgcaagaagaaaagcaagagctgctcgagtatatgaggaaacttgaggctagattggagaaagtggccgacgagaagtggaacgaggatgccacgactgaggatgaagaggcggcagtgggtttatcttgccctgctgcactgacagactcagaagatgagagtccagaggacatgagactgccaccttacggcctctgtgaaaggggcgatcctggatcatcccccgctgggcctcgcgaggcaagccctcttgtggttatctcccagccggcaccaatcagccctcacttgagtggaccagcggaagacagctccagtgatagcgaagcggaagatgagaaatccgtgctgatggccgcagtgcaaagcggaggcgaggaggcaaatctgctgttgccagaattgggaagcgccttctacgacatggcttcgaccatcttttgccgggctcagattgcccttttgcctctgtcgcctgctagcaccccatctccgactaccagcggcttcaccgtgggcaccctgagcgagacgtcaaccggcggtcccgctactcctacttggaaagagtgccccatttgcaaggaacggtttcctgcagagtctgataaggatgccctggaagaccatatggatggccatttcttcttttctactcaggatccatttacctttgagtag

SEQ ID NO: 28327 - DNA, 600 bp, synthetic construct
  source 1..600: mol_type = other DNA; note = Synthetic coding sequence
atgaccccactggctccgtgggacccgaaatatgaggcgaaggcagggcctaggccggtttggggcgcaaattgctcttctggggcaagtttttcaggcagaaccctgtgccaccccagcttttggccactttatgaagctgcttccggccgagggctgagacctgtggctccagcaacaggccactggaatggccagcaggcccctcctgatgctggattccccgttgtgtgttgcgaagatgtgtttctgtcagacccccttcttcctcgcggacagcgggtccccctttacctcagtaaagcccctcagcaaatgatgggctccctcaagttgctccccccaccacccatcatgagtgcccgagttctcccaagacccagcccctcccggggaccttcaacagcatggttatcaggaccagagctgattgcattgactgggctcttgcagatgtcccagggcgagcccagacctagcagctcggcagtgggccctccggatcacacttcagacccaccatccccctgcggctcaccctccagcagccagggcgcagatctgtcactgccccagacacctgacactcattgcccttag

SEQ ID NO: 28328 - DNA, 1155 bp, synthetic construct
  source 1..1155: mol_type = other DNA; note = Synthetic coding sequence
atggagggcctgggcagaagctgcttgtggctacggcgtgaactatcaccacctaggccaaggttgctgcttttagactgccggtcacgggagctctacgagtcagcccgaattggcggtgccctgtctgttgcgctgcccgcacttttactgcggaggctgagacgaggctctctgtcggtgcgggcactgctgcccggacctcctctgcagccaccccctccagcgccagtgcttttatatgaccaagggggaggccgtcgcaggaggggagaagccgaggccgaggctgaagagtgggaagctgaatctgtgttgggcaccttattgcaaaagcttcgggaggaaggttaccttgcttattacctgcagggaggattcagccgctttcaggctgaatgcccgcacctatgtgaaacttcactcgcaggccgtgcgggatctagcatggcacccgtaccgggacctgtaccagtcgttggccttgggagcctgtgcctgggaagcgattgctcagacgctgagtccgaagcagacagggacagtatgtcctgtggattggatagcgagggagcgaccccgcctcccgtaggtctccgcgctagcttcccggttcagatcctccctaatttatacctggggtctgcgagagatagtgctaacctggagagcctggctaaattaggtataagatatatcctcaacgtgacccccaaccttcctaacttctttgagaagaatggggacttccattacaagcagattccaatctccgaccattggtcacaaaatctaagccgcttctttcccgaggctattgagtttattgacgaggcactttctcagaactgtggagttctggtgcattgcctcgccggtgtgagtcgctctgtgaccgttacggtagcctatctgatgcagaagctgcacttgtctttgaatgacgcgtacgatctcgtgaagagaaagaagtctaacatctcacctaacttcaacttcatggggcagctgctggacttcgagaggagtctgcgtcttgaagagagacactctcaggaacagggctctggcggacaggcctcagccgcatccaacccaccttccttcttcacgacacccacctccgacggtgcattcgagctcgccccaacttag

SEQ ID NO: 28329 - DNA, 2208 bp, synthetic construct
  source 1..2208: mol_type = other DNA; note = Synthetic coding sequence
atggctgagcccttgctgaggaaaacattctcccgactcagaggtcgagagaagctacctagaaaaaaatctgacgccaaggagagaggccatccggcacagcgcccagagccttcgcctcccgagccggagcctcaggcacctgagggttctcaagccggtgcggagggcccttcttctccagaggctagtcgaagtcccgcaagaggcgcatatctccagtcccttgaaccctcaagccgacgctgggtgttgggcggagccaagcctgctgaagacacgagcctcggtccgggagtgcccggtaccggtgaacccgctggagagatctggtacaaccctatcccagaggaggacccaagaccgcctgcccctgagccgcctggaccacaacctggttcagccgagtcagagggcctggctccccagggcgctgctcccgcaagtcccccaactaaagccagccgcactaagtcaccaggccctgccagacgactgtctatcaagatgaagaaactccccgaattgcggagaagactgagcctccggggaccgagagccggtcgcgagcgggaaagagccgcaccagccggtagtgtaatttcacggtaccacctggattcctctgtgggtggccctgggcctgctgcaggtccaggaggcacacgttctccacgtgcgggatacttaagcgatggcgatagcccagagagacctgcaggaccaccttctccaacttcttttcgtccttacgaagtcggtccagctgctcgagcaccgccagccgctctatgggggcgtctgtcattacacctgtatggcctggggggattaaggcccgcacctggcgctacgccccgagatctatgttgtctactccaggtcgatggcgaggcccgagcgcgtaccggcccattgagaggagggcctgacttcctccgcctggatcacacgttccatcttgaacttgaagcagcacgattacttagagcactcgtccttgcatgggacccaggagtcaggcggcatcgtccatgtgctcagggcactgtgctactccccaccgtcttcagaggctgtcaggcacagcagttagcggtgcgcttggaaccccaggggctgctctacgcaaaacttactttatctgaacagcaggaggccccagctaccgccgaacctcgcgttttcggcctgcctctcccccttttagttgagagagagaggccacccggacaggttcctctgatcatacagaagtgtgtggggcagattgaacgccgagggttgcgagtcgtagggctgtacagattgtgcggatctgcggctgttaagaaagagctgcgggatgcttttgagagggacagcgctgccgtgtgtctttctgaggatctttaccccgatattaacgtgattaccgggatcttgaaagattatctgagggagttaccaacacccttgatcacacagcctttatataaagtggtcctggaggccatggccagggatccaccaaatcgggttcccccaacaactgaaggaacaaggggcctgctgtcatgtttgcctgacgtcgagcgtgccacactcacgctgctgctggatcatttgagactggtgtctagcttccatgcgtacaacagaatgaccccccaaaacctggcagtctgcttcgggccagtcctccttcccgctcggcaggcccctaccagaccaagagccaggtccagtgggccaggcctggcttcggccgtggatttcaaacatcacatcgaagttctgcactatctgcttcaaagctggcctgatccacgccttccacggcagagcccagacgtggcaccctatctgagacccaaacgacaaccaccccttcacttacctctcgccgatccggaggtcgttacaaggccaagaggcagagggggtccagaatctcctccttcgaatagatacgccggagattggtccgtttgcggccgtgattttcttccctgtggacgagatttcctgagcggccctgactatgatcacgtgacaggaagtgatagcgaggacgaggacgaagaagtgggcgagccaagagtcacaggggattttgaggatgacttcgacgccccattcaatccacacctgaatcttaaagactttgacgcactaatcctggatctcgagcgcgagctgagtaagcagattaacgtttgtctctag

SEQ ID NO: 28330 - DNA, 660 bp, synthetic construct
  source 1..660: mol_type = other DNA; note = Synthetic coding sequence
atgccaaggggcagaaagagccgtcgacgccgaaacgccagagccgctgaggagaaccgtaacaacagaaagatccaggcctccgaggcgtcggagacgccaatggccgctagcgttgtggcttcaactccagaagatgacctttcaggcccagaagaagacccgtcaacgcctgaagaggcaagtacgactcccgaagaggccagttcgacggctcaggctcagaagccatctgtcccccgttctaattttcaagggacaaaaaagtctctgttgatgagcattctggccctgatttttataatgggcaactccgccaaagaggctctcgtttggaaagtcctcggcaaactgggcatgcagcccggacggcagcactctatatttggggatcccaagaaaattgtcactgaagagtttgttcgcagagggtacctcatttacaaacctgtcccaaggtctagtcctgtagaatatgaatttttctgggggcctcgggcacacgtggagagcagcaaactaaaggtgatgcactttgtcgctagagtcagaaatcgttgctccaaagattggccatgcaactacgactgggacagtgatgacgacgcggaagtggaggcaatcctcaattcaggggctagaggctattcagctccctag

SEQ ID NO: 28331 - DNA, 702 bp, synthetic construct
  source 1..702: mol_type = other DNA; note = Synthetic coding sequence
atgaacttgaacttcacctccccccttcaccctgcctcctcacagcgtccaacctctttcttcattgaagatatactgctgcataaacccaaaccacttcgtgaagtcgccccagaccatttcgcttcaagtctggcttccagagtccctctgctggactatggctatcctcttatgcccactcccacattactggcacctcacgcacaccaccctctgcacaagggagaccaccaccacccttactttctgactactagtggaatgcccgtgccggctctcttcccccatccccagcacgccgaacttcctggcaaacattgtcggagaaggaaggcaaggactgtgttctccgacagccagttaagtgggctggaaaagagattcgagatacagcgctacctttctactccggagcgggtggagctggctaccgcactgtccttgagcgaaacccaggtgaagacgtggtttcagaaccgcaggatgaagcataaaaagcagctgcgcaaatcgcaagatgaaccgaaggcccctgacggccctgagtcaccggagggatctccacgtggttcggaggcggctacagccgcagaggccagactgtcgctcccggcaggccctttcgtattaaccgagcccgaggatgaagtggacatcggtgatgaaggcgagctggggtcagggcctcacgtgctgtag

SEQ ID NO: 28332 - DNA, 873 bp, synthetic construct
  source 1..873: mol_type = other DNA; note = Synthetic coding sequence
atggaacttccagctgttggcgagcatgtgtttgcggtggaaagtatcgaaaagaagaggatccgcaaaggcagggtggaatatttggtgaaatggagaggatggtcaccaaagtacaatacctgggagcccgaggagaatatccttgatccaaggctgttaatcgcctttcagaaccgagagaggcaggaacagttaatgggctaccgtaagaggggccctaaaccaaaacctctcgtggtgcaggtgccaacattcgcccgaagaagcaacgttctgaccggcctgcaggatagttcaaccgataaccgagctaagctcgacctgggcgcacaagggaagggccaaggacatcagtacgagctcaacagtaagaaacaccatcatcacgcagtcggactgaacctgagccacgtgagaaagagatgcctgagtgaaacccatggcgagcgggagccttgtaagaaaagactgaccgcacgctccatctcaaccccaacgtgcctgggcggaagtcctgccgcagagcggcctgcggaccttccaccggctgccgcactcccacagccagaagtgatcctgttagattctgacctcgatgaaccgatcgatcttcgctgcgtgaaaacacggtctgaggctggcgaaccaccctcgtccctccaggttaagccagagactccggctagcgctgcagttgcagttgccgctgctgctgctcccactaccaccgccgagaaacccccagcagaagcccaggatgagccagctgagtcgctgtctgaattcaagcctttctttggaaatataataattacggatgtgacggccaactgcttaaccgtgaccttcaaagaatatgtcaccgtctag

SEQ ID NO: 28333 - DNA, 744 bp, synthetic construct
  source 1..744: mol_type = other DNA; note = Synthetic coding sequence
atgactgaggacagccagcggaatttccggtccgtctactacgagaaggtgggttttcggggagtggaggagaaaaaatccctcgagattttactgaaagatgaccgattggacactgagaaactgtgtaccttttctcagcgcttcccccttccttcaatgtaccgggcactggtgtggaaggttctgctcgggattcttccccctcatcatgagtctcacgctaaggtgatgatgtatcggaaggaacagtacttggacgtgcttcatgcactcaaggtggtccggttcgtctccgatgcaacaccacaggccgaagtgtacctcagaatgtatcagttggagtctggtaagctgccaaggtctccaagtttccctcttcccaaggctttcgaacaatacctaaaccttgaagacggaagactgcttactcatttacggatgtgtagcgcagcgcctaagttaccttatgacctgtggttcaagcgttgctttgctggatgcttaccagaatctagtcttcaaagagtctgggacaaggtggtgagtgggtcatgcaagatcctagtctttgtggctgtggagatcctgcttacttttaagatcaaagtgatggccctgaacagtgctgagaagattacgaaatttctggaaaacatcccccaggattcatcggacgcaattgtatccaaagctatcgacctgtggcataagcactgcggcactcctgtccattctagttag

SEQ ID NO: 28334 - DNA, 546 bp, synthetic construct
  source 1..546: mol_type = other DNA; note = Synthetic coding sequence
atggtcagctcctgttgtggctccgtatcttcggagcagagctgtggacttgaaaactgttgcaggcctagttgttgtcagacaacttgctgcaggacgacgtgttgtcgtccttcttgttgcaagccccagtgttgtcagtccgtatgttaccaacccacctgttgccatcctagctgttgtatttctagctgctgccgcccttattgctgcgaaagctcctgttgccgtccctgctgctgccagaccacatgctgtcggaccacttgttgcagaaccacatgctgttgcccgagttgttgtgtctctagttgttgtcgtcctcagtgctgccagtccgtttgttgtcagcccacctgctgccgaccctcttgctgtatctcctcttgctgccaccccagctgttgcgagagcagctgctgtagaccctgctgctgtgtgcggcctgtttgtggcagggttagctgtcacactacctgctaccggccaacatgcgtgatatcaacttgcccacgacctttatgttgtgcttctagctgctgctag

SEQ ID NO: 28335 - DNA, 1086 bp, synthetic construct
  source 1..1086: mol_type = other DNA; note = Synthetic coding sequence
atggccctgaatgtggccccagtgcgcgacaccaagtggttgactctcgaggtttgccgccaattccaaagaggaacatgctctaggagcgatgaggagtgtaagttcgcgcaccctcccaagtcgtgtcaggtggaaaacgggcgagttatcgcctgcttcgattctctgaaggggagatgcagccgagaaaactgtaagtacctgcatcctccaacacaccttaagactcaactagagatcaacggaagaaacaacctaatccaacaaaaaacagccgcagctatgttggcccagcagatgcagttcatgttcccgggtacaccgctgcatcctgtacccacttttccggttgggccagcaatcggcaccaatactgctatcagctttgccccataccttgcacccgtcactcccggtgttggtcttgtccccacggagattcttcctaccacgcctgtcattgtgcctggctcccctcctgttacagttccaggcagtacggctactcagaaactcctcagaaccgataaactggaagtgtgcagggagttccagcgaggaaactgtgcacggggtgagactgactgtcgattcgcccatcctgccgactcaactatgattgacaccagcgataatacagtgacggtctgcatggactacatcaaaggtagatgtatgagagagaaatgcaagtacttccacccccctgcacacttgcaggctaagattaaggcggctcagcaccaggctaaccaggctgccgtcgccgcacaagcagccgctgcagctgctacggtaatggctttcccacccggtgccctccaccccctgcccaaacggcaggcgttggagaaaagtaatggaacaagcgccgtgtttaaccctagcgtgctccactaccagcaggctcttaccagcgcccaactgcagcagcacgccgcatttatcccgaccgacaacagcgagataatctcgaggaatgggatggaatgtcaggagagtgcgcttcggatcaccaaacattgttattgtacatactacccagtaagttcctctatagagcttccccaaacggcatgctag

SEQ ID NO: 28336 - DNA, 1017 bp, synthetic construct
  source 1..1017: mol_type = other DNA; note = Synthetic coding sequence
atgctcaaaaacaaaggacattcttcaaaaaaagacaacctcgcggttaatgccgttgcattgcaggaccatatcttgcacgatctgcagctgaggaatctgagcgtcgcagaccactctaaaacccaggtccagaaaaaagagaacaagtcgttaaagcgtgataccaaggccatcattgacaccggattgaagaagactacccaatgtcccaagctggaagatagtgaaaaagagtacgtgctggaccctaagccacctcccctgactctcgctcaaaaactggggctcattggcccaccccctccgcctctgtcttccgacgaatgggaaaaggtgaagcagagatccttgctacaaggcgatagtgtgcagccttgcccgatttgcaaagaagagtttgagcttaggccgcaggtgttttctattaggggcaagaaccagtatcagacgagagttatccatgatggtgctcggctattccgaattaaatgcgtgaccagaattcaggcttactggcgaggctgcgtcgtgcggaaatggtatcgaaacctgaggaaaacggtacctcccactgatgcgaaactgcgaaagaagttcttcgaaaagaaatttacagaaatatcccatcgaatcctctgctcgtataacacaaacattgaggaactctttgccgaaatagaccagtgtttggcaataaataggagcgtgttacagcaactggaggagaagtgcgggcacgagatcactgaggaagagtgggagaaaatacaggttcaggcgctgcgaagggagactcatgaatgcagtatatgcctagcccctctttcggccgctggcggacagagggttggggctggtcgacggtccagggagatggctctgctgtcatgctcacatgtgttccatcacgcttgtttgctcgctctggaggagttcagcgtaggcgatcgacctccattccatgcctgcccgctgtgtaggagctgctaccagaaaaagattttagaatgttag

SEQ ID NO: 28337 - DNA, 1098 bp, synthetic construct
  source 1..1098: mol_type = other DNA; note = Synthetic coding sequence
atggccgctgcggcagctggtactgcaacaagtcagagattctttcagagcttctctgacgctctcatcgacgaagatccccaggccgctctggaggagctgacaaaagcactggaacagaaaccagatgacgctcagtattactgccagagggcctactgccatatcctgcttggcaactactgcgtggcagtagccgacgcaaagaaaagtctggagctaaatcccaataatagcactgccatgctgcggaaagggatttgtgagtatcacgaaaagaactatgctgcggcactggagacattcacagagggtcagaaacttgacatcgaaaccggctttcatcgtgtggggcaggcgggtctgcagcttcttacatcttcagaccctcccgcacttgactctcagagtgcaggcattacaggcgctgatgccaacttctccgtgtggattaaacggtgtcaggaagcccaaaatggctcagaatccgaagtttggacccatcagagcaaaatcaagtatgattggtatcaaaccgagagtcaggtggtgatcacactgatgataaaaaacgtccagaagaatgacgtgaacgtggaattttccgagaaagagctctcagccctcgtgaaactgccatctggggaagactataatctgaagctagagctgttgcacccaatcataccggagcagtctacctttaaagtgctctctactaaaatcgagattaagttgaagaaaccagaggccgtccggtgggagaaactggaaggtcagggcgacgtgcccacccccaagcaattcgtggccgatgtaaaaaacctttatccgtcttcctcaccttacacacgaaattgggataaactcgtcggtgaaattaaggaagaagagaagaatgaaaaactcgagggtgatgcagccctgaaccgcctgtttcagcagatctattctgacggctcggatgaggtgaagagggcgatgaacaaaagcttcatggagagcgggggaactgtactttccactaattggtcagacgtgggcaagcgcaaggtcgaaattaaccctccagacgacatggaatggaaaaagtactag

SEQ ID NO: 28338 - DNA, 1389 bp, synthetic construct
  source 1..1389: mol_type = other DNA; note = Synthetic coding sequence
atggacaaggactcacagggtctgctggattctagcctgatggcaagcgggactgcatcacgaagcgaggatgaagagagcttggctggacagaaaagagccagctcccaggcccttggcaccattccgaagagaaggtcaagctcccgttttattaaacggaagaagttcgacgacgaacttgtagagagctcccttgcaaagagctccaccagggcaaagggcgcaagtggtgtggagccgggacggtgcagcggatcagagccatcatcttcggagaaaaaaaaggttagtaaggctcctagtactcctgtgcccccatctccggcaccggcacccggattaacgaagagagtgaagaagagcaagcagccactgcaggttacaaaggatttgggaaggtggaagcctgccgatgacctcctgctgatcaacgcggttctgcagaccaacgacctgacctctgtacatctgggagtgaagtttagttgcaggtttactctgagggaggtgcaggaaagatggtacgctctgctgtacgatcccgtgatatcaaaactcgcctgtcaggccatgaggcagctccaccctgaggctatcgcggctatccaaagcaaggccctctttagcaaggccgaagaacaactcctatccaaagtgggctcgacaagccagcccacactggaaaccttccaagacctgcttcaccggcaccctgatgccttttacctagctcggaccgccaaggccctacaggcgcattggcagttgatgaaacagtactatctgctggaagaccaaaccgtgcagcccctgcccaagggcgatcaggttcttaattttagtgatgcggaagatctcatcgacgattcgaaactaaaggacatgagggacgaagtcctggagcacgagttgatggtcgccgatagacgacagaagcgtgaaatcaggcagttagagcaagaattacacaagtggcaggtactggtagattccattacgggcatgtcatcaccagacttcgataatcagactcttgccgtactcagggggcgaatggtacgttatttgatgcgcagcagagagatcacccttggtcgggctacaaaggataaccagatagatgtcgacctgagcctagagggacctgcctggaagatctcccggaagcagggcgtaatcaagttgaaaaacaatggagacttctttattgcaaatgagggtagaaggccaatctacatagatgggagacccgtgctgtgtgggtcaaagtggcgcctgagcaacaattcagttgtggaaatcgcatccctgaggttcgtgtttctcataaaccaagacctgattgcccttatacgagcggaggctgcgaagataactccccagtag

SEQ ID NO: 28339 - DNA, 963 bp, synthetic construct
  source 1..963: mol_type = other DNA; note = Synthetic coding sequence
atgtccgtcggcttcattggggcaggccaactggcgtacgcactggctagggggttcactgccgctggcattcttagcgcccacaaaatcatcgcgtcctctcccgaaatgaatctgccaaccgtttccgctctgcgcaaaatgggggttaacctcacacggtctaacaaggaaacagtgaagcactccgacgtgctctttctcgccgtcaaacctcacattattccattcatcctcgacgagataggtgcagatgtacaggcacgccacatcgtcgtttcttgtgcagcaggggtcacgatatcgtccgtggagaagaaactcatggccttccaaccagctcccaaagtgatcagatgcatgacgaacacccctgtagttgtccaagaaggggcaactgtctacgcgacaggcacgcacgccttggtcgaggatggccaactcctggaacagctgatgtcaagcgtgggcttctgtaccgaagtggaagaggacctcatagacgccgttaccggccttagtggttcaggtccagcatatgccttcatggctcttgacgccctggccgacggtggcgtgaagatgggtctgccgcgacggcttgctatccagctgggtgcccaggctctgctgggggctgcgaagatgctgcttgacagcgaacaacacccctgtcaacttaaagataacgtttgtagtcctgggggtgcgacaatccacgcactgcatttcctggaatccggagggttcaggagcctgctgataaatgcggtggaggcctcatgtatacgtacacgcgaacttcagtcgatggccgaccaggaaaaaatttcaccagccgctctgaaaaaaactcttctggacagggtgaaattggagtctccaaccgtcagcacgcttaccccctcatcaccgggaaaactattgactcggagtctggctctaggtggcaaaaaagactag

SEQ ID NO: 28340 - DNA, 2370 bp, synthetic construct
  source 1..2370: mol_type = other DNA; note = Synthetic coding sequence
atggaagacggcccttcaaataatgcctcatgtttccggagacttaccgagtgtttcctgagcccctccctgaccgacgaaaaggtgaaggcctatctttctctgcaccctcaggtgctggatgagttcgtcagtgagtctgtctctgcagagaccgtagagaaatggctgaaacggaaaaataataagagcgaagatgagagcgccccaaaggaggtatctcgatatcaagacacaaatatgcagggggtggtgtacgaactcaacagctacatcgagcaaagactggacacagggggtgataaccagttgttactctatgaactttcaagcattattaagattgcgactaaagctgacggatttgctctttattttttgggcgagtgcaacaactctctctgcatcttcactcccccagggattaaggaaggcaaaccccgactaataccggcagggccaatcacacagggcaccaccgtgagcgcctatgtcgccaaatcacgtaaaaccctgctcgtggaagatatcttgggtgatgagagatttcctcgcggtactggactggagtcaggaacacgaattcagagcgtgctgtgtttgccaatcgttacggcgatcggtgacttgatcggcatcctcgagctgtatagacactgggggaaagaagcattttgcctgtcacatcaggaggtagctaccgcgaacctcgcatgggccagtgtagctatacatcaggtccaggtgtgtcgtggcctggccaaacaaaccgaactcaacgactttctgctggacgtaagtaaaacctactttgacaacatcgtggcaatagatagcctgttggagcatatcatgatctacgctaagaatcttgttaatgctgatcgctgcgctctttttcaggttgaccataagaacaaggagctctacagtgacctctttgacatcggggaggaaaaggaggggaaacccgtgtttaagaaaacaaaagagatccgcttttctatagagaaaggcatcgccggacaagtggcccgtacgggtgaagttctcaacatccctgacgcttatgcagacccaaggttcaaccgggaagtggacttgtatactggctacactacaaggaacatactgtgtatgccaatagtgagccggggatccgtcataggagtggtgcagatggtgaataaaattagcggatccgcattttctaaaaccgatgaaaacaactttaaaatgttcgctgtattttgcgccctggccctacactgcgctaacatgtatcatcgcatccgtcactccgaatgcatttaccgagtgactatggagaagctgagctaccatagtatttgcacctccgaagagtggcagggattaatgcaatttacattacccgtgagactttgtaaggagattgagctgttccacttcgacattggcccatttgaaaacatgtggcctggtatctttgtgtatatggtgcataggtcctgcggaacctcttgtttcgagctggaaaagctgtgtcggtttatcatgtcagttaaaaaaaattatagacgcgtgccctaccataactggaagcatgccgtgactgtcgcccactgtatgtacgctattctgcagaacaaccatacactcttcacagaccttgagcggaagggacttttgatcgcctgtctgtgtcacgatctggatcaccggggattctccaactcatacctgcagaagttcgaccacccattggcagcgctttatagcacatccactatggagcagcatcacttttcccagaccgtatcgatcctgcagctggagggacacaacatctttagtacattatcaagttcagagtatgagcaagtgctcgagataatcaggaaggccattatcgctactgatcttgccctgtacttcggcaaccgaaaacagttggaagagatgtatcagaccgggtcactgaaccttaacaaccagtcacaccgggacagggttattggactcatgatgaccgcttgtgatctgtgttcagtgaccaagctttggccagtgacaaagctcaccgccaacgacatctatgctgaattctgggcagaaggcgatgagatgaagaagctagggatccagcctattcccatgatggatcgcgataaaaaagacgaggtaccccaaggccaactcggattctataacgccgttgccataccctgttatacaactctcacccagatcctgccaccaactgagccactgcttaaagcttgtcgcgataacctgtcacagtgggaaaaagttataagaggcgaggaaacggcaacatggataagttcaccaagcgtcgctcagaaagcggctgcctccgaggactag

SEQ ID NO: 28341 - DNA, 645 bp, synthetic construct
  source 1..645: mol_type = other DNA; note = Synthetic coding sequence
atggatgattctgagacaggatttaacctgaaagtggttttagtttcctttaaacagtgtctggatgagaaggaagaagtgttactggacccttacattgctagctggaaaggtctcgtccggttcctgaactccttaggcaccatattttccttcatcagtaaggacgttgttagtaaactccgcattatggagcgcctacgaggaggcccacagtcagagcattacaggtccctccaagctatggtggcccatgagcttagtaacaggctagtcgacctcgagcggcgatcacaccacccggaatcaggttgtagaaccgtgctccgtctgcaccgcgcacttcactggctccagctctttctcgagggattgaggacaagtcccgaagacgcccgtacgagcgccttgtgcgcagattcctacaacgcctccttggctgcttaccacccctgggtggtgagaagggctgtgaccgtcgcattctgcaccctcccaacccgggaggtgtttctggaggcaatgaacgtcgggcctcccgagcaagctgtgcagatgctcggcgaggccctgcccttcatacagcgtgtctataacgtctctcagaaattatacgcagagcattctcttctagatttgccctag

SEQ ID NO: 28342 - DNA, 4293 bp, synthetic construct
  source 1..4293: mol_type = other DNA; note = Synthetic coding sequence
atgacctccgccgctgaaatcaaaaagccccctgtcgcccctaaacccaagtttgtggttgctaacaataaacctgctcccccacctatcgcccctaaacccgacatagtgatcagtagtgtcccgcagagcacaaaaaaaatgaaacctgccatcgccccaaagcccaaagtccttaagacgagtcccgtccgtgagattgggcagtctccctccagaaaaattatgttgaacctggaaggtcacaagcaagaactggctgagagcacggataattttaattgcaaatacgaaggaaatcagtctaacgattatatttccccaatgtgttcctgtagctcagaatgcattcataagctaggacatcgggaaaatctttgcgtgaagcagctcgttcttgagcctcttgaaatgaacgagaatttggagaactctaagatcgacgaaacactcactattaagaccaggagtaagtgtgacctctacggcgagaaagctaagaaccagggcggagtcgtcctgaaagcctccgtcctggaggaggaattaaaggatgctctgattcatcagatgcctcccttcatctccgcccaaaagcatcgtcccactgactctccggaaatgaatgggggatgtaactcaaacgggcagtttcggatcgaatttgccgatttgagtccttctccaagctcattcgaaaaggtgccagatcaccatagttgccatctgcagctgccctcagatgaatgcgagcatttcgaaacctgtcaagacgattccgagaaatccaacaactgctttcagtcatccgaattagaggcgctagagaatgggaaacgttctacactgatctcctcggatggggtctctaagaaatccgaggtcaaggatctgggtcctctggaaatacatctggtcccttatacccccaaatttccgactccaaagcccagaaagacacgaaccgctcgcctgttgagacagaagtgcgttgataccccatcagaatccacagaggaaccagggaattctgactctagctccagttgtttgactgagaattctctgaagatcaacaagattagcgtgctgcaccagaacgtactgtgcaaacaagagcaggttgataagatgaaacttggcaacaagtcagagcttaatatggagtccaactcggacgcacaagacctggtgaatagtcagaaggccatgtgtaacgagacaacatcctttgaaaagatggctccatcttttgacaaggattctaacttatcctctgattctactacagtggacggcagcagcatgagcctggctgtggatgagggcaccggctttatccgatgcaccgtaagtatgtccttgccaaagcagctgaaactgacttgcaacgagcatctccaatccggccgtaacctaggcgtttccgctccacagatgcagaaggagtctgtcatcaaggaggagaacagtctgagaatcgtgcctaagaagcctcagcgacattcgttgccagctaccggtgtgttaaagaaagcagcctccgaggaattactggaaaagtcttcatacccgtcgagtgaggagaagagcagcgaaaaatctttggagcggaaccatctacagcacctgtgtgctcaaaacagaggagtcagctcctctttcgatatgccgaagagggcctccgagaagccagtctggaagctgccgcaccccatcctcccctttagcggcaaccccgaatttctaaaatccgtcacagtgtcttctaattcggaaccgtctacagctctgacgaagcctagggctaaaagcctgtccgccatggacgtcgaaaagtgtacaaagccatgcaaagacagtactaagaaaaattctttcaaaaagttactgtcaatgaagctcagcatttgcttcatgaagagtgattttcaaaagttttggtcaaagagtagccagctcggcgataccacaacgggacacctcagcagcggagagcagaagggaatcgaatccgattggcaagggctactggtcggcgaggagaagaggtctaaacccataaaggcttacagcactgagaactattctttagagagccagaagaaacggaaaaaatcgagaggtcagacttccgctgcgaatggactaagagccgagagtctggatgaccagatgctctccagggaatcctccagtcaggctccatataaatctgtgacgtccctttgcgcccctgagtacgagaacattcgccattacgaagagataccagagtacgaaaaccttcctttcatcatggccatccgcaagacccaggagctcgagtggcagaactcctcttctatggaggacgccgatgcaaacgtatacgaggtggaagagccatacgaggctcctgacggtcagctccagctcgggcctaggcaccagcacagtagctcaggtgcttcacaagaggaacagaatgatttgggtttgggcgacctgccatccgacgaggaagaaattataaattcctccgacgaggacgatgtgagctctgaatcttcaaaaggcgaacctgaccctcttgaggataaacaggatgaagacaatggcatgaaatcgaaggttcatcatatcgccaaggaaattatgtcatccgagaaggtgttcgtggacgtactcaaactgttgcacattgacttccgcgatgctgtagcccatgcaagcagacagttaggaaagcccgtaatcgaggaccgcatcttaaaccaaatcttatattatctgccccaactgtatgagcttaatcgtgatctcctgaaagagctggaggagcgaatgctgcattggacagaacagcagagaatcgccgacattttcgtcaaaaaagggccttatctcaagatgtactccacatatattaaggagtttgacaaaaatatcgctctgctggatgagcagtgcaaaaagaaccccggttttgcggcagtggtgcgggagttcgagatgtcccctagatgtgcaaatttggccttgaagcactacttgctgaaacctgtgcaaagaatccctcagtaccgcctgctcctcaccgactatcttaagaatctgatcgaggatgccggtgactatcgagatactcaggatgccttagctgtagttattgaagtggctaaccatgccaacgacactatgaagcagggagataatttccagaagttgatgcagatccagtactctctgaacggacatcacgaaattgttcagcctggtcgtgtgtttctcaaagagggtattctcatgaaactttctcgcaaggtgatgcagcccagaatgtttttcttatttaacgacgccctcctgtatactactccagtccagtccggcatgtataagttgaacaacatgctgtctcttgccggaatgaaggtgcggaaaccgacacaggaggcgtatcagaatgagctgaagatcgaatcagtcgagaggtcgttcatcttaagcgccagttctgctaccgagagagatgagtggttagaagccatctctcgcgctatcgaggagtatgcaaaaaagcgaatcaccttttgtccttcacggtctctggatgaagctgacagtgagaacaaggaagaggtctctcctctgggttctaaggccccaatctggattcccgacacgagggcaaccatgtgcatgatatgtacctctgagtttaccctcacctggaggcgtcatcactgtagagcatgtgggaaaattgtatgccaggcatgcagttctaataagtatggcttggactacctgaaaaatcagccagctcgtgtatgtgagcattgcttccaggagctgcagaaactcgaccatcagcactcacccagaatcggctcccctggaaatcacaaatcacccagttctgccctgagctcagtcctgcactctattccttctggaagaaagcagaaaaagattccggcagctttgaaagaggtcagtgcaaacaccgaagattcctccatgtctggatatttgtacaggtctaaaggaaacaagaaaccctggaagcacttctggtttgtgatcaaaaataaagtgttgtacacctatgcagcatccgaagacgttgctgcactggagagtcaacctttgctcggcttcacagtgattcaggttaaggatgagaactcagagtccaaagtgttccagctgctccacaagaacatgctgttctatgtgttcaaagcagaggatgcccactctgcccagaagtggatcgaggccttccaagaaggtacaatcctgtag

SEQ ID NO: 28343 - DNA, 1641 bp, synthetic construct
  source 1..1641: mol_type = other DNA; note = Synthetic coding sequence
atgggagcctacctatcccagcccaacacagtaaagtgtagtggagacggtgtcggcgcacccagattacctctgccgtatggatttagcgctatgcaaggctggcgcgtcagcatggaggatgctcataattgtatccctgagttagacagcgaaacggccatgtttagtgtttatgacgggcacgggggagaggaggttgcactctactgtgcaaagtatctcccagatatcataaaagatcaaaaagcttacaaggaaggtaagctccagaaagcgctagaggatgccttcctggcaatcgacgctaaactcacaacagaagaggtgatcaaagagctggcacagatcgctggcaggccgacggaggatgaagatgaaaaggagaaggtggctgatgaggacgatgttgataatgaagaggcggcactgctgcatgaggaggcgactatgacaatcgaggagttgctaacccgttacggacagaactgtcataaaggcccacctcatagtaaatctgggggaggtaccggcgaagaacctggcagccagggtctcaatggcgaagcagggccagaggatagcacccgagagacaccgtctcaggagaacggccctactgcaaaagcctacacaggatttagctctaattcggaacgtggcaccgaagcagggcaggtgggggagcctggcatccctactggagaggcgggtccctcatgtagctctgcctctgataaactcccccgagtggccaaatccaagttctttgaagacagtgaggacgaatccgatgaggccgaggaagaggaggaagattcagaagaatgcagcgaagaggaagatggctattcctcggaagaagctgaaaatgaagaggatgaggacgacaccgaagaggcagaggaggacgatgaggaagaggaagaggagatgatggtgcccggtatggaggggaaagaagagccgggttcagattccggaactaccgctgtggtggccctcattcgaggcaagcagctcatcgttgccaacgccggagatagcaggtgcgtcgtctccgaagctgggaaagccctggacatgtcctacgaccacaaaccggaagacgaagtggagttggcccgaataaagaacgctggaggtaaagtgacaatggatgggagggtaaatgggggacttaatcttagccgggctatcggcgaccacttctacaaacgcaacaagaaccttcccccagaagaacagatgatttccgccctacctgacatcaaagtgctgactctaactgatgaccatgagttcatggttattgcttgcgacggtatctggaacgtgatgtcttctcaggaggtggtggattttattcagagcaagattagtcaacgtgacgagaacggagagctcagactactatcaagcattgtggaagaactgctggaccagtgtctggcacctgacacgagtggggacgggactggttgcgacaatatgacatgcattattatctgttttaaacctagaaacaccgcagagctgcagcccgagagcgggaaacgcaagctggaggaagtcctttctacagagggagccgaggaaaacggaaacagcgataaaaaaaaaaaagccaagcgcgattag

SEQ ID NO: 28344 - DNA, 273 bp, synthetic construct
  source 1..273: mol_type = other DNA; note = Synthetic coding sequence
atgtcgaccgccatgaactttggcacaaaaagttttcagcctcgccctcccgataaaggcagcttccccttggaccatctgggcgaatgcaagtcttttaaggagaaatttatgaaatgcttgcacaacaataatttcgagaatgcactgtgtcgtaaagaatccaaagaatatctcgagtgccgaatggaacgaaagttgatgttgcaagaaccgttggagaagctgggattcggcgacctgacatccgggaaatcagaagctaagaagtag

SEQ ID NO: 28345 - DNA, 726 bp, synthetic construct
  source 1..726: mol_type = other DNA; note = Synthetic coding sequence
atgaattctggcagaccggagactatggagaacttgccagctctgtataccatcttccagggcgaagtcgcaatggtgacagactatggcgcatttattaaaatccccggttgtagaaagcagggcctggtgcaccgaacccacatgtcaagttgtcgggttgacaagccgtccgagatcgtggacgttggggataaggtctgggttaaactgatcgggcgagaaatgaaaaatgatcggatcaaggtgtccctgtcaatgaaagtggttaaccaaggcacaggaaaggacctggacccaaataatgtgattattgaacaagaggaaagacgtagaaggagtttccaggattacaccgggcagaaaattactttagaggcagtgctgaataccacctgtaaaaaatgcgggtgtaaaggccacttcgccaaagattgctttatgcaacccggtggcacgaagtattccctgattcctgacgaagaagaggaaaaagaggaagccaaatcagcggagttcgaaaagcccgatcctactcggaaccctagccgtaagagaaaaaaggaaaaaaaaaaaaaaaaacacagagaccgaaagagttcagactctgacagtagtgattccgaatccgacacagggaagagggcgagacatacctccaaggactccaaggcagcgaagaagaagaaaaaaaaaaagaagcacaagaagaagcataaggagtag

SEQ ID NO: 28346 - DNA, 1758 bp, synthetic construct
  source 1..1758: mol_type = other DNA; note = Synthetic coding sequence
atggccgctgcagcagctgccgtgggtcccggtgcagggggtgccggttcagctgtcccagggggtgctggtccctgtgctacagtgtccgtattccctggggcacgactgcttacaataggggatgctaacggagagatacagagacacgctgagcagcaggccctccgactcgaggtgcgggctggcccagattccgccggaatcgctctgtattcccacgaagatgtgtgcgtgttcaaatgcagcgtgagtcgggagactgagtgttctcgggtcgggaagcagagctttatcattaccctgggctgtaactccgttctgatacagttcgctacccctaatgatttctgcagcttctataacattttgaagacctgtcgtggacacaccctggagcgtagtgtgtttagcgagagaacggaggagtcatccgcagtgcagtatttccagttttacggatatctatctcaacagcagaatatgatgcaggattacgttcggactgggacttatcagagagccatactgcaaaatcataccgactttaaagacaagattgtgctggacgtcggatgtggaagcggcatccttagcttttttgcagcccaagccggagctcggaagatctatgctgtggaggcctccactatggcccagcacgccgaagtgttagtaaagtcgaataacctgacagacaggatagtggttattcctggcaaggtggaggaggtgagcctgccagagcaggtggacattattattagcgagcctatgggatatatgctgtttaatgagaggatgctcgagtcttacctgcacgcgaaaaagtatttaaagccctccggcaacatgtttcctactataggggacgtccacctggctcccttcactgatgaacagctgtatatggaacagtttactaaggctaacttctggtaccagcctagtttccacggtgtcgatttgagcgcacttcgtggcgctgcggtggatgaatattttcgccagcccgtggtagatacttttgatatacgaattctcatggccaagagcgtcaaatacaccgtgaactttctcgaggctaaagagggcgatttacatagaatcgagatcccatttaaattccacatgctgcactccggactggtgcacggtctggctttttggtttgatgtggcattcataggcagcataatgacggtgtggctcagcacggctccaactgagcccctgacccactggtaccaagtcagatgccttttccagagtcccctttttgccaaggctggcgatacactctcaggaacatgcctgttgattgcaaataagaggcagtcgtatgatattagcatcgtggcccaggtcgaccagactggttccaaatcctccaatcttctggacctgaagaaccccttcttccgatataccgggacaactccatccccccctcctgggtctcattacacttctccatctgaaaacatgtggaacaccgggtcaacctacaacctgtcatctggaatggcagtcgcaggcatgccaacagcttatgacctatcctcagtcattgctagcggcagctctgttggccacaacaacctgattcccctcggctcaagtggagctcaaggtagcggtggcggatctacgagcgcccattacgcggtgaactcccaattcactatggggggacctgctatcagtatggcctccccaatgtccattccaaccaacacaatgcattatggctcctag

SEQ ID NO: 28347 - DNA, 771 bp, synthetic construct
  source 1..771: mol_type = other DNA; note = Synthetic coding sequence
atggccagcggcagacctgaggagctgtgggaggccgtggtgggtgccgcagaacgattccgagctaggacagggactgaactggtcttactgaccgccgcacccccaccaccccctagaccaggcccttgcgcatacgccgcacatggacgtggggcactggctgaggccgctcgaagatgcctgcacgacattgctctggcccatcgcgcagccactgctgctcggcctcctgccccaccccctgcccctcaacctccctcaccaacgccgtccccaccacggcctacccttgccagagaggacaatgaggaagatgaggacgagcccacggaaactgagacatcaggggaacagctaggcatttccgacaatggagggctctttgtcatggatgaggatgcgacactccaggaccttcccccattctgtgaatccgatcccgagagcaccgatgatggaagcctgtccgaggagaccccagctggccctccaacctgcagcgtcccccctgcatcagctcttcctacacaacagtatgctaaatccctgcctgtgtccgttccagtatggggattcaaagagaaacgaacagaggccagaagctcagatgaagaaaatgggcctccttcaagcccagacttggacaggatagcagcttctatgcgcgctctagtcttgagggaggccgaggatacgcaggtgttcggagacctgccaagacctcgcctgaatacctccgacttccagaaactgaagcgcaagtactag

SEQ ID NO: 28348 - DNA, 4293 bp, synthetic construct
  source 1..4293: mol_type = other DNA; note = Synthetic coding sequence
atgtgtctcgaatccaatctgtccagttgtaaacacctgccctgttgtgggaaacttcactttcaaagctgtcatggaaatgtgcataagctgcatcaattccccagccttcagggatgcacgagtgccggttattttccgtgctctgactttacttcgggcgctcctgggcacctcgaggaacacatcagccaaagtgaactcacacctcatttgtgcaccaactctttgcacctaaatgttgtcccacctgtgtgtttgaaggggtctttgtactgcgaggattgccttaataagcccgcaagaaacagtatcatcgacgctgccaaggtttggccaaatatccccccacccaatacccagcctgcaccgctcgccgtacccttatgcaacggttgtggcaccaaggggacgggcaaagagaccacgctactgttggccacaagcctgggaaaggccgcttcaaagtttggctctcccgaagtcgccgtcgcaggacaagttctcgagaacctgccccctatcggggtgttctgggacatcgaaaattgctctgttccctctgggaggtctgcaactgctgtagtgcaaaggattagggaaaagtttttcaaagggcatcgagaggcagagttcatctgtgtctgtgatatatctaaggaaaataaggaagtcatacaggagctgaacaactgccaagtaacagtggcgcatatcaacgctaccgcaaagaatgcagccgacgacaagcttaggcagagtctcagacggtttgccaatacacacactgccccagctactgtcgtactcgtaagcaccgacgtgaatttcgccctcgagctgtccgatcttagacacaggcacggcttccacatcattctggttcacaagaatcaggcttccgaggctcttcttcaccacgctaacgagctcatacgcttcgaggagttcatcagcgatttgccaccccgtttgcccctgaagatgccgcagtgccacactctgctatatgtgtacaatctcccagctaacaaagacggcaagtccgtttcgaaccgcctccgtagactgagcgataattgcggcggaaaagtgctgtctatcactggatgcagcgccattttaagatttatcaaccaggactctgccgagcgggcacaaaagcggatggagaacgaggatgtgttcgagaaaaaagacaaggaagaaactgtattccaagtgtcatacccttcagccttttctaagctcgtggcaagcagacaggtgtcgcccctactggcatcacagagctggtccagcagagcttcgccacttgctttcaatattgctaactcaagctcggaagccgattgcccagatccatttgctaacggcgcagacgttcaggtctcaaatattgactatagactgtcgcgaaaagagctgcagcagctgctgcaggaagccttcgctcgacatggaaaagtcaagtcagtcgagctaagcccgcacaccgattaccagctgaaggcggtggtgcaaatggaaaatctgcaggacgctatcggcgctgttaactctctgcatcgctataaaattggtagtaagaagatactggtcagcctggccaccggagctgccagcaaaagcctgtcactactccgattcgggcacaaactcaatgtgagcgatctttataaactgacagacacagtagctatacgggaacagggcaacggtaggctggtatgcttgttgccatcaagccaggcaagacagtcccctctgggaagcagtcagtcccacgacgggtcctccacgaattgtagccccattatttttgaggagcttgagtatcacgaacccgtgtgtcgccagcattgttcaaacaaggatttcagttttccagactgttacattgccgagttcggcgatttagaagtggttcaggaaaatcagggcggagtgccactcgaacacttcataacgtgcgtccccggagtgaatatcgccacggctcagaatggtatcaaggtcgtaaaatggattcacaacaagcccccacctccaaatactgatccttggctgctgagatccaaatcaccagttggcaatccccaactgatccagttttccagagaggtgatcgacttactgaagtcgcagccaagttgcgtgatcccgatctcccattttattcccagctatcaccaccacttcgccaaacagtgtcgggtttccgattacgggtacagtaagctcattgagctgcttgaagcggtcccccacgtgttgcagatccttggcatgggcagcaaaagactgttaacactgacgcatagagcccaagtgaaacggttcacgcaggaccttctgaaattgcttaaatctcaggccagtaagcaggttatcgtcagggaattttctcaagcttatcattggtgtttcagcaaggattgggacgtgactgagtacggcgtttgcgaattgatcgacattgtctctgagatcccggatacaacaatatgcctgtctcagcaagataatgagatggtgatctgtataccgaagagagagcggacacaagatgaaattgagcggacaaagcagttctccaaggacgtggtcgatctcctacgccatcagccccactttcgcatgccatttaacaagttcatccccagctatcatcaccactttgggagacagtgcaagcttgcatactatggttttaccaagctgctcgaactgttcgaggctattccggatacacttcaggttctggaatgcggggaggaaaaaatccttactctgacggaagtggagcgctttaaagcgcttgcggctcaatttgttaagctgttgcggtcccagaaggataactgtttgatgatgactgacctcttaacggagtacgcgaaaaccttcggctatacatttcgtcttcaggactatgacgtgagctctatcagcgctctgacacagaagttatgtcacgtcgtgaaagttgccgacattgaatccggcagacagattcagctcataaatcgtaaaagcctcaggagtttgacagcccagctcctagtgctgcttatgtcttgggagggtaccacacatttatcagttgaagagctgaagcggcactacgagtccacccacaatacccccttaaatccctgtgaatatggcttcatgaccctgactgagctgcttaagtccttgccctatttggtggagaccgctgccgcatttgacctacaaatcgaacttaagttcgcgggaggatactctctcctgctggaagagatcttggagtacattccccctccttttctgtctcctctccctagcttcctgcctcccccaccctttttcttttttgtgtttttcgtgatctttatttttttcatatttgtttttgtccaatttgtcgtgtttgtgttctttatagtcgtatttgtgttctttattgtcgtttttgtatttacgaatgataagatggaagagtgcgtgaaactgaccagcttatatctgttcgcgaagaatgttcgatccctgctacacacatatcactaccaacagatcttcctccatgaattctcaatggcctacacaaaatatgtgggagagactcttcagccaaaaacttatgggcacagctccgtggaagaacttctcggagccatcccacaggtcgtggtgcagttccttcagaagaatgggaaggaactgtcttgtgagaattacttgaacctgtacgccaaagcaggtcgattaagctccctctcactcagtcctgccaatcatgagaatcagcccagtgagggggagcgaatcttggaagtccccgagagtcacacagctagcgaactcaaactgggggctgacgggagtggtccgtcgcataccgagcaggaattattacgactgaccgacgactcacctgtggatttgctttgcgcaccagtcccatcgtgcctgcctagtccacagttgcggcctgatccagttattcttcaaagcgcagatttaatccagttcgaagagaggccgcaggaaccttctgagatcatgattctgaaccaggaggaaaaaatggaaattcccatccctggcaagtccaagactcttacgtctgattcttccagttcatgcattagcgctgccgttcctgtgcctccatgcccgtcgagtgaaaccagcgagagcctccttagtaaggaccccgtcgagtcacctgccaagaagcagcctaagaatcgggttaagttggccgcaaacttttctctcgccccaatcactaaactgtag

SEQ ID NO: 28349 - DNA, 2346 bp, synthetic construct
  source 1..2346: mol_type = other DNA; note = Synthetic coding sequence
atgggacagctgcgggactggtttccaaatactcaggatctggctgggaatgaccaagagaacatccgtcacgctgataggaacaactcggacgataaccacctcgcgtctgaagatacttctgctaagcagtcaggcaaacctggcatctatgaagacagggatcccctaagggtgtccatttcgcgtgaacagtccttctttggctcaccgctggcgcacgacccgttttcttgcctgcagttagtcgggcaggagaatgtgtgtggcgacgattatgacgaagcggtcaaactgaaagaatccgttgtcgaaaatcatgctgttctgtcttacgccgtcgaggaggagcacgcctaccttgggcctactgtgaaaccggatgacaaggctaaaactctgagttatgaacctctatcctcggcaaccgtgtctaccggaagtctgttgtcctatgagaacacagatctcagtctaacggatcccgaatcattcagcgagcacatggacgattccaaacaggagagcaccacttcgaaggaggaggagactaatattatcagtagcattgtgccatctacccaagacatctatcagcgtcagaacagcagtgacgtgcataagagccttctccccgctgtagatgagaccacttgcggtcatactcacttccagcagatgatcgacaagtacataaacgaagccaacctcattcctgagaaaaccgatttgcaagagctggaacacattttccctaacttgcaccatcagttatttaagccgctggagcctcaccctgacttcgatctttcaagctcaagctcgggcatatcgcctgacaacagggatttttatcagaggtcagactcaagtagtgagtcccattgtgcaaccgggctctctaagagcacagtctattttaccgcgctccgcaggacaagtatgcattctagtctcaacacctctccaaaccagcagccagacaccaaccttgctcatgtgggggctcatagttttgctacagagaatatcataggagggtctgagcagtgctttgaacagctgcaaccagaatacagcagccaggaggaaagccaacacgcagatctccccagtattttcagtatcgaggctcgcgacagctcacagggcatgaaaaatcaaaactacccgagtgaggaacacactgaaattttgcaaaacaaaaagaaaatcgtgcactttcagctgtcaatcggcaatctttcatccgtctatagcagcagcgacgaagcaaacgtcttcgaccagctgaatgtccagcatagtaccccctgcggaagtaatagttcagagtgctcgacgaaacaccagctggaaagccgtaaggaatctatggggtttgaagagctgtctaagcggggagtggtcactatgttgcagtcccaaggtttgattgaggacaataagaacgagacttgccgggtgctggacatcaatccccaagtggaggagacggacagcagactttgcgtgcggaccgtagaaatgggcacgagcatccaggctccctatagcttgaccacccagaacgagaagtacttcgaaaactccgcagaaacggatatcccaaagatcacaaagaagttgtcccagctcggtgagagcgaactttttgcttccagcggatccttcagtcttcagtctagcattccggtctgggaaactgaaacaggacacggaattatggaagagcctgaactgacactcatctccacaacagacaccagtatcgctgagatggacttcgctaatctgaccttggaagaaaaatccgagaatgaagctaagtgcttctttcaagtttctgagttcctccctcttgtctctgctaccgaggcaagcgactatccagccgtcagcgagttatctatcgagaagccccgaacagcatccacagaaacccccagaaggcttacccccgtccccggatctctgcaggaagccttcattaaaagaaagaagtccttcatggagagaagccaccaacggcagaaggaaatcagaaacaagatacatgttagtgagaattctcaaattaaaacagtgaaagagaaaccctcaattagctccagcgtgtctaggctgaagggagtgaacaaggtgagagcaagttttccggaagataggaagaccactcaagccctacgccaccagcggggactgcggctgtacaaccagctagccgaggtaaaacagcagaaagaagagaaaaccaaacaggaagcctatgcccagaatagagcaagagcaaaggagtttcacaaaaaaacacttgagaagttgagagcaaaaaacacgtgctag

SEQ ID NO: 28350 - DNA, 513 bp, synthetic construct
  source 1..513: mol_type = other DNA; note = Synthetic coding sequence
atgggcaagcggtacttttgcgattactgtgatcgaagtttccaggataatttgcacaaccgcaaaaagcacctgaacggtctgcagcacctcaaggccaagaaggtgtggtacgatatgtttagggatgccgctgcaatcttgctggacgaacagaataagaggccgtgtaggaagtttctactgacgggacagtgcgactttggaagtaattgtaggttctcacacatgtccgagcgcgacctgcaggaactgagcattcaggtagaagaagaacggagggctcgtgagtggctccttgacgcccctgaactgccagagggtcacttagaagattggttggagaaacgggctaagagactgtcttccgccccttctagccgcgctgaacccatcaggactacagttttccagtatccagtggggtggcctcctgtacaagaactgccgccaagcctgcgtgctcctccacctgggggatggccgctgcagccgagagtccagtggggctag

SEQ ID NO: 28351 - DNA, 1542 bp, synthetic construct
  source 1..1542: mol_type = other DNA; note = Synthetic coding sequence
atggcgagcgtgttgtcaagacgcttgggaaagcggtccctcttgggtgccagagtcctcgggccatccgcttctgaagggccatccgcggcaccaccttctgagccgcttctggagggtgctgcaccgcagcccttcacaacatcagacgatacgccatgtcaggaacagcccaaagaagtccttaaggccccatccacatcaggcctccagcaggtggcattccagcccggacaaaaagtttatgtgtggtacggtgggcaggagtgtaccgggctggtcgaacaacactcttggatggagggtcaggtcacagtgtggctcctcgagcaaaagctccaggtctgctgtagggtcgaggaagtttggctcgctgaactgcaagggccatgtcctcaggcgcctcccttggagcccggtgcccaggccctggcttatcgtccagtttcccgaaacatcgatgtgccaaaacgaaagtccgacgccgtggaaatggacgaaatgatggccgcaatggtgctgacttcacttagctgttcacctgtggtgcaatcaccacccggtactgaagctaacttttctgcttctcgtgccgcatgtgacccctggaaggagagtggtgacatctccgactcaggatcttccacgacgtctggccattggagcggatcctcaggtgtgagtaccccctcccctccacatccacaggcatctcctaagtatctgggcgacgcgttcggctctcctcagaccgaccacggattcgagacagaccctgatccctttctgctggatgaaccggctcccagaaagcggaaaaactcagtcaaagtgatgtacaagtgcctgtggcccaactgtggaaaggtgctcaggtcgatcgtgggaattaagcggcacgtaaaggccttgcacctaggagacactgtggattcagaccaatttaagagggaagaggatttttactatactgaggtccagctgaaggaagagtctgccgcagcggctgctgcagcggcagctggaacgcctgtacccggtacgccaaccagcgagccagccccaacccctagcatgaccggcctgccattaagcgctctgccacctccacttcataaggcgcagtcaagcggaccggagcaccctggccctgaatcgtccctgcccagtggcgctctgagtaaaagcgctccagggtccttttggcacatccaggctgaccacgcataccaggccctgccttcctttcagatcccagtttcaccgcatatctacacaagcgtttcatgggcagccgcacctagcgcagcttgctcccttagcccagtgcggtccagatccctatcattctcagagccccagcagccagctcctgctatgaaatcccatctgatcgtgacttctcctccccgagcccaaagcggtgcaagaaaagctaggggtgaggctaaaaaatgccgaaaggtgtatggaattgagcaccgggaccagtggtgcacagcatgtagatggaagaaagcttgccaacggtttttagactag

SEQ ID NO: 28352 - DNA, 555 bp, synthetic construct
  source 1..555: mol_type = other DNA; note = Synthetic coding sequence
atgggcaacggcatgaacaaaatcctcccgggactgtatattggaaatttcaaggatgcccgagacgccgagcagctgtcgaagaacaaggtgacccacattctctctgttcacgacagtgccaggcctatgctggaaggtgtcaaatacctgtgtatacctgcagccgattctccctcacagaatttgaccaggcattttaaagaaagcattaagtttattcatgagtgcaggcttcggggagagagttgcctggtacactgtctggcaggagtgtcaaggtccgtcactctagtgatagcctatatcatgactgtgaccgactttggttgggaggatgctctgcatacagtgcgggcagggagatcatgcgcaaacccaaatgtcggtttccagaggcagctgcaggagttcgaaaagcacgaggttcaccagtacaggcagtggctgaaggaggagtacggggagtcccctcttcaggatgctgaggaggcgaaaaatatacttgctgctccgggtatattgaaattctgggcattcctccggagactgtag

SEQ ID NO: 28353 - DNA, 642 bp, synthetic construct
  source 1..642: mol_type = other DNA; note = Synthetic coding sequence
atgctgcagctcagggactcggtggatagtgctggaacctctccgacagcagtccttgccgctggagaagaagtgggcgctggtgggggtcctggaggaggacgcccaggcgctggcacgcctctgcggcagacactatggcctttatctattcacgatccaacgcgccgagcaagagtgaaagaatacttcgtgtttaggcccggtagcatcgaacaggccgtagaagagattcgcgtggtcgtgcgacctgtggaagacggagagatacagggagtatggttgttgacagagagggaaggcttcggcatccgcattcagtgggacaaacagagccgcccatctttcataaataggtggaatccttggtccaccaatgtaccatacgcgacatttacggagcacccgatggcaggcgcagacgagaaaaccgcgtccttgtgtcaattggagtccttcaaagcgctgctcattcaggctgtcaaaaaggcacaaaaggaatcccccctgcctggccaggcaaatggggttctgatcctggagcgaccactgctgatagagacttacgtgggactgatgagctttatcaataacgaggccaaacttgggtatagcatgacccgtgggaagattggattctag

SEQ ID NO: 28354 - DNA, 888 bp, synthetic construct
  source 1..888: mol_type = other DNA; note = Synthetic coding sequence
atggagctgatccaggatacaagcaggccaccgttggagtatgtaaaaggagttcccctcatcaagtatttcgcggaagccctcggaccgctgcagagcttccaagccaggcctgacgatctgctgatcaacacttaccctaaatctgggactacctgggtttcgcaaatcctggacatgatttatcaagggggtgatctggagaaatgcaaccgcgctcccatatacgtgcgcgtgcctttcctggaggtgaatgacccaggggaacccagtggactggagacattgaaagacacaccccctcctcgactgattaaatctcaccttccccttgcactgttaccccagaccctcttggatcagaaagtcaaggtcgtctatgtcgccagaaatccaaaggatgtggctgtgtcatattaccatttccatcgaatggagaaggcacaccctgagccaggcacctgggatagttttctggagaaatttatggcaggagaggtctcatacggcagctggtaccagcatgtacaagagtggtgggaactgagtagaacgcacccggtgttgtacctgttctacgaggacatgaaagagaatcctaagagggaaattcagaagattctcgagttcgtcggacgtagcctgcctgaggagaccatggactttatggtgcaacatacaagctttaaggagatgaaaaagaacccaatgacaaactacactacagtcccacaggagctcatggatcactcaatttcaccattcatgagaaagggcatggccggagattggaaaaccacatttacagttgcgcaaaacgaacgctttgatgctgattacgctgagaaaatggcaggatgctctctgtccttccgatctgagctgtag

SEQ ID NO: 28355 - DNA, 3867 bp, synthetic construct
  source 1..3867: mol_type = other DNA; note = Synthetic coding sequence
atgcccagaaaaggtacacagccttcaacagccagaaggagggaggaagggccacccccaccctcgcccgacggcgcttcgagcgacgcagagcccgaacccccaagcgggaggactgagtcacctgccacagctgcggaaaccgccagcgaagaactggataataggtcattggaggagatcctcaacagtattccccctccaccccctcccgcaatgacgaatgaggctggtgcccctcgccttatgatcactcatatcgtgaatcaaaacttcaaatcatatgccggagagaaaattctggggccattccacaagagatttagctgtatcatcggaccaaatggatccggcaagagtaacgtcattgattcaatgctgttcgtgttcggatatcgggctcagaagatccggagcaaaaagctgagcgtactgatccacaatagtgacgagcacaaagatattcagagctgcactgtcgaagtccacttccagaaaattattgacaaggagggtgacgattacgaagtgataccgaacagcaatttttacgtgagccgcaccgcgtgcagagacaacaccagtgtgtaccacattagcgggaagaagaaaactttcaaggacgtagggaacctgttgcgtagccatggaatcgatttggatcataaccggttcttgatcctccagggagaggtggaacagatcgcaatgatgaagccaaaagggcaaacagaacacgatgaaggtatgctcgaatatctggaggacataatcggctgtgggagactgaacgagccgattaaagtgctctgccgacgcgttgaaatactgaatgagcacagaggagagaaactgaaccgtgtcaagatggtggaaaaagagaaagatgctctggagggtgaaaaaaacatcgcgattgagtttctgaccctggaaaatgagatcttcaggaaaaaaaaccacgtctgccaatactacatctatgaactccaaaagcgcatcgcggagatggagacgcagaaagaaaagatccacgaggataccaaggagattaacgagaaatccaacattctgagcaatgaaatgaaagcaaagaacaaggatgtcaaagataccgaaaaaaagttaaataaaatcaccaagtttattgaggagaataaagaaaagtttacccagctggatctcgaggatgttcaagtgcgcgagaaactcaaacatgctactagtaaggccaagaaacttgagaagcagttgcagaaggataaggaaaaggtggaggagtttaaaagcatccctgcaaagagtaataacatcatcaatgagacgacgacccgcaacaacgcgctggagaaggaaaaggagaaggaggaaaagaaattaaaagaggtgatggattctctgaagcaggagactcagggcttgcaaaaggagaaagagtcgcgagagaaagagctcatgggtttctctaagtccgttaatgaggctagaagcaagatggatgtagcccagtccgagctggacatctatctatctcggcacaataccgccgtttctcaactgaccaaagcaaaagaagccctgatcgccgctagcgagactttgaaggagcgcaaagcagccattagagacatcgaggggaaactcccccagaccgagcaagaactcaaagaaaaggagaaagaattacaaaaacttacacaagaggaaactaattttaagtctctggtgcacgatctctttcaaaaggtggaagaagcgaagtcaagtctagccatgaacaggagccgaggcaaagttctggacgccatcattcaggaaaagaaaagtggccgaattccgggtatatatgggagactgggagatctgggagccattgacgagaaatacgatgtcgccattagttcctgctgccatgcgctcgactacatcgtggtagattccatagatatagcccaggaatgcgtcaacttcttgaagagacagaacatcggggtagctacgttcataggactagataaaatggctgtttgggcaaagaagatgacagagattcaaacgccagagaacactcccaggctctttgacttggtaaaggtcaaggacgaaaagattcgccaggctttttacttcgcactccgagatactctggtagccgataacttagaccaggccactagggtagcctaccagaaagatagaagatggcgcgtcgtgaccctgcaggggcagattatcgagcagagcggtacaatgaccggtggcggtagcaaggtcatgaaagggagaatggggagttctctggttatcgaaatctctgaagaggaagttaacaaaatggagagtcagctgcaaaatgactccaaaaaagctatgcagatccaggagcagaaagtgcagctcgaggagagagtggtgaaattaagacactcagagcgggaaatgaggaacactctggagaagttcaccgcctcaatccagcgtcttatcgagcaggaggagtatctgaacgtccaggtcaaagagctcgaagcaaatgtactcgctacagcgccagataagaagaagcagaagttactggaagagaacgtgtctgcctttaagactgagtatgatgcagtcgccgagaaggcaggcaaggtggaggccgaggtgaagcggctgcacaatactatcgttgagatcaataaccacaaattaaaagcccagcaggacaaactagataagatcaacaaacagctggacgagtgcgcctcggcgatcacaaaagcacaggtcgcgatcaagactgcggaccgtaatttacagaaagcacaagacagcgtgctgaggaccgagaaggaaatcaaagacaccgaaaaggaagtggatgatcttacagccgaactgaagtctctggaggataaagctgctgaggtggtcaagaacaccaatgctgccgaggagtccctgcctgaaatacaaaaggaacatcgtaacttgttgcaggagttaaaggtgattcaagaaaatgaacacgccctgcaaaaggacgcgctgagtatcaagctaaagctcgaacagattgacggtcacatagctgagcacaacagtaagatcaagtattggcacaaggagattagtaagatctccctgcacccaatcgaggacaatccaatcgaagagattagcgtgttgagccccgaggacttggaggccattaagaatccagattcaattacgaatcagatcgctctcttagaggccagatgccacgaaatgaagccaaatctcggcgcaatcgctgaatacaaaaagaaggaagagctctacctccaacgcgtagccgagctcgacaagataacatatgagagagattctttccgccaagcttacgaggatctgcgaaaacagagactgaatgaattcatggcaggattttatatcatcacaaacaagctgaaagagaattaccagatgctgactctgggaggagatgcagaactcgaacttgtagattccctagaccccttttcggaaggcatcatgttcagtgttagacctccgaaaaaaagctggaagaaaattttcaatttgtcagggggagagaaaactctcagttcactcgcactggtgttcgcactgcatcactacaagcctacccccctctacttcatggacgagatcgatgcagctctggattttaagaacgttagtatcgttgctttttacatttatgaacaaacaaagaacgcccagtttattattatctctctgcgaaacaacatgttcgaaataagcgaccgactgataggtatatataagacatacaatatcaccaaatctgttgccgttaatccaaaagagattgccagcaagggcttgtgttag

SEQ ID NO: 28356 - DNA, 2856 bp, synthetic construct
  source 1..2856: mol_type = other DNA; note = Synthetic coding sequence
atgttaggctctatggcaagaaagaagcctcggaacactagccggctaccgcttgcattgaaccccctcaagtctaaagacgttcttgccgtcctcgcagaaagaaatgaggctattgttccagtgggcgcttgggtcgagcctgcctctcctggctcctcggaaatccctgcctatactagcgcttatctaatcgaggaagaattgaaggagcagctcaggaaaaagcaggaggctttgaaacacttccagaaacaggtgaagtaccgtgtcaatcagcagatcagactcaggaagaaacaacagttgcaaaagagttatgagagggcgcagaaagagggatccatcgcgatgcaatcgagcgcaacgcatctgacatccaagcgtacatccgttttccccaataatttaaatgtggcaatcggaagtagccggttgcctccttccctgatgcctggagacggcattgaggatgaggagaaccagaacgagctgttccaacagcaggcccaagccttgtctgaaaccatgaaacaggctcggcaccgcctggcaagctttaagaccgtaatcaagaaaaaaggcagtgtgttcccagacgatggtcgcaaaagtttcctgactcgcgaggaggtattatcaagaaaacctgccagtaccggcatcaacaccggcatccggggagagttgcccattaaggtccatcaaggactgctggcagccgtaccttaccagaactacatggagaaccaggaactggattatgaggagcctgactatgaggagtcatccagcttggttactgatgaaaaaggtaaggaggacctttttggaaggggtcaacaggaccagcaggccatacattctgaggacaagaataaacctttctcgagagtacagaaggttaaatttaagaatcccctgtttgtgctgatggaggaggaggagcagaaacagctccattttgagggacttcaggatatcctgcccgaggcccaggactattttctcgaagctcagggggacctgctggagactcaaggcgatctgacaggaatccaaagcgtgaagcccgatactcaggccgtggaaatgaaagtccaggtgaccgaacccgagggtcaagccatcgaaccggaagggcagcccataaaaacggaaactcagggcatcatgctgaaagcccagagcattgagcttgaagaaggaagtatagtacttaagacccaggattttctgccgacaaatcaggccttgctgaccaagaaccaggacgtcctcctgaaggaccattgcgtgttgcccaaagaccagtcaatcctcctgaaataccaggatcaagactttctgcccagggatcaacacgtcctgcacaaagaccaggacatcttacctaaataccaggaccagaatttcttgccaaaagatcagaatttcctctcaagggatcagcatgtcctgcccaaggaccaagacatcctgcctaagtatcaagaccaaaacttcttgcctaaagaccaaaatttcttgagccgagatcaacacgtgttacccaaagatcagaacattctgcccaagtatcagggacaagatttcttgcctaaggatcaggactttctgagtagagaccagcacgtactgcctaaggactggaatatactccccaagtgtcaagatcaagacttcctgccgagggaccaaggagtgctgccaaaggaccaaaacatccttcccatatgtcaggaccaggacttcctgcccagagaccaggggtacctgccgaaggatcagaatatcctccccatctgtcaggaccgagatttcctgcctcgggatctgcatgtgctgagcaatgatcagaatattctgccaaagtgccaagaccaggatttcctgccgaagtaccaaaaggtgcatttcaaggaaccctactctgacatgactgacgaaaaggggagggaagacttcagcctggcagattatcagtgcctaccaccgaagtcacaggaccaagacgacattaaaaaccagcagccagccagcttcatgagggaggaacgggtccgcgaggagctgcccctcgactatcaccagtacgtggtccctaagattcaggaccaggacagtccacgagagcagaacaaacatatcaagctgccttcttcctttgaaaaatgggagatcgctcgcggaaacacacctggagtcccactagcttatgatcgatatcagagtggactgtccactgagtttcaggcgcctctcgcttttcagtcggacgttgataaggaggaggacaagaaagagcgccagaagcagtacctaaggcaccgtcggctgtttatggatattgagagagaacaggtgaaagaacagcagcgacagaaagagcagaagaaaaaaatcgagaagatcaagaagaaaagagaacaagaatgttatgcagcggaacagcggatcctcagaatgaattttcacgaggatccctactctggagagaagctcagcgaaatcctggcccagctgcagttgcaagagatcaaagggaccagagaaaagcagcagcgggaaaaagagtacctgcgctacgtcgaagctctccgagcccagatccaagagaagatgcagctttacaatatcacgttacctccgctatgctgctgcggtccagacttttgggatgcacaccctgatacctgtgccaacaattgtatcttttacaagaatcaccgcgcatatactcgcgctttgcacagcttcattaactcctgcgatgtccccggtggtaattcaaccctcagagtcgccatccataatttcgcctcagcccaccggagaaccctgaagaatttgtag

SEQ ID NO: 28357 - DNA, 1248 bp, synthetic construct
  source 1..1248: mol_type = other DNA; note = Synthetic coding sequence
atgagcccagaggttgcactcaataggatctctcccatgttgagcccgttcattagcagtgtggttagaaacggaaaggtgggactggatgccactaactgcctgagaattaccgacctgaaaagtggctgcacatcactgaccccaggcccaaattgcgataggtttaaactgcacatcccatatgctggagagacattgaaatgggacattatcttcaacgcacagtatcccgagctgcccccagacttcatattcggcgaggacgccgagttcctgccagatcccagtgcactgcaaaatcttgcttcgtggaacccttcaaaccctgagtgtctcctcttagtcgtcaaagaactggtgcagcaataccatcaatttcagtgttcgagactacgcgaaagtagtcggctgatgttcgagtatcagacattactcgaggaaccacaatacggcgagaacatggaaatatatgccggtaaaaaaaacaattggacaggcgaattcagcgccagattccttctcaagctgcctgtggattttagtaacatcccaacttatctgctcaaggatgtcaacgaggaccccggagaggatgtcgccctgctcagtgtctccttcgaagacacagaagcgactcaggtgtatcctaaactctacctgtccccccgaatcgagcacgctttaggcggtagctccgcgctgcatattccagccttccccggagggggatgcttaattgattacgttccccaggtttgccacctgttaaccaataaagtccagtacgttatccagggctatcataaaaggcgcgagtacattgcagccttcctgagtcattttgggaccggggtagtcgagtatgacgctgaaggatttactaaactgactctcctacttatgtggaaggacttctgttttctggtccacatcgatttgcccctcttcttcccacgggaccaacctacgctaacgttccaaagcgtctaccactttaccaacagtgggcagttatatagtcaagcccaaaaaaattacccttacagtccccgatgggatggcaacgaaatggccaagcgagcaaaaggctgccagggctcacgcgatgcttgcagcccatgggaacaggtgttggcatttgccgtggccaagactggctgcaagctcctacagcctcaacgcaactggccgtcatcaagaggcccaccatggcgcgcttctgaaggtgagcgaactgcgcagtag

SEQ ID NO: 28358 - DNA, 903 bp, synthetic construct
  source 1..903: mol_type = other DNA; note = Synthetic coding sequence
atgctgagcgcagtggcgagaggctaccagggctggttccatccttgcgctcggttgtctgtccgcatgtcgtcaacgggcattgatagaaaaggtgtgttagccaaccgggtggcggtggtaaccggctccacgtctggcatcggttttgcaatagcacgccgtctcgcaagagatggggctcacgtggtgatttccagtcggaaacagcagaatgtagatagagctatggcgaaactccaaggagaggggctgtctgtggctgggattgtgtgccatgttggaaaggccgaggatagagagcagctggtggccaaagcactggagcattgcggaggcgttgatttcttggtgtgctccgcaggtgtgaatccactggtcggctcaactctaggcaccagtgaacaaatctgggataaaattctcagcgtcaatgtgaagagtccggcactccttttaagtcaattgctcccttatatggaaaatcgccgaggcgcagtcatactggtgtcttctatcgccgcatacaaccctgtagtcgccctgggcgtctacaacgtatctaaaaccgcccttttgggactgacacggaccttggccctcgagctggcccctaaggacattagagtgaattgtgtggtgccaggcatcatcaagactgacttttcgaaggtcgttagaataggattcatgggcatgtctctgagtggcagaacatctagaaatattatttcttgccgcggtttgggctctcagcggaccgttcaggaatcatgtccctcttgcgcccttcagatgcccgcaacctccaccggcagaaccctcagatggcaggcaacccctctgggctctgagcgcagcggcggaggatgcgtggctgtcgtcccaggcccaggcgcatag

SEQ ID NO: 28359 - DNA, 1014 bp, synthetic construct
  source 1..1014: mol_type = other DNA; note = Synthetic coding sequence
atgcggtttgacactctgtgggagaataaactgatgcagagtagggccgtggacggctttcactcagaagagcagcagctgttgcttcaggtgcagcagcagcaccaacctcagcaacaacagcaccatcaccatcatcatcatcaacaggcgcagccccagcagacagtgccccagcaggctcaaacgcaacaggttctgatcccagccagccagcaagccacagccccacaggtaatcgtcccagatagtaaactaatacagcatatgaacgcgagtaatatgtctgcagcggcaaccgccgctacacttgccttacccgcaggagtgacaccggtacagcagatcctgactaacagtggacagctgctgcaagtggtccgggctgcaaacggggctcagtacatcttccagccacagcagagtgttgttctgcaacagcaggttattccccaaatgcagccaggcggagtccaggcccctgttatacagcaggtgcttgcccctctacctggcggtatcagtcctcaaaccggcgtcatcattcagcctcagcaaatcctgttcaccggcaataaaactcaggtaatcccaactaccgtggctgccccaactccagcgcaggcacagattaccgccactggtcagcagcaaccacaggcccagcccgctcagacccaagcgccacttgtgcttcaggtcgacggtacaggggatacctcatccgaggaggatgaggacgaggaggaggattatgacgacgatgaggaagaggacaaagaaaaggacggtgcagaggacgggcaggtcgaagaggaaccgctcaatagcgaagatgacgtatcggatgaggagggacaagaactgtttgacaccgagaacgttgtcgtgtgccagtacgacaagatccaccgctccaagaacaagtggaagtttcacctgaaggacggtatcatgaacctcaacggacgtgactatatcttctctaaggctatcggagacgctgagtggtag

SEQ ID NO: 28360 - DNA, 282 bp, synthetic construct
  source 1..282: mol_type = other DNA; note = Synthetic coding sequence
atggcccaatcaggaggcgaagccagaccgggtcccaaaaccgctgtacaaataagagtcgcaattcaagaagctgaagacgtcgacgagttagaagacgaggaagagggggctgagacacgtggggcaggggatcctgccaggtatttatcccctgggtggggttctgcctccgaggaggaaccatcccgaggacatcgaaaccgctcaagcgtaaacagcaggaccatgctggcttcgttcatcgtgagtagcgccccatcaacagccccttctacctag

SEQ ID NO: 28361 - DNA, 255 bp, synthetic construct
  source 1..255: mol_type = other DNA; note = Synthetic coding sequence
atgaaagtgaagattaaatgttggaacggcgtggctacctggctatgggtggcaaacgatgaaaactgtggcatttgcagaatggcctttaacggctgctgccctgactgcaaggtacccggagacgattgtcccctggtctggggccagtgttctcattgtttccacatgcactgtatactgaaatggctgcacgcccagcaggtgcagcaacactgtcccatgtgcagacaggaatggaagtttaaagaatag

SEQ ID NO: 28362 - DNA, 612 bp, synthetic construct
  source 1..612: mol_type = other DNA; note = Synthetic coding sequence
atggcccacgtctcctcagagactcaagacgtctcccccaaggacgaactcacggcttccgaagcgtccacaagatctcccctgtgcgagcataccttccctggcgattcagacctgcggtctatgatcgaggaacatgccttccaggtgctctcccagggcagcttactcgagtctccatcttatacagtgtgtgtctctgagccagacaaggacgacgactttctttcattaaatttccccaggaaactatggaagattgtagaatccgatcagtttaagtccatcagttgggacgaaaacggaacctgcatcgttataaacgaggaactgtttaagaaggaaatcctcgagacaaaggccccttaccgaatcttccagacagacgccattaaatcttttgtgcggcagctgaatctgtatggttttagtaagatccagcagaattttcagcgatccgcatttctggctacatttctcagcgaggagaaagaaagctcagtgctgtctaaaattaggttcactaaaatgaagctttcccggtcatccacgtacgaaaaccgatatctgtgctgtaatctacatttgaaagacgaaagcaattacagttag

SEQ ID NO: 28363 - DNA, 1794 bp, synthetic construct
  source 1..1794: mol_type = other DNA; note = Synthetic coding sequence
atgccaagcccacaactgcttgttctgttcggaagtcagacaggtaccgctcaagacgtgtcagagagactgggacgggaggcgcgtcggagacgattggggtgccgcgtccaggcattggactcctaccctgttgttaacctcattaacgaaccattggtcattttcgtttgcgccacaaccggccagggggaccccccagacaacatgaagaacttttggaggtttatctttagaaagaatcttccgtctaccgccctgtgtcagatggactttgccgttctgggattaggtgactcctcctatgccaagttcaacttcgtggccaagaagctccaccgtagactgctgcagttggggggaagcgctttgctccccgtttgcctgggcgacgaccagcacgagctgggccctgacgccgcagtggatccttggctgagggacctgtgggatcgcgtccttggtctctatcctcctcctccagggctgacagaaatccctcctggggtgcctctcccgagtaagttcacccttctgtttctccaggaggctccgtccacgggctctgaggggcagcgtgtggctcacccaggcagccaggaacctccctccgagtctaaaccgtttctcgctccgatgatctctaaccagagggtgaccggcccaagtcacttccaggacgtgcgcttaattgaattcgacatcttgggctctggaattagctttgctgctggcgatgtggtgctgattcagccttcaaacagcgctgcccatgtgcagcgtttctgccaagtcctcgggctcgatccagaccagctttttatgctgcagccgagagaaccagacgtcagtagcccaacccggctgccgcagccctgttcaatgagacaccttgtgtcacattatctcgatatagcctctgttcctcggcgatctttttttgagctgctggcctgtctgagcctgcatgaactcgaacgagagaagttactagagttttcgtctgcgcagggacaagaagaactgttcgagtactgtaatcggccacggagaacaatcctggaagtgctctgtgattttccacacactgccgctgccattccacccgactatctgcttgacctgatccccgttatacgccctagagccttttccatcgcgagctcgcttcttacacatccgagccgtctgcagatccttgtcgctgtcgttcagttccaaacccggctgaaagagccaaggagagggctgtgttcatcatggctggcatccctggaccctgggcaaggacctgtccgggtcccgttgtgggttaggcccggatctcttgcctttcccgaaacacccgacacacctgtgatcatggttggtcccggtactggtgtggcccctttccgcgctgcaattcaagaacgggtggcccaaggtcagaccggtaacttcctcttcttcggttgtcgatggcgtgatcaggatttctactgggaggctgagtggcaagagctggaaaaacgtgactgcctgaccctgattccggctttctctcgggagcaggagcagaaagtctacgtccagcatcggcttagagagttaggctctctcgtctgggagctgttggaccggcaaggcgcttacttttacctggctggtaacgccaaaagcatgcccgctgacgtctctgaggcactaatgtcaatcttccaggaagagggtggtctgtgcagccccgacgccgctgcctacctcgcacgactgcagcaaacaaggcggttccagacggaaacttgggcatag

SEQ ID NO: 28364 - DNA, 1860 bp, synthetic construct
  source 1..1860: mol_type = other DNA; note = Synthetic coding sequence
atggacgatcagcaggcactgaacagtattatgcaggatttggccgtgctccacaaagcttcacggccagcactgagcctgcaggaaactcgtaaggcaaaaagttcaagtcctaagaaacaaaacgacgtgagagttaagttcgaacacaggggcgagaaacgcattttgcagttccctaggccagtcaaactggaggacctgcggtctaaagcaaagattgcttttggccagtctatggacctgcattacaccaacaatgaactggttattccccttaccacgcaggacgatttagacaaagccgtggagctcctggatcgatccatccacatgaagagcttgaagattctgctggttataaacggctctacccaggccactaatcttgaacccttgccctctctggaggatctagataacacagtattcggggcagagagaaagaagaggctatccatcatcgggcctactagccgcgatagatcatcgcccccaccaggatatattccagatgagctgcatcaggtggctaggaacggctccttcacaagcattaattcagagggcgaatttattcccgagtctatggaccaaatgctcgacccactgtcattgtctagtccagagaattctggaagcgggagttgcccgagtctggactctcccctggacggcgagagctaccctaaatccaggatgcccagagcccagtcttatccagacaatcaccaagagttttctgactacgataatccgatttttgagaagttcggtaagggaggaacgtatccacgcaggtaccacgtatcataccatcatcaggagtacaacgatggcagaaagacgtttcctagggctcggcgaacccagggcacatctctacgatccccagtctctttttctcctaccgatcattccctgtctacatcctctggatcctcaatcttcacccccgaatacgatgactcccgcataaggcgacgcggatccgacatcgataacccaactctgacagtcatggacatctctccaccctccagaagcccacgcgctccgacgaactggcgactgggaaaactgctgggccagggcgctttcggccgagtctacctctgctatgatgttgacactggaagggagctcgccgtgaaacaagtgcagtttgaccccgactctcctgaaacgagcaaggaggtgaatgctctggagtgcgagatccagctactgaaaaacctccttcacgagagaattgtacagtattacgggtgtttacgggatcctcaggagaagacactctctatctttatggagtatatgccaggagggagcatcaaagatcagctgaaagcctacggcgctctcacagaaaacgtcactcgcaaatacacccgtcagattctcgagggagtacactatctacatagcaatatgatcgttcatcgggacattaagggagcaaatatcctgcgagatagcaccggcaacgtgaagctgggagactttggggcttctaaacgcctccagactatctgtctgtccggtaccggcatgaaatctgtgaccggcaccccatattggatgagcccggaggtaattagcggcgaaggatatggtcggaaggccgatatatggtcggtggcatgtacagtggtggaaatgctcacagagaaacctccatgggccgaattcgaagcaatggcagccatcttcaaaatagctacacagcctacaaacccaaaattgccccctcacgtttccgattacactcgggatttcctcaaaaggatctttgtcgaagccaagctcaggccaagcgcagatgaactgctcaggcacatgtttgtgcattatcattag

SEQ ID NO: 28365 - DNA, 828 bp, synthetic construct
  source 1..828: mol_type = other DNA; note = Synthetic coding sequence
atgtccacaatcggttcttttgagggattccaggctgtgtctcttaagcaagagggggacgatcagcccagcgagacagatcatctgagtatggaagaagaagatcctatgcccaggcagattagcaggcagtctagcgtgaccgagagcacgctgtacccaaatccatatcatcagccatacataagccgtaaatatttcgccacacggcctggtgcaattgaaactgctatggaagacctcaagggtcatgtagcagaaactagcggcgaaacaattcagggcttctggctgttaacaaagatcgaccactggaataacgaaaaggagagaattctgctagtgactgacaagactctgcttatctgtaagtatgatttcatcatgttatcatgtgtgcagctgcagcggatacccctatcagctgtctacagaatctgcctcgggaagttcaccttccctggaatgtccctggacaagagacagggcgagggactgaggatttattggggttctcccgaagagcagtctctgcttagcagatggaatccgtggtctacggaggtgccatatgctacatttacagagcacccgatgaagtataccagtgaaaagtttttagaaatctgcaagttgtctggtttcatgtccaaactggttcccgcaatccaaaacgcacataagaactctactggctccgggagggggaagaagttaatggtgttgaccgagcccatcctaatcgagacctacaccggcctcatgtctttcattggcaaccggaataaactcggatacagcttggcaaggggatccatcgggttttag

SEQ ID NO: 28366 - DNA, 1629 bp, synthetic construct
  source 1..1629: mol_type = other DNA; note = Synthetic coding sequence
atggctgcagctgcaggcgcagcggctgccccaggttctcgcgagccccaggacagacctgagtgcggtgcagggcatccaggacccagatattacagacatcctgagaggtggctgttacggcctgaggccttcctagggcctctgcggacgagggcgccatcagccgaagacagccaacgcgagagacccgcagccagatcaggtcctgcaatgtctcgaagagtcgtgcgccaatcaaagtttcgacacgtttttggacaggccgctaaggccgaccaggcatatgaggacattcgcgtgagtaaggtaacttgggactccagcttttgtgccgttaatcctaaatttcttgcaattatcgtagaagctggaggaggtggcgcatttatagttctccctcttgctaagactggcagagtggacaaaaactaccccctggttactggccacaccgccccagtgctggacatagactggtgtcctcacaatgacaacgtgatagcctctgcctcggacgataccaccatcatggtatggcagatccctgattacacccccatgaggaatattacggaacccattattacgctggaaggccactctaaaagagtgggcattctgtcttggcacccaacagctcggaacgtcctgctatccgcaggcggtgacaacgtaatcatcatttggaatgtgggcactggagaggtgcttctgtctctggatgacatgcaccccgatgtgatccacagcgtgtgctggaactcaaacggttctctgctagccacaacttgtaaggataagacattacgaatcatcgatccccgaaagggacaggtcgtggctgagagatttgcggcacacgagggcatgagaccaatgagagctgtcttcactcggcaaggacacatcttcactaccggattcacacggatgtcacagcgagagctcggactctgggatccaaacaatttcgaagagccagtcgcacttcaggaaatggacacttccaatggggtgctgctgcctttttatgacccagattcctccattgtgtacctatgtggcaaaggggattctagcattagatatttcgaaatcactgacgagccaccttttgttcactatctcaatacttttagttctaaagaacctcaaagggggatgggtttcatgcctaaaagaggtctggacgtctctaagtgcgaaattgcaagattctataagctccacgaaagaaaatgtgagccaatcattatgacagtgccaaggaagagcgatctgtttcaggatgatctgtaccccgataccccaggccctgaaccggctctggaggctgacgaatggctgagcggtcaggatgcagaacctgtgctaatttcccttcgggatggatatgttccaccaaagcaccgagagctgcgggtcacaaaaagaaacatacttgatgtacgaccgccaagtggacctcgccgaagtcagagcgctagcgacgccccactgagccagcacactctggaaaccctattggaggaaatcaaggccctgagagagagagttcaggctcaggagcagagaattacagccctcgagaacatgctttgtgagctggtggatggaactgattag

SEQ ID NO: 28367 - DNA, 2550 bp, synthetic construct
  source 1..2550: mol_type = other DNA; note = Synthetic coding sequence
atgtctgatactaggagaagagtaaaggtgtatacattaaatgaagacaggcagtgggatgataggggcaccggacacgtgtccagcacatacgtggaggagctgaagggaatgtctctgttggtgagggccgaatccgacggatccctgctgcttgagtcgaaaatcaacccaaataccgcatatcagaaacagcaggatacccttattgtgtggagcgaggccgagaattacgacctggcactgagctttcaggaaaaggccggttgtgatgagatatgggagaaaatctgtcaggtacagggcaaagatccctcagtcgaggtcactcaggatctgatcgatgaaagcgaggaggaaaggttcgaggaaatgcctgagacttcccatctgatcgacctacccacatgcgaacttaacaagcttgaagaaattgcagatctcgtaacaagtgtgctcagtagccccatacggcgagagaaactcgcgcttgccctggagaacgagggatacatcaagaaactgctgcagctgtttcaggcctgcgaaaacttggaaaatacagaaggtctccaccatttatatgagataatccgcggaatcctgttcctcaacaaggcaaccctcttcgaggtgatgttctccgacgagtgtatcatggatgtggtggggtgcctggaatacgacccagcactggcgcagcccaaacgacatagagagttcctgaccaaaactgctaagtttaaagaagtcattccgataacggacagcgaattgcgacagaagattcatcaaacgtacagagtgcagtacattcaggacatcattctgcccactccttccgtgtttgaagaaaattttctgagtactcttacatcttttattttttttaacaaagtagagatcgtttctatgctccaagaggacgagaagtttctgtccgaagtgtttgctcagctgacagacgaggctacggacgatgacaagagaagagagttagtcaattttttcaaagagttttgcgcgttttcgcaaacactgcaaccccagaatcgagatgcgttcttcaaaactctcgcaaagctggggatattgccagccctcgaaattgttatggggatggacgacctacaagtgcgcagcgccgctacagacattttttcgtatttggtagaattcagcccaagcatggtccgtgagtttgtaatgcaagaagcccaacagagtgatgacgacatactgctaatcaatgtggtgatcgaacagatgatatgcgacacagatcctgagctggggggagcagtacagctgatgggtctcctccggaccctgatcgaccccgagaatatgctggctacgaccaataagaccgagaaatccgagtttctcaatttcttctacaatcattgcatgcacgtgctcaccgcacctctgctcacgaatactagcgaagataaatgcgagaaggatttttttctcaagcactaccggtacagctggtcctttatttgcacgccatctcattctcactctcattctacaccctcttcctccatcagccaggacaacattgtggggtccaacaaaaataataccatctgtcccgacaattaccagacagctcaactcctggccctgatcctggaactactgacgttctgtgtggaacatcatacataccatattaagaactatataatgaataaggatctcctgcgccgagtgctggtgctgatgaattcaaagcatacttttctggcgttgtgtgcactaaggtttatgcgcaggatcattgggcttaaggatgagttctacaatagatatatcacgaaaggcaatctgtttgaacccgtcatcaatgcacttctcgataatggtacccgctataacttgctgaacagtgccgttattgaactctttgaattcattagggttgaggacattaaatccctaaccgcgcacatcgtcgagaatttttacaaggctttagaatccattgagtatgttcagacgttcaaagggctcaagaccaagtacgaacaggaaaaagaccgacagaaccaaaaactaaatagcgtcccgtcgatccttagaagcaatcggtttaggcgcgacgccaaggcactggaagaggacgaggagatgtggttcaatgaggacgaggaagaagaaggtaaagccgtggtcgcccctgtggaaaagcccaaacctgaggatgactttccagataattatgaaaaatttatggaaacaaagaaggctaaggagtctgaggataaagagaacctgcccaaaagaacatccccaggcggtttcaagttcacattcagtcactccgcttccgcagcgaacggcactaactctaaatccgtcgtggcacagatccctccggctacgtctaacggatcatcaagcaagacaacaaacctgcctacgagtgtgactgcgaccaaaggcagtctggtcggactggttgactacccagacgatgaagaggaagatgaggaggaggagagttcgcccagaaaacgccctcgactcgggtcttag

SEQ ID NO: 28368 - DNA, 669 bp, synthetic construct
  source 1..669: mol_type = other DNA; note = Synthetic coding sequence
atgggtgacattcctgccgtgggtctctctagttggaaggcatctccaggcaaagtcactgaagccgttaaggaggctatcgacgcgggttatagacactttgattgtgcgtatttttatcataatgagagggaggtgggcgctggaatcaggtgcaagatcaaagaaggcgcagtgcggagggaagaccttttcatcgccactaaactgtggtgtacctgccacaaaaagagtctggtggaaaccgcatgtaggaagtccctgaaagccctcaaactcaattatctagacctctacctcatccactggccaatggggtttaaaccacctcatccggagtggattatgtcctgcagcgaactctctttctgtctgtcacaccctcgagttcaggacctgcccttggatgaatccaatatggtaattccatccgacactgatttcctggacacttgggagatcctgatcaggtttcagatccaacgcaacgttatagtgattcctgggtcaattaccccctcccatatcaaggagaacatccaggttttcgacttcgagctaacacagcatgatatggacaacatactgtcccttaaccgaaatctaaggctcgctatgtttcccataaccaagaaccataaggactaccctttccacatagaatactag

SEQ ID NO: 28369 - DNA, 1080 bp, synthetic construct
  source 1..1080: mol_type = other DNA; note = Synthetic coding sequence
atgcctaatccaagctcaacctcaagcccatatcctctgcccgaggaaattcgcaacctgttggctgatgtcgaaactttcgtcgcagacatcttgaaaggggagaatctgtcaaagaaggctaaggaaaaacgagagagcttaattaagaagatcaaggatgtgaagagcatctacttgcaggaattccaggacaaaggggacgctgaagatggggaagagtacgatgatccattcgcaggtccacccgacacaatatccctagccagcgaacggtacgacaaagacgatgaggccccatccgacggggcacagttcccgcctattgccgcacaagatttgccctttgtcctcaaggccggttacttggaaaaacggagaaaagaccattcattcttggggttcgaatggcagaagcggtggtgcgccctcagcaagacagtgttttactattatgggtccgacaaagacaagcagcagaaaggggagtttgccatcgacggatattctgtgaggatgaataacaccctccgcaaagatggtaagaaggactgttgctttgaaatctctgccccagacaagagaatataccagtttaccgcagcctctcccaaggacgccgaggagtgggtgcagcagctgaagttcgtgcttcaagatatggagagcgatataataccggaagattatgacgaacgaggcgaattgtacgacgatgtcgaccatcccctccccatttctaatccactgacctccagtcagccaattgacgatgagatatacgaggagcttcctgaggaagaggaggactcagcccctgtgaaggttgaagaacagcggaaaatgagtcaggatagcgtgcatcacacctccggcgacaaaagtacagattacgccaacttttatcaaggcctgtgggattgcacaggggctttcagcgacgagttgtctttcaagaggggagatgtgatatatattctgtctaaagaatataaccgctacggttggtgggtcggtgagatgaagggagctataggactcgtccccaaggcatacataatggaaatgtatgacatttag

SEQ ID NO: 28370 - DNA, 1227 bp, synthetic construct
  source 1..1227: mol_type = other DNA; note = Synthetic coding sequence
atgaagtgtgagcactgcacacgaaaagaatgtagcaaaaagaccaagaccgatgatcaggagaacgttagcgccgatgcaccctcaccagctcaggaaaatggagagaaatgcgacaccagcaaacacaaggtgctcgtggtgagcgtgtgcccacaaagtcttccctacttcgccgcaaaattcaacctttcagtaacagacgcgtccagaaggctgtgcggtttcctgaagagcttgggggtgcactatgtgtttgacaccacaatcgccgcagacttctcgattctagagagccaaaaagaattcgtcaggaggtaccggcagcacagcgaggaggaacgcacattacctatgctcacctctgcgtgtccaggctgggtgagatacgccgaaagggtactgggtcggcctataactgcccacctatgtacagccaagagcccgcagcaagtgatgggctcactcgtgaaggactatttcgctcggcagcaaaacctcagtcccgagaagatttttcatgtgattgtcgcgccttgctacgataagaagctcgaagccctgcaagaatcactgccaccggctttgcatgggtcccgaggcgctgactgtgttctaacatctggcgagatcgcacagattatggagcagggcgatctgtctgtccgggacgctgcggtggataccctgtttggggacctgaaagaagataaggtgacccgtcatgatggtgcttcaagcgacggacacctggcccatatctttcggcatgccgcaaaggaacttttcaatgaggatgtggaggaagtcacctacagggcattgcgcaacaaagattttcaagaggtgacactcgagaagaacggcgaggtcgtcctgcggtttgcggctgcctacgggttccggaatatccagaatatgatccttaaattgaagaaaggcaagttcccattccattttgtggaggtgttggcgtgcgcaggcggatgtctgaatggcagaggccaggcccagactcccgatggccacgctgacaaagccctcctgaggcagatggagggtatttatgccgatattccagtgcgccgacccgaatcctccgctcatgtccaagagctctatcaggagtggttggagggcattaattcacccaaggctagagaggtgctccatacaacatatcagagccaggagaggggtacccactccctggatattaagtggtag

SEQ ID NO: 28371 - DNA, 1104 bp, synthetic construct
  source 1..1104: mol_type = other DNA; note = Synthetic coding sequence
atggccctcaatgttgccccagtcagggataccaaatggctgaccctcgaagtgtgcagacaattccagcggggtacgtgtagtcgcagcgacgaggaatgcaagttcgcccatccccctaagtcttgccaggtcgaaaatggccgtgtgattgcgtgctttgatagtctgaaggggaggtgtagtcgggagaattgtaaatacctgcatccacctacacaccttaaaacacaactggagatcaacggcaggaataacctgattcaacagaaaacagctgctgccatgttagctcagcagatgcaattcatgtttcctgggacacctctacaccccgttcccacgtttcctgttggcccagccattgggactaataccgcaatcagctttgccccttacctggcgccagttacccctggagtggggctagtgcctaccgaaatattacctacgactcctgttatcgtacctggctctccacccgtcacagtgcccggtagcactgctacccaaaagctgctccggaccgataaattagaagtgtgcagggaatttcagcgcggaaactgcgcccgaggcgagactgactgtagattcgctcacccagcagatagcactatgatcgatacctccgacaacacggtgaccgtatgtatggattacatcaagggccgttgtatgagagagaagtgcaaatacttccaccctccagcacatttacaggcaaaaatcaaagccgctcagcatcaggcgaaccaggcagcagtggccgcacaagccgctgctgctgctgctactgtgatggcatttccacccggagccttgcatcctctgcctaagcggcaagcgctcgaaaagtccaacgggacgagcgctgtcttcaacccaagtgtgctgcactaccaacaggccctgacctcagcacagttacagcagcacgccgctttcatccccactggctccgtgctgtgtatgacccccgctaccagcatcgtgcccatgatgcactcagcaacctctgcgactgttagcgctgctaccacccctgcaacgtcggtaccatttgctgccactgccactgccaaccagatcatcctgaaatag

SEQ ID NO: 28372 - DNA, 3909 bp, synthetic construct
  source 1..3909: mol_type = other DNA; note = Synthetic coding sequence
atggcccttaggcctggcgctgggagcggaggcggtggtgctgccggtgcaggtgctgggagtgctggaggtggaggattcatgtttccggtcgctggtgggatccggccacctcaggcaggcctgatgccaatgcaacaacaggggttccccatggtgtctgtgatgcagcccaatatgcaggggatcatgggtatgaattacagttctcaaatgtcccagggcccaatcgctatgcaggccggtatccccatgggacctatgcccgcagccggaatgccgtatctcggacaggcaccttttctgggcatgcgaccccctggtccacaatatacacccgatatgcagaaacaattcgcagaggagcagcagaaaagatttgagcagcaacagaaattgctcgaggaggagcggaagaggcgacagttcgaggagcagaaacaaaaacttcgcctgctttcctctgtaaagcccaagaccggtgaaaaatctagagatgatgcgttggaggccattaagggaaacctcgatgggttttcaagagatgcgaagatgcaccctacacctgccagtcaccccaaaaaaccaggccctagccttgaggaaaagttcctggtgagctgcgacatttccacaagcggtcaggaacagattaagttgaataccagcgaggtgggccataaggctcttgggcctgggtcctccaagaaatatccatctttgatggcatctaatggcgtggccgtggacggttgcgtgagtggaaccacaacagcagaagccgaaaacacgtcagatcaaaacctgagcattgaggagagcggggtcggagtgttccctagtcaagaccccgctcaaccgagaatgccaccgtggatttacaatgagtctctggtgcccgatgcatacaagaagattttagaaaccacgatgacccctaccggaatcgacacagctaagctataccctattcttatgtcgtcgggcttacccagggagaccctaggccagatttgggccctcgccaatcggaccacccctggtaaactgaccaaggaagaactgtacactgtcctcgctatgattgctgtcacccagcgaggtgtgcccgcaatgtcccctgatgctctaaaccagtttcccgctgctcctattccaactctcagcggcttcagcatgaccctgccaacacccgtttcccagcccactgtgataccttccgggccagctgggagcatgcctctgtcccttggccaaccagtaatgggcatcaacctggttgggcctgtcgggggtgccgctgcccaggcgtcttctgggtttatccccacatacccagccaatcaggtcgtcaagccagaggaggatgactttcaggattttcaggatgcgtctaaatccggttccctagatgatagcttttcggacttccaggaactgcccgcatcttccaagacctcgaattcccagcacggcaatagcgccccttcactgctgatgccgctcccaggcacaaaagcattaccaagcatggacaagtatgcagtgtttaagggaattgcagccgacaagtcaagtgaaaatacggtccctccaggtgaccctggtgataaatacagtgccttcagagaactggagcaaaccgcagaaaataaacctttgggcgagtccttcgcagaatttagaagcgccggaactgacgacggattcaccgattttaaaaccgctgacagcgtaagcccactcgagccaccaaccaaggataagaccttccccccaagttttccttctggtaccatccagcagaagcagcagactcaggtcaagaacccgctcaatctggcagatctcgatatgttttctagcgtgaattgctcatctgagaagcccctatctttctccgccgttttttcaacttctaagagcgtgtccaccccccagagcacagggtcagccgctacaatgacagctctcgccgctactaaaacctcttctcttgcggatgatttcggggaattctccctgtttggcgagtattctgggctcgcgcctgtgggcgaacaagatgacttcgcagactttatggccttctccaatagctccatttcctctgaacagaaacccgacgataagtatgatgccctcaaggaggaggcctccccggttcccttgacaagcaatgtcggctcaactgttaaaggtggtcagaattcgaccgcggcaagcactaagtacgatgtatttaggcagctgagtttagaggggagtggcctgggcgtggaggatctgaaggacaacacgccatcggggaaaagcgatgacgatttcgcagatttccattcttctaagttctccagtataaacagtgataaatctctaggtgaaaaagctgtcgcttttcgccacacaaaagaagattccgccagtgtgaagtcgttggatcttccatccatcgggggaagctctgttggaaaggaagactcagaagacgccttatctgtccagtttgacatgaaactagctgacgtcgggggagacctcaagcatgtgatgtctgattcatctctcgaccttccaacagtttccggtcaacatcccccagcagcggatatcgaagacctcaagtatgctgcctttggtagttactccagtaactttgccgtcagcaccctgacctcttatgactggagcgatcgtgacgatgcaacacagggcagaaaactgagcccatttgtcctttcagcaggttcaggcagtcccagcgccacctccattttgcagaagaaggagacaagcttcggtagtagtgaaaatattacgatgacctcactatcaaaggtgaccacattcgtgtccgaggatgccctgccagaaaccacctttccagcactggcctcttttaaggataccattccccaaacatccgagcagaaggagtacgaaaaccgagattacaaagacttcaccaaacaggacctgccaaccgcagaacgctctcaagaagcaacctgtcccagtcctgccagctccggtgctagtcaggaaactccaaacgaatgttccgacgacttcggtgagtttcagagtgagaagcctaagatttccaagtttgacttcctcgtagccacttcgcagagcaaaatgaagagtagtgaggagatgattaagtcagagctcgctacattcgacctatccgtccaaggcagccacaaacgcagcttgagcctcggcgacaaggagatctccaggtcttcgcctagccccgcactggaacagccctttcgcgatcggtcaaacaccctgaatgaaaagcctgcgttgcctgtgattagggataaatacaaagacctgacgggcgaggtagaggagaacgaaaggtacgcctacgagtggcaaagatgcttgggaagtgccttaaacgtgattaagaaagcaaatgacactttgaacggcatcagcagtagctcagtctgcaccgaagtcatccaatccgcgcaggggatggagtatctgctgggagttgtcgaggtttatcgggtcactaagagagtcgaactgggcatcaaagcaaccgcggtctgctccgagaagctacagcagctgttgaaggatatcgacaaagtatggaacaatctcatcggcttcatgagtctggccacattaacgcctgatgaaaatagtctggatttcagtagttgcatgttgcggccagggatcaaaaacgcccaggagcttgcctgtggtgtgtgcctcctgaatgtggacagtcgttctcgtgccttcaattcagaaacagatagcttcaagctggcgtatgggggtcaccaatatcacgcctcttgcgcaaatttttggataaactgtgtggagcccaagccacccggactggttttacctgacctgctctag

SEQ ID NO: 28373 - DNA, 1011 bp, synthetic construct
  source 1..1011: mol_type = other DNA; note = Synthetic coding sequence
atggagtccgtcctttccaaatatgaggaccagattacaattttcacagactatcttgaggaatatccagacacagatgagctggtctggatccttgggaagcagcaccttctgaagactgagaaaagtaagctcttgtcagacatatctgcgagactgtggttcacttaccggaggaaattctctcccatagggggtacggggccttctagcgatgccggatggggctgtatgcttcggtgcggtcagatgatgctggcacaggctctgatctgccgccatctcggacgagattggagttgggagaaacagaaagaacaaccaaaggaatatcagcggattctgcaatgctttcttgatcggaaggactgctgttattcgattcaccagatggctcagatgggcgtaggcgaagggaagtctataggtgaatggtttggaccaaatacggtggctcaggtcctgaaaaagttggccttgttcgacgaatggaattcgctcgctgtctatgtgagcatggacaataccgtcgtgatcgaggatattaagaaaatgtgtcgagtcctgcccctttccgctgataccgccggagaccgacctcccgatagcctgacggctagcaatcaatcagacgaattaatttttcttgaccctcacaccactcagacctttgtcgacacggaggaaaacgggactgtgaacgatcagacatttcactgtctccagtctccacaacgcatgaacatcctgaacctcgacccaagcgtggcactcgggtttttttgcaaggaggaaaaggattttgataattggtgttccttagtgcagaaggaaatccttaaggaaaaccttcgcatgtttgagctcgtgcagaagcatcccagtcattggcctccttttgtccctcctgcaaagcccgaggtcaccactaccggcgcagagtttatcgatagcacggaacaacttgaagagtttgacctagaagaagacttcgaaatcttgtccgtttag

SEQ ID NO: 28374 - DNA, 3018 bp, synthetic construct
  source 1..3018: mol_type = other DNA; note = Synthetic coding sequence
atgctgcgcaccgccggacgcgatggactgtgtcgacttagtacatacttggaggagttggaggcagtggaacttaagaaattcaaactgtacctgggaaccgcgacagaactaggcgagggcaagataccctgggggtcaatggaaaaggccggacctctagaaatggcgcaactcctgatcacccactttgggccagaggaggcttggagactggccctttcaaccttcgaacgaattaaccgaaaggacctctgggagcgaggacaacgtgaggacctagtaagagatactccacccggaggtccctctagccttggaaatcagagtacatgcttgctggaagtgagccttgtcaccccacggaaagacccccaggaaacttacagggactatgtgagacgcaagttccgccttatggaggatcggaatgctaggctcggcgagtgtgtaaacttgtcacaccgctataccaggctcttgctggtgaaggagcatagtaaccctatgcaggtccagcagcaactgcttgatacggggaggggacatgcgagaactgtaggacaccaagctagtcctatcaagattgaaaccctgtttgaaccggacgaggagcggccagaacccccacgtactgtggtcatgcagggcgctgccggaatcggaaaatccatgttagcccacaaggtgatgctagactgggcagatggtaagctgttccaggggagattcgattacctgttctacatcaactgccgtgaaatgaaccagtctgcgaccgagtgtagcatgcaggatctcatttttagctgttggcccgagcccagcgcaccactgcaggaactgattcgagtgcccgaacggctcctattcatcatcgatgggtttgacgaactcaaaccctccttccacgacccccaggggccttggtgcctctgttgggaggaaaagcgacctaccgagctgctactgaacagcctgattcggaagaagcttctgcctgagctttccctgctaataaccactcgcccaaccgccctggagaaacttcaccgtctgctggagcacccaagacatgttgaaatcctgggattttctgaagccgagcgtaaggagtacttctataaatattttcataacgctgagcaggctggacaagtatttaattatgttagagataatgagccactcttcactatgtgtttcgtccccctggtgtgttgggtcgtgtgcacatgcctgcaacagcagcttgagggtgggggattactgcgacagacatctcggaccacaacagccgtgtatatgctataccttctgagcctgatgcagccaaagcccggagcaccacgcctccagccgcctcccaaccagcgaggtctttgctctcttgcagccgacggactgtggaatcaaaaaatactcttcgaggaacaggacttgaggaagcatggactggatggcgaggacgtgtcagcttttcttaacatgaacatctttcagaaagacatcaattgcgagaggtactattctttcattcatctatcttttcaggagttcttcgccgctatgtattatatattagatgaaggggaaggcggagcagggccagatcaggacgtgacgaggctcctgacagaatatgctttttcagagaggtccttcttagcacttacttcccggttcctgtttggcctgctgaacgaggagacacgcagtcatctcgagaagtccctatgctggaaagtgagtcctcacatcaaaatggatctcctgcagtggatccaatccaaagcccaatctgacgggtccactctacagcagggaagcctggagtttttttcctgcctgtatgagatccaagaggaggaatttatacagcaggcgctgtcacatttccaagtgattgttgtttccaacatcgcaagcaaaatggagcacatggtaagctcgttttgccttaagaggtgccgcagtgcccaggtgctgcacctatatggcgcaacatactccgccgatggggaggatcgggcaaggtgcagcgccggagcccatactcttctggttcaactgcgccctgaaaggacagtgcttttggacgcttactcagagcatctggcggcagccctctgtacaaaccccaatctcatcgaattaagcttgtatcgcaatgccttaggctctcgcggtgtcaagctcttgtgtcaggggttgcgacaccctaactgtaaacttcagaacctgagattgaaaagatgtagaatctcatccagtgcttgcgaggatcttagtgcagcgcttatcgctaataaaaatctcacccgcatggatctgtctggaaatggtgtaggatttccaggaatgatgctgttgtgtgagggtcttcggcacccccagtgtaggctgcagatgattcagttgaggaagtgccagctggaaagcggggcatgtcaggaaatggcatcggtactggggactaacccgcaccttgtggagcttgacctgacaggaaacgcgttagaggacctggggttgaggcttctgtgccaaggactgaggcatcctgtatgcagactgagaacgctctggctcaagatttgtcgcctaaccgctgcagcttgtgacgagttggcctccaccctcagcgtaaaccagtcactgagagaactggacctgagccttaatgagttgggagaccttggcgtcttgcttctgtgtgagggcttgaggcaccctacctgtaagcttcagactttaagacttggcatttgtcggctgggatctgcggcatgtgagggccttagtgtggttttgcaggcaaatcacaacttgagagagctcgacctcagctttaacgatttgggcgattgggggctttggcttctggccgagggtctgcagcacccagcatgtcgtctccaaaaattatggcttttcggaatggatctgaacaaaatgactcactcacggctggcagccctgagagtcacaaaaccctacctagatataggctgctag

SEQ ID NO: 28375 - DNA, 618 bp, synthetic construct
  source 1..618: mol_type = other DNA; note = Synthetic coding sequence
atggtatcgagctgttgcggatccgtctgttcagatcaggggtgtggtctcgagacttgttgcaggcctagctgctgccagacaacttgctgcagaaccacatgttgtcgcccttcctgttgtgtctcgagctgctgtcgcccacagtgctgtcagtccgtgtgttgccagccaacctgctgtcgaccctcatgctgccctagctgctgccagacgacttgctgccgtactacctgctgtaggccttcgtgctgcgtgagcagctgctgtcgccctcagtgttgtcagtcggtgtgctgtcagcccacatgctgtcgcccatcctgctcgatttccagttgttgcagacctagctgctgcgtttcacggtgctgccgttcgcagtgctgccagtctgtctgctgtcaacccacctgctgtaggcctagctgctgcatatcctcttgttgcagaccaagctgctgtgaaagcagttgttgcagaccctgttgttgtcgcccttgttgttgcctgaggccggtgtgtgggagggtatcgtgccacacaacctgttacaggcctacttgcgttatctcaacctgcccaaggcctctctgttgtgcttccagctgttgttag

SEQ ID NO: 28376 - DNA, 573 bp, synthetic construct
  source 1..573: mol_type = other DNA; note = Synthetic coding sequence
atgcaatcatgtgaaagtagcggtgactcagctgacgatccgctctctcgcggtttgcgacggagagggcaaccccgagttgtggtcatcggggctggattggcgggtttggctgcggcaaaagctctccttgagcaggggttcactgatgtcactgttcttgaggcctctagtcacataggcggtcgggtacagtcggttaagctcggacatgctacttttgagcttggagcaacatggatccatggttcccatgggaacccaatctaccacttagcagaagccaatggattgttagaagagaccactgatggggagagatctgttgggagaatctctctgtactcgaaaaacggcgtggcctgctatctgaccaatcatggacggcgtattcctaaggacgtggtcgaggaattttctgatctgtacaatgaaccaatgcaggtgttgttttcaggagaggcgacacatagaaagtactacagtacaactcacggagcgctcctgagcgggcagcgtgaggctgcaaggttgattgaaatgtaccgggatcttttccaacaaggtacctag

SEQ ID NO: 28377 - DNA, 3945 bp, synthetic construct
  source 1..3945: mol_type = other DNA; note = Synthetic coding sequence
atggctctcaggcccggagctggctccggtggtggtggggctgcgggtgcgggtgctggcagcgccggaggcggtggattcatgttccctgtggccggagggatcagaccccctcaagccggtctcatgccaatgcagcaacaggggttccccatggtcagtgttatgcagccgaatatgcaagggattatggggatgaactactctagccagatgagccaaggacccatcgcaatgcaggcaggaatcccgatgggccctatgccagcggctggcatgccatacctgggccaggccccattcctcggaatgcgtcctccgggaccacagtacaccccggacatgcagaagcagtttgcagaagaacagcagaaacgttttgagcagcagcagaaattgctcgaggaggagcgcaagcgtagacagttcgaggaacagaagcagaaactcagactactgagttccgtaaagcctaaaacaggcgagaagtctcgcgacgatgcactcgaagccattaagggaaatctggatggattttctcgggacgctaaaatgcatcctactccagccagtcaccccaaaaaacccggaccttccctcgaagagaaatttctcgtatcttgtgacattagtacaagcgggcaggaacagattaaactgaacacctctgaggttgggcacaaggcactgggccctggttcctcaaagaaatacccttcactcatggcctccaatggtgtggccgtggatggttgcgtcagtgggaccacaaccgccgaagcagagaatactagtgaccaaaatctttcaatcgaggagagcggggtgggggtttttcccagccaggacccggctcaaccaagaatgcccccatggatttataatgaatcacttgtgcctgatgcctacaaaaaaattctagagaccactatgacccccactggcatcgataccgcaaaactgtatccgattctgatgagttcggggcttcctagggaaactttagggcagatctgggccctagctaatagaaccactcctggcaaactcactaaggaggaactttacactgtgttggctatgatcgccgttacacagagaggagtgcctgccatgtctcctgacgccctgaaccaatttccagccgcaccaatccccaccctttctgggttttccatgacactgccaacccctgtgtctcagccgactgtgattccgagtggaccagctggttcaatgccactgtctctcggtcagccagtgatgggcattaacttggtgggacctgtgggtggcgcagccgctcaggcatcgagtggcttcattcccacctaccctgcaaatcaggtggtgaaacccgaagaagatgacttccaggacttccaagacgcctccaaaagcggatcactagacgatagtttcagcgacttccaggaattaccagcgtccagcaaaacaagcaattctcagcacgggaattcagccccatctctattgatgcccctcccgggtacgaaagctctgccctcaatggataaatatgcggtttttaagggtatcgcggctgataagtcgtccgaaaacaccgttcctcccggagacccaggcgataaatatagcgcattcagagaactagaacagaccgcagagaataaaccactgggggagtcattcgccgagtttagaagtgctggcacagacgacggatttaccgatttcaagacagccgacagcgtgtcccccctcgagccgcctacaaaggataagacatttccgccttcattcccctctggcaccatccagcaaaagcaacagactcaggtgaagaatcccctgaacttagctgacctggacatgttttcaagtgttaactgctcatccgaaaagccactgtcgttctcggccgtcttcagcacttccaagtcggtatcaacgcctcagtcaaccggttccgccgcaacaatgactgcactggcggctaccaagacgtcctccctcgccgatgacttcggagagttttctctgttcggagagtactccggtctagcccctgtgggggaacaggacgactttgctgacttcatggccttttcaaactccagcatatcctccgaacagaaacctgatgacaagtatgacgcactcaaggaagaagcctcccctgtgcctttgacgtcgaacgttggtagtactgttaaggggggacaaaattccactgctgcatcaacaaaatacgacgtgtttaggcagctgagtctggagggttcaggactcggcgtagaagatttaaaagataatacaccctctggtaagagcgacgatgactttgccgacttccactcctccaagttctcttcgatcaatagtgataagtcacttggcgaaaaggcggtcgccttcagacataccaaggaggactcagcgtcagtgaaatccctcgatctccccagtatcggaggatcgtccgtgggaaaggaggactctgaagacgcattatctgtgcagttcgacatgaaactcgctgacgtggggggagacctgaagcatgtgatgtccgacagtagtttagacctgcctacagtctcaggccagcatccccctgcggcagacatagaggacctgaagtacgccgctttcggtagctatagttccaacttcgccgtgagcacacttaccagctacgactggagtgaccgcgatgacgcaacacaggggcgaaagctatctccctttgtcctctctgcagggtccggttcccccagtgcgacgagtatccttcaaaaaaaggagacatcctttggtagcagcgagaacataactatgactagtctaagcaaggtgacgaccttcgtgtcagaagacgcgctacctgagactacattcccggctctggcctctttcaaggatactattccccagacttcggagcagaaagagtatgaaaaccgcgactataaagattttaccaagcaggacctgcccactgctgaaagaagccaggaggcgacatgcccctctccagcctccagcggagcctctcaagagaccccaaacgagtgcagcgatgattttggcgaattccagtccgagaaacctaaaatcagcaaatttgactttctggtggccactagccagtccaagatgaagtccagcgaggagatgatcaaatccgaactggctactttcgatctgtcagtccaaggatctcacaagagaagcctgagcctaggcgataaggagatttcacggtcgtccccctcacccgcactggagcagccctttcgggatcggtcaaacacattaaatgaaaagcctgcgctccctgtgatacgcgacaaatacaaggacctcaccggcgaagttgaggagaacgagaggtacgcttacgaatggcagagatgcctggggtctgcccttaacgtgataaaaaaagccaatgatacgctcaatgggatatcttccagcagcgtctgtacggaggtcatacagagcgcccaaggtatggagtacctgctgggggtggtagaggtttatagggtgaccaagcgggtggagctgggcatcaaggcgacagccgtatgtagcgagaagctccagcagctcctcaaggatattgataaggtctggaataatctgattgggttcatgtcattggcaacgctgactcctgatgagaatagtctagactttagcagctgtatgctgaggccaggaatcaagaacgcccaagagctcgcatgcggagtgtgtctgcttaatgtggatagccggagtcgaaaggaagagaaaccggctgaagaacatccgaagaaagcatttaacagcgagacggattctttcaagctggcgtacggcggacatcagtaccacgcatcctgcgccaacttttggataaactgtgtcgaacctaaaccacccggtctcgtgttacctgacctactttag

SEQ ID NO: 28378 - DNA, 531 bp, synthetic construct
  source 1..531: mol_type = other DNA; note = Synthetic coding sequence
atgagtgatgatgactctagagcctctacgtcgtcctcctctagtagctcctcgaatcaacagacagagaaggagactaacacaccaaagaagaaggagtctaaggtaagtatgtcaaagaattctaaactcttgagtactagtgcaaagtccgctggtccaaagggggataacatttacgaatggagatccacaatattggggcctcccggatctgtgtatgaaggcggagtgttttttctcgacataacctttacgcctgagtacccctttaagcccccaaaggtgacctttcgcacccggatataccattgtaatatcaacagccagggcgtcatctgtctggatatcctgaaggataattggagtccagcacttacaatttctaaagtgctgctatctatctgctctctccttactgattgcaaccccgcagatccactggtggggtccatcgctacgcagtacatgacgaacagagctgaacacgatcgcatggctaggcagtggacaaaacggtacgccacctag

SEQ ID NO: 28379 - DNA, 7028 bp, synthetic construct
  source 1..7028: mol_type = other DNA; note = Synthetic coding sequence
atggacggcgtgtcatcagaggccaacgaggaaaatgacaacatcgaacgtcctgtacggcgaaggcattcatcaatactgaaaccacctagaagccccctccaggacctgcgaggcggtaatgaaagggtgcaagagtctaacgccctgcggaacaaaaaaaactcaagacgggtgtctttcgcggacacaatcaaggttttccagactgaatcccatatgaagattgtcaggaagtctgaaatggaggggtgctccgctatggtgccatcgcagttacagttgctgccccctggattcaaacggttctcttgtctgtccttaccagagacagagaccggagagaacctcctgcttatacaaaataagaaacttgaagataactattgtgagataactgggatgaacaccctgttgtccgctccaattcacacccagatgcagcaaaaggagttctccatcatcgaacatacccgagaacgcaagcacgcaaacgatcaaactgtaatctttagtgatgagaatcagatggacttgacaagttcccacacagttatgattaccaaaggcctgctggacaacccaattagcgagaaatccacaaaaatagatacaacttctttccttgcaaacctaaagctgcacacggaagactctaggatgaaaaaggaagtgaatttctcagtggaccagaatacctcctcagaaaacaaaattgacttcaacgacttcatcaagagactgaaaacaggtaagtgttctgcattccccgacgtcccagataaggagaattttgagatacccatctattccaaggaaccaaacagtgcctcaagtactcatcagatgcacgtgtcactgaaggaggatgagaataacagtaatataacacgcctctttcgcgaaaaggacgatgggatgaactttacgcaatgtcatacggccaacattcagactctgatccccacatcatccgagaccaactcacgtgaatctaaggggaacgatattactatctacggcaacgatttcatggacctgaccttcaaccacacactgcaaatcctgccggctaccggaaatttttcagagatagaaaaccagacacagaacgccatggacgtgactactggctacggcactaaggcatctgggaataagacggtgtttaagagtaagcaaaacactgcctttcaggatctgagcatcaacagtgctgataaaatccatatcacaagatcgcacatcatgggagctgagacccatattgtatctcaaacatgcaaccaggacgccagaattttagccatgacgcctgagagcatttattcaaatcctagcatccaggggtgcaaaacagttttctatagctcctgcaacgatgcgatggaaatgactaagtgtctgtctaatatgagggaggaaaagaaccttttgaagcatgacagtaattatgcaaaaatgtattgcaatcctgacgctatgtcgagcctgacagaaaagactatctacagcggagaagagaacatggatatcacgaagtctcataccgtcgccattgacaatcagatattcaaacaggatcagtccaatgtccagatcgccgctgctcccacccccgaaaaggagatgatgctccagaatttaatgacgacatctgaggatggaaagatgaacgtgaattgcaactcggtaccccatgtttcgaaagagcgcattcagcaaagcctgagtaatccactatccattagcctcacagaccgcaaaaccgaacttctctccggcgaaaatatggatctgaccgaaagccacacaagtaacctgggtagccaagtgcccctggccgcatacaaccttgcgccagaatctacttccgagtctcattctcagagcaagagcagctcagacgaatgcgaggaaattaccaagagccgcaacgagccattccagcggtcagatataatcgccaaaaactctctaacggacacctggaataaagataaagattgggtgctcaagatcctgccttatttggacaaggactctccacaatcagccgattgcaatcaagagatcgctacatctcacaacattgtctattgcggcggagtgctggataagcagatcaccaatagaaacacagtgagttgggaacagagtttattttcaacaactaaaccgctgttctcaagcggccagttctctatgaagaatcatgacaccgctatcagctcacataccgttaaaagtgtgctcggccagaactctaagctggcagagccgttgcggaagagcctgagcaatcccaccccagactactgtcatgacaaaatgatcatttgcagtgaggaggagcagaatatggatttgacaaagtcccataccgtggtgattggctttggcccaagtgagctgcaggagctcggcaagacaaacttggaacacactactggccaacttacaactatgaatcggcaaatagcggttaaagtggagaaatgcggcaagtctcccatagaaaagagcggagtgcttaaatccaattgcataatggatgttctggaggacgagtcggtccagaaaccaaagttccccaaagaaaagcagaacgtcaagatttgggggcgtaaatcagtgggaggccctaaaatcgacaagacaatcgtgtttagcgaagacgataaaaatgacatggacattacaaagtcttacactatcgaaattaatcaccgcccattgctggagaaaagagactgccacctggtgcctctcgccggaaccagtgaaactatcttgtatacctgccgacaggatgatatggagattacaaggtcacacactactgctttggagtgcaagacagtttctcctgatgagatcaccacccgacccatggacaagacagtggtctttgttgataaccacgtggaactggaaatgacagaaagtcacactgtatttattgactatcaggagaaggagcggaccgataggcccaacttcgagctgtctcagagaaaaagtctgggcactcccacggttatatgtacacccaccgaggagagcgtgttctttccgggaaacggcgagtccgaccgcttagttgctaacgatagccagctcacacccttggaggaatggtctaataacaggggccctgtcgaggtcgcagataacatggagttgagcaaatcagccacctgcaagaacatcaaagacgtgcaaagcccgggattcctgaatgaacctctgagctccaagagtcagcggaggaagtcccttaaattaaagaatgacaaaaccattgtattcagtgaaaaccataaaaacgatatggacattacacagagctgcatggtcgagattgacaatgagagcgccctggaagacaaagaagatttccatcttgctggagccagtaaaacaattctctactcttgcggacaggatgatatggaaatcaccaggtctcacactaccgctctcgaatgcaagacactgcttcccaatgaaatcgccatccggccaatggataagactgtgctgtttactgacaattactcagacttagaggtcactgactcccataccgtttttattgactgtcaggctaccgagaagatacttgaggagaatcctaagtttggcataggcaaggggaagaatttgggcgtgagtttccctaaagataattcatgtgtgcaggagattgcagagaagcaggcactggcagtgggcaacaaaatcgtgctgcacaccgagcagaagcagcagctcttcgctgccaccaataggactaccaatgagattatcaaatttcattcggctgccatggatgaaaaggtgatcggcaaggtagtggaccaggcttgtacactcgagaaagcacaggtcgagtcatgtcagctcaataatagagaccggagaaatgtggactttactagctcccacgcgactgctgtatgcggttcgtccgacaactacagctgcctgcctaatgttatttcctgcacagataacctggaaggctcagcaatgcttctgtgtgataaagacgaagagaaagccaactactgcccagtgcaaaatgatctggcttacgctaacgactttgcctcagagtactatttagagtcggagggtcagcccctctccgccccatgtcccctgctggaaaaggaggaggtgatacagacctctacaaaggggcagttagactgcgtcatcaccctgcacaaagaccaagatcttatcaaagacccacgaaatctactagctaatcagactcttgtatattcgcaggatctgggggagatgaccaaactgaactccaaaagagtctcatttaaacttccaaaagatcaaatgaaagtctacgtcgatgacatatacgtcattccccagccacacttctctacagaccaaccacctctgcccaagaagggccagtccagcattaataaagaagaggtgattttaagcaaagccggaaacaagtcacttaacattatcgagaacagcagcgctccgatctgcgagaataagcctaagatcttgaactcggaggagtggtttgccgctgcatgtaagaaagaattaaaagaaaacatacagactacaaactacaatacagcactagatttccactcaaattccgatgtgaccaaacaggttatacagactcacgtgaacgccggagaagcccctgacccagtaatcacgagcaatgttccctgttttcactctattaagcctaaccttaacaatctgaacggaaagactggggagtttctcgccttccaaacagtgcaccttccaccgctgccagaacaactcttggagctgggcaacaaagctcataatgatatgcatattgtgcaggccactgaaattcataatatcaacatcatttcatccaatgcaaaagacagccgtgatgaagaaaacaagaagtcacacaacggtgctgagaccaccagcttacccccaaagaccgtgttcaaggacaaggtacgacggtgctctttgggtatttttctccctcggctgccaaataagagaaactgtagcgtgacaggaatagatgatctcgaacagatccctgcagacactacggatatcaatcatctagagacacagccagtctccagtaaggattctggcatcggttctgtagccggaaagctgaacctgagcccatctcagtacattaacgaagagaatctgccggtgtatccagatgagatcaattcatccgattccattaacattgagaccgaagagaaagccctgattgagacctaccagaaggaaatttccccctatgagaacaaaatgggaaaaacctgcaattcacagaaacggacctgggtacaggaggaggaagatatacacaaggagaaaaaaattaggaaaaacgaaatcaagttcagtgatacgacccaggatcgggaaatatttgatcaccacacggaggaggatattgacaaatctgctaattcggtcttgataaagaaccttagtcggacacccagctcatgttcttcctcacttgattccattaaggcggatgggacgtccctagactttagtacttatcgaagtagccaaatggagagtcagttcctccgagatacaatctgcgaagaaagtctgcgcgagaagctgcaagacggacggattacgatcagagagttttttatcctcttgcaggtgcacatcctgattcagaaacctcggcagagtaacctgcccggtaattttaccgtaaacaccccccctacaccagaagatctcatgctgtcacaatacgtgtataggcccaaaattcagatataccgagaagactgtgaagctcggaggcagaaaattgaagagcttaaactgagcgcttccaaccaggacaagctgttagtggacataaacaagaatttgtgggagaaaatgcgccactgctcagataaagagttgaaggctttcggtatttacctaaataaaatcaagtcttgcttcactaagatgaccaaggtctttacccaccaggggaaagttgcgctgtatggcaaattggtacagtcagctcagaatgagagagagaagcttcagattaagatcgatgagatggataaaatcctgaaaaagatcgataactgtctgacggagatggaaactgaaacgaaaaacctcgaagatgaggagaaaaacaatcctgtcgaggagtgggattcggagatgcgtgccgctgagaaggaactggaacagctgaagacggaggaggaagagttgcaacgaaacctcctggaactagaagtgcaaaaggagcagacgctcgcgcaaatagacttcatgcagaagcaaaggaatagaaccgaagaactgctcgatcaactgagtctaagtgagtgggatgttgttgaatggtccgatgaccaggccgtattcaccttcgtttacgacaccattcaactgacaattacatttgaggagagtgtcgtggggtttccatttctcgataaaagatacaggaaaattgtcgatgtgaactttcagagccttctggatgaggaccaggcacccccaagctccctgctagttcataaactgatctttcagtatgtcgaggaaaaggagtcatggaaaaaaacctgcactacgcaacatcagctgccgaaaatgctggaagagttttccctggtggttcaccattgtaggttactgggggaggagattgagtatcttaagaggtgggggcctaactacaacctaatgaatatcgacatcaataataacgaactgcgcctcctattctcttcaagcgcggcttttgccaaattcgaaataaccctgttcttaagtgcatattacccatctgtcccgttgccttctaccatccagaaccacgtcggcaatacatcgcaggatgatattgctactatactcagcaaggtgcccctggagaacaactacctgaaaaacgtggtgaagcagatctatcaggatctgtttcaggactgtcacttctatcatta

SEQ ID NO: 28380 - DNA, 1638 bp, synthetic construct
  source 1..1638: mol_type = other DNA; note = Synthetic coding sequence
atgagttcctgtgtttcctctcaaccatcctctaatagagccgcacctcaggatgagctaggcggtagggggtcatcttctagcgagtctcagaagccatgcgaggctctaaggggtttgtcttcactctcaatccatctggggatggagagtttcattgtggtgacagaatgcgagcccggatgtgctgtggacctgggccttgccagggaccgccctctagaggctgatgggcaggaggttcccctggatacgtccggctcacaggccaggccccacctgagtggaaggaaattgtctttgcaggaacgctcacagggtggcctggcggcagggggttccttagacatgaacggccgttgtatctgtcccagtttgccgtatagccctgtgagttcaccccagtcctctcctagattaccaagacggccaaccgttgaatcccaccacgtgtcaattacaggaatgcaggactgcgtgcagttgaaccagtatactctgaaggatgagatcgggaagggctcttacggcgtagttaagctggcctacaatgagaacgataatacatactatgcgatgaaagtgcttagcaagaagaaattaataaggcaggcgggtttccctcggaggccccctccaagagggacccggccagcacccggagggtgtattcagccaagaggccctattgagcaggtttaccaggagattgccatcctgaaaaaactggaccacccaaacgtcgtcaagttggtggaagttcttgacgaccctaatgaagatcatttgtatatggtctttgaactggtgaaccaagggcctgtcatggaagtgcctactctcaaaccactgtctgaggatcaggctcggttctatttccaggacctcattaaggggattgaatacctgcattaccagaagatcatacacagagacattaagccgtccaatctgttggtcggcgaagacggccacattaagatagcagactttggcgtgtctaacgagttcaaaggaagcgacgcactgctcagtaatactgttgggactccagcttttatggcacctgaaagcctgtctgagacaaggaagatcttcagcggtaaggcgcttgacgtgtgggcaatgggggtgacactgtactgctttgttttcggccagtgtcccttcatggacgaaaggatcatgtgcctgcactcaaagattaaatcccaggctctagagtttccagaccaacccgacatcgcggaggacctgaaggatctgatcactcgaatgttagataagaaccctgagtcacggattgttgttcctgagatcaagatcctggtgaaaaccatgatccgaaagcggtcattcgggaatccctttgagggatccagacgagaggaacgttccctatctgcccctggaaacctgctgacaaaaaagcccactcgggagtgcgaatctcttagcgagctgaaggaggccaggcaaagacgtcaaccgcctggccacagacctgcccctcgcggtggagggggatcagcccttgtgcgcggatccccctgtgtcgaatcctgctgggcccctgctcctggttctcctgcacgtatgcacccgctgagacctgaggaagcgatggagcccgaatag

SEQ ID NO: 28381 - DNA, 333 bp, synthetic construct
  source 1..333: mol_type = other DNA; note = Synthetic coding sequence
atgccgaagcgctcctgtccatttgcagacgttgccccacttcagttaaaggttcgtgtgtctcagagagagctatctcggggtgtgtgcgcggagcgttactcccaagaagtgttcgatcctagcggcgttgctagcatcgcttgctctagttgtgtgcgggctgtggacggaaaagccgtttgtggacagtgcgagagggccctctgcggccaatgcgtacgcacatgctggggatgcggatcagtggcgtgcacgctttgtggtcttgtcgattgctctgacatgtacgaaaaggtcctctgcaccagttgtgcaatgttcgaaacatag

SEQ ID NO: 28382 - DNA, 2253 bp, synthetic construct
  source 1..2253: mol_type = other DNA; note = Synthetic coding sequence
atggaggatctgtttgaaacattccaggatgagatgggctttagtaacatggaagacgatggcccagaggaggaggagcgtgttgcagagcctcaagctaacttcaataccccacaggccctgcggttcgaagaactcctggccaacctacttaacgaacagcaccagatcgccaaggaactgtttgagcagcttaagatgaagaaaccaagcgcgaagcaacagaaagaagtggagaaggtcaaaccacagtgcaaggaagttcaccagacgctcatccttgaccctgctcagagaaagcgcctgcagcaacaaatgcagcagcacgtgcagcttctgacacagattcacctgctcgccacgtgcaatcctaacctgaacccagaagcctccagcactcgaatatgtctcaaagaactgggcactttcgcccagagcagtattgcactgcaccaccaatacaatccgaaattccaaacgttattccagccttgtaacctgatgggcgcaatgcagcttatcgaagacttcagcacccatgtctctatagattgcagccctcacaaaactgtaaagaagacggcaaacgagttcccttgcctaccaaagcaggtagcgtggatcctcgccacatctaaagtcttcatgtaccctgagttactgcctgtgtgctctctcaaggccaagaacccacaggataagatcctgttcaccaaggccgaggataacctgcttgccttaggcctcaagcacttcgagggtactgagtttctgaaccccctgatttcaaaatatctgctgacatgtaagactgctcgacaactcacagttaggattaaaaatttgaacatgaatagagccccagacaatattatcaaattttataagaaaacaaagcagctgcccgttctcggcaagtgctgtgaggaaattcagccccatcaatggaagcccccaatagagcgtgaggagcacaggcttcctttctggctgaaggccagcctccccagcatacaggaagaactgcgccacatggctgacggcgctcgcgaggtggggaatatgaccggtaccaccgaaattaactccgaccaaggcctggagaaagataactctgagctcggttccgagactaggtaccccctcctgttgcctaagggcgtggtgctgaagctcaaaccagtagcggatcggttccctaagaaggcatggcgccagaaaaggtctagcgttctcaagccccttctgatccagcccagccctagtctacagccttcattcaacccgggtaagactccagcccagtccactcactctgaggcaccgccatctaagatggtcctgagaattcctcacccaatccagccagccaccgtactgcaaacggtgcccggagtgcccccactgggagtaagtggaggcgagagctttgagagccccgcagccctaccagccatgccccctgaggccagaacatccttcccattgtctgagtcccagacccttttgagtagcgcacctgtccctaaagtcatgatgcctagtccagcatccagcatgtttcgaaagccctacgtgcgccgacgtcctagcaagcgcagaggcgcaagagcctttaggtgcatcaaacctgcccctgttatccatccggcttccgtcatttttactgtccctgctaccaccgtgaaaattgtgtcactgggcggtggttgtaacatgatccagcccgttaacgccgctgtagcacaaagccctcagacaattccgatcgcgacacttctcgtcaacccaactagcttcccttgccctctcaaccagcctttggtggcttcctccgtcagccccctcatcgtctccggtaactcggttaacctcccaattccatctactcccgaggacaaggcccacatgaatgtagatattgcatgcgctgtagcggatggcgaaaatgccttccagggcctggagcccaagttggaaccccaagagctgtctcccctaagcgcgaccgtgttcccaaaggtagagcattctcctggaccacctcctgtggataagcagtgccaggagggcctcagcgaaaattcagcataccgttggacagtggtgaagacagaggaaggcagacaggccttggaacccctgccacagggtatacaagaatccctgaataactctagccccggagacctagaagaagttgtgaagatggaacccgaagacgccacagaggaaatatcgggattcctgtag

SEQ ID NO: 28383 - DNA, 2604 bp, synthetic construct
  source 1..2604: mol_type = other DNA; note = Synthetic coding sequence
atgcaggctgaagccgcagactggttctccagtatgccttttcagaagcacgtatactacccacttgcctcgggccctgagggaccggacgtcgccgttgccgcagccgcagcaggtgcagccagcatggcctgtgccccacccagtgccgctagcggacccctccctttctttcaattccggcctcggcttgagagcgtggactggaggaggctgagtgctattgacgtcgataaagtggctggggctgtggatgtgctgaccctccaagagaatattatgaacatcactttctgtaaacttgaagacgagaaatgtcctcactgccaaagcggcgtcgacccggtgttgctaaagctgattcgcttagctcagtttaccattgaatatctgttacacagccaagagttcctgacatctcaactgcatacattggaagaacgtctcagactgagccactgcgacggagagcaaagtaagaaactgttgactaagcaggccggagagataaagactctaaaggaggagtgcaaaagacggaagaaaatgataagcacccagcagttgatgatcgaagctaaggctaattactaccagtgtcacttctgtgacaaggctttcatgaaccaagcattcctgcaaagccatatacagagaaggcacaccgaggagaattcgcatttcgagtatcagaagaacgcccagatcgaaaaactccggtccgagattgtcgtattaaaggaggagctccagttgacccgtagtgaactagaagccgcacatcacgcttccgcagtgcgattttcaaaggagtacgagatgcagaagactaaagaggaggactttctgaaactgttcgatagatggaaggaagaagaaaaggaaaagctggtcgatgagatggagaaggtcaaagaaatgtttatgaaggagtttaaggagctgaccagtaaaaacagtgcactggaataccagctgtccgagatccagaagtcaaatatgcagattaagtcaaacattggtacattaaaggacgctcacgagttcaaggaggaccgctccccatatccgcaggattttcataacgtgatgcagctgcttgatagtcaggaaagcaagtggaccgcacgagtccaggcgattcatcaggaacataaaaaggagaagggtagactgttgagccatatcgaaaaactccggaccagtatgatagacgacctgaatgcaagcaatgtattctataagaagcggatagaagaattgggacaaagactgcaggagcagaatgagctgattattacccagcggcagcaaattaaggattttacctgcaatccattaaattcaatctcagagccaaaaggcaaccctctcgcctggcaggcctttgaatcccagccagcagcacctgccgtgcccatgaatgctcccgcacttcatactctagaaactaagtctagtcttccaatggtgcacgaacaagccttttccagccacattctggaaccaattgaggagcttagcgaggaggaaaaagggagagaaaatgaacagaagctcaacaataacaaaatgcaccttaggaaggccctgaaatctaactcatccttaacaaaaggactgcgcactatggtggagcaaaatctgatggagaaactagaaacactgggaattaatgcagatattcggggaatcagtagtgatcagttacaccgtgtgctgaagtccgtagagtctgagaggcataagcaggagcgggagatcccaaacttccaccagatacgtgagttcctcgagcatcaggtcagttgtaagatcgaggagaaagcgcttctttcctctgatcaatgttctgtttcacagatggataccctttccactggcgaggtgcccaagatgattcagcttcccagtaaaaataggcagctgattaggcaaaaggccgtgtctacagaccgaacctccgtccccaagattaagaagaacgtgatggaggacccgttccccaggaaatccagcacaatcactacgcctccattctcttctgaggaggagcaagaggacgacgacctgatccgggcatacgcaagcccaggacctctgccagtgcccccacctcagaacaagggctccttcggaaaaaacaccgttaagtcagatgccgatgggactgagggtagcgaaatcgaagacacagacgatagcccaaagccagcaggcgtcgccgtgaagaccccaactgagaaggtggaaaagatgttcccccacagaaagaacgttaacaagcctgtggggggtaccaatgtgcccgagatgtttatcaagaaggaggagttacaggaattaaaatgtgcggatgttgaagacgaggactgggacatttcttctctggaagaggaaatttccctcggtaagaaatctggcaaagagcagaaagagccccctcctgcgaagaacgagcctcacttcgcccatgtactgaacgcctggggtgctttcaacccaaaaggaccaaaaggcgagggtctgcaggaaaatgagtcttctacactgaaatcttccctcgtgacagtaactgactggagtgacacgtccgacgtgtag

SEQ ID NO: 28384 - DNA, 1860 bp, synthetic construct
  source 1..1860: mol_type = other DNA; note = Synthetic coding sequence
atgtctggtctcgtcttaggacagcgggacgagcccgctggacacagactgtctcaggaagagatactcgggtccacccgcttggtgtcccagggactggaagcactcaggtcagagcaccaggctgtccttcaaagcctgagccagacgattgaatgcctacagcagggtggtcatgaagagggcttggttcacgagaaagctcgacagctgagacgatccatggagaacattgagcttgggctcagtgaggcccaggtgatgctggcactggcttcccatcttagcaccgtggaaagcgaaaaacagaagttacgcgctcaagtacgtcgtctgtgtcaagagaatcagtggttacgcgacgaactagctggcactcagcaaaggctgcagaggtcagaacaagcagtcgcccagctcgaagaagagaaaaagcatcttgagttcctcggacagctccgccaatatgacgaggacggacacacatccgaagaaaaagagggcgatgctactaaggactcgctggatgacctgttcccgaacgaagaagaggaggacccatccaatggtttgagtagaggtcagggagccacggcggctcagcagggcggatacgaaattccagccagacttcggacgctccataacttggttattcagtatgcagcacagggccgatacgaagtggccgtgcccctgtgtaaacaggcattggaggacctggagcgtacttcaggaagaggccacccagatgtggccactatgctgaatatcctggccttggtctacagggatcaaaacaagtacaaagaagctgcccatcttcttaacgatgccctgtcaatccgcgagtctaccctgggacccgaccacccagccgtggcagccaccctgaataatttggccgtgctgtatggaaaacgtggtaaatacaaggaagccgagccactctgtcagcgggcactggagatcagggagaaggtgcttgggaccaaccaccctgatgtggcaaagcagctgaacaacctggccctcttatgccagaatcaaggcaaatatgaggcggtggagaggtactatcagcgcgcacttgctatttatgaaggtcaactaggccctgacaaccctaacgtagccaggacgaaaaataatctggcctcatgctatctgaaacagggtaagtacgccgaggccgagaccctctacaaagaaattttgaccagggcgcacgtccaggagttcggttcggtggacgacgaccataaaccaatttggatgcacgccgaggagcgggaggagatgtcgaaatcccggcaccacgaaggcggaacgccatacgcggagtacggagggtggtataaagcctgtaaggtctctagccccaccgttaacactaccctccgaaacctgggggcattatatcgcagacaaggaaagctggaggccgctgaaaccctagaggaatgtgccctccgaagccggagacaggggactgatcccatctcccagaccaaagtcgccgaactcctcggcgagagcgacggtcgcaggacatcccaggagggcccaggggattccgttaagtttgagggtggcgaagacgcgtctgtggccgtcgagtggtcaggcgatgggtcaggcactctacagcgttccggaagtctcggcaaaatacgagatgtcctacgcaggtccagcgaacttctggtgcggaagctgcaaggcacagaacctagaccctcctcttccaatatgaagcgggctgcttccctgaactatctgaaccaaccctctgccgctcctttacaggtttcacggggtctaagcgcttctactatggatcttagttcatcctcctag

SEQ ID NO: 28385 - DNA, 1137 bp, synthetic construct
  source 1..1137: mol_type = other DNA; note = Synthetic coding sequence
atgaaagagcaacttccagatctgcactcccacttcagtgaccttaacctggaggcccacatgtacgcctcacagtggtttctgacactttttaccgctaagtttccattgtgcatggtcttccacatcattgacctactgctgtgcgagggactgaacatcatcttccacgttgcccttgcgctcctgaagacgtccaaggaggatctccttcaggctgacttcgaaggcgcactcaaattctttcgtgttcagctgcccaaaaggtatcgagctgaagaaaacgcaaggaggctgatggaacaggcttgtaatatcaaggtgcctacaaagaagcttaaaaagtacgagaaggagtaccagacaatgagggaaagccagttgcaacaagaagatcccatggatagatataagcgcgaaaaccgacgcctgcaagaagcttccatgcgtttagagcaagagaatgacgacctcgcccacgaactagtgacatctaagatcgcacttcgaaatgacctagaccaggcggaggataaggcagacgtactgaataaggagctgttactgaccaagcagaggcttgtcgagacggaggaggagaaaagaaagcaggaggaggagacggcccagctgaaagaggtcttcaggaagcagctggaaaaagctgagtacgagattaagaagaccactgccattattgccgaatataagcagatctgtagtcaactgtcgacaaggctggaaaagcagcaggccgcttccaaggaggagctggaggtagtcaaaggaaagatgatggcatgcaaacattgttccgacattttcagcaaagaaggcgctcttaagctggccgcaacagggagagaagatcagggcatcgagaccgacgacgaaaaggacagtctcaaaaagcaattacgagagatggaactcgagctggcccagaccaaactccagctggttgaggccaagtgcaagatacaggaattagagcaccagagaggggcactaatgaatgaaatccaggctgccaagaacagctggtttagcaaaacgctcaatagcatcaagactgccaccggcacccagccattgcagcccgctcctgtgacacagccacctaaagagagcacatag

SEQ ID NO: 28386 - DNA, 2631 bp, synthetic construct
  source 1..2631: mol_type = other DNA; note = Synthetic coding sequence
atgggggattccgacgatgaatacgatcgtcggcgtcgggataaattcagaagagagaggtccgattatgaccgcagccgcgagcgggacgagcgcaggaggggggatgactggaacgaccgtgagtgggacaggggtagagagagacgtagtcgcggagaatacagagactatgatagaaatcgcagggagcggttctccccgccacggcacgagcttagtcctcctcaaaaacgcatgcggagagattgggatgaacatagctctgatccctatcacagtggatatgagatgccctatgctggtggtggcggaggaccaacttatgggccaccacagccatggggtcaccccgatgtgcacattatgcagcaccacgtccttccaattcaggctcggctagggtccatagccgagatcgatttgggtgtgccaccacccgtcatgaagacattcaaagagtttttgctcagtctagatgactcagtggatgagactgaagccgtgaagagatataacgactacaagttagatttccgccgtcaacagatgcaggatttttttctggcccacaaggacgaagaatggttcaggagtaaataccaccctgacgaggtggggaaacgtaggcaggaagccaggggagccttacagaatcgtctccgggtattcctgtcactcatggagacaggctggttcgacaatctgctcctagatatcgacaaagcagacgccatcgtcaagatgctggacgccgcagtgatcaagatggaagggggaacagagaacgatctgcgcatactcgagcaagaagaggaagaagaacaggcaggaaagcccggagaaccaagtaagaaggaggagggaagagcgggagcgggattgggggatggggagcgaaagacaaatgacaaggacgagaagaaggaggatggtaagcaggcggaaaacgattccagcaatgatgataaaaccaaaaaaagcgagggcgatggggacaaagaagagaaaaaagaagattccgagaaggaggccaaaaagtcctctaagaagaggaatagaaaacactcaggcgacgatagcttcgatgagggatccgtatcagaatccgaatcagaaagcgagagcggacaggcagaggaggaaaaagaggaggccgaagaggccctaaaagagaaggagaagccaaaagaagaggagtgggaaaaacctaaggacgccgcaggactggagtgcaagcccagaccactgcacaagacatgctccttgtttatgcgaaatatcgcgcctaatatatctagagccgagatcatttccctctgtaaacgctatcctgggtttatgcgtgtggcactcagcgagcctcaaccggagcgcagatttttccgaagaggatgggtcaccttcgacaggtccgtaaacattaaggaaatttgctggaatctacaaaacatacgtctccgggagtgcgagttgtcccccggagtaaatcgggacctgaccagaagagtgagaaacatcaacggcataactcagcataagcagatcgttcggaacgacattaaacttgctgctaagcttatacatacgttagacgaccgcacgcagctgtgggccagcgagccgggaaccccacccctgcctacatctctcccgtctcaaaatcccattctcaagaatattacagactacctgattgaggaggttagcgccgaagaggaagagctgctcggatcaagcgggggagccccaccggaggaaccccctaaggagggcaaccccgcagagattaacgtggaacgagatgaaaagctgatcaaagtgctggacaagcttctgttatatttgcgcatcgtgcactcattggactactacaacacatgcgaatatcccaatgaagacgaaatgcccaaccgctgcggcattatccacgtgagaggcccaatgcccccaaacagaatatcccacggagaagttctggaatggcaaaaaacgtttgaggagaagctgacgccactgctgagtgtgagggaaagcctcagcgaggaagaggcccagaagatgggtcgcaaggatccggagcaggaggtggagaagttcgttaccagtaatacccaagaactcgggaaggataagtggctatgtccgctgtctggcaagaaattcaaaggcccagaattcgtgcggaagcacatctttaacaagcatgctgagaagattgaagaagtaaaaaaagaggtggcctttttcaataactttttgactgacgctaaacgacccgctctcccagagatcaaaccagcccaacccccaggaccggcacagattttgccacccggtctgacaccaggccttccttaccctcaccagacgccacaaggactcatgccatacggacagcctagaccccctattctgggatatggagccggagcagtgcggcctgcggtcccgactggcggacctccctatccccacgccccttacggagctggcaggggaaattatgatgccttccgaggccaggggggataccctgggaagcctaggaatcggatggttaggggggacccgagggccattgtagagtacagagacctcgatgcacctgacgatgtggatttcttctag

SEQ ID NO: 28387 - DNA, 1491 bp, synthetic construct
  source 1..1491: mol_type = other DNA; note = Synthetic coding sequence
atgaaacttgggaagaaacctatgtataagccagtcgacccctactctagaatgcaatcaacgtacaactacaacatgcgcggaggcgcataccccccaaggtacttctatcccttcccagttcctccgctgctgtaccaggtcgaattgagcgtaggcggacagcaattcaatgggaagggtaaaacccggcaggccgctaagcacgacgccgctgccaaggcactgcggatcctgcagaatgagcccctgcccgagagactggaagtgaacggcagagaaagcgaggaagagaatctcaacaaatctgaaatttcccaggtctttgaaatcgccctgaagcgtaacttaccagtgaactttgaggtggctcgggaatccggtcctcctcacatgaagaatttcgtcaccaaagtgtcagtgggagaattcgtcggggaaggtgaggggaagtctaagaaaatatccaaaaagaatgcagcaatcgccgtactcgaggaattaaaaaaactgcccccattgccagcggtggagagggtcaagccaaggataaaaaaaaagaccaaaccaattgtaaaaccccagacaagccccgaatacgggcagggtatcaaccccatctcccggttggcacagatccaacaggctaaaaaggagaaggagccagaatataccctccttacggagcgaggtctgcctcgtcgaagagagtttgttatgcaagtgaaggtgggcaatcataccgctgaaggcactggaacgaacaaaaaggttgcgaagcgtaacgccgcagagaacatgttggagatattaggatttaaggtaccacaggcccagcctacgaaacctgctttgaagagcgaagagaagacaccgattaaaaaaccgggagatggcagaaaagtcacgttttttgaaccgggatcgggcgatgaaaatggaacttctaacaaagaagatgagttcagaatgccctatctctcccaccagcaactgccagccggtatcctgcctatggtgcccgaggttgcccaggctgtaggtgtgagccagggtcaccacactaaggacttcacacgcgcagcaccaaatcccgcaaaagcaacagtgacagcgatgatcgccagggaacttctgtatggtggaacctcacccacagccgagacaattctcaagaataacatcagttcggggcacgtgccccatgggcctctgacacggccttcagaacaattggattacctgtccagggtgcaggggtttcaggtggagtacaaagactttcctaagaacaataagaatgagttcgtttcccttattaattgctcttcacagccgcctctgatcagtcatggaatcggaaaggatgtggagtcctgccatgatatggctgccctgaacattttgaagttgctgtcagagttagatcagcagagcactgagatgccgagaaccggtaacggacctatgtcagtgtgtggtcggtgttag

SEQ ID NO: 28388 - DNA, 318 bp, synthetic construct
  source 1..318: mol_type = other DNA; note = Synthetic coding sequence
atggcactacggtatcctatggctgtgggcctgaacaagggacacaaggtgacgaaaaatgtatccaagccacggcattccagacggaggggcaggttgaccaagcataccaagttcgtcagagatatgataagagaggtgtgcggcttcgctccctacgagcgtagggctatggagctgctgaaggtttctaaggacaaacgcgctttgaagtttatcaaaaaacgcgtcggcactcacatccgtgccaagagaaaacgggaggagctgtccaacgttctggcggctatgagaaaggctgcggcaaagaaggactag

SEQ ID NO: 28389 - DNA, 3720 bp, synthetic construct
  source 1..3720: mol_type = other DNA; note = Synthetic coding sequence
atggctaatgactctcccgcaaagtcacttgtcgacatcgacctatcatcgttgagggaccctgcgggaatattcgaactggtggaggtagtcggcaacggcacttatggacaggtttataaagggaggcacgtgaagaccgggcaactggccgctatcaaagtcatggatgtcacggaggatgaagaagaagagatcaagttagagataaatatgttgaaaaaatactcacaccatcggaacattgccacatactacggagcatttattaagaagtcgccacccggtcacgacgatcagctatggctcgtgatggagttctgcggagcgggatcaatcacggaccttgtgaaaaataccaaaggaaacacactgaaagaggattggattgcctatattagcagagagattctccggggtttagctcatctacacatccaccacgtgattcatcgggatattaaaggccagaatgttctgcttacagaaaacgcagaggtgaagctggtcgatttcggcgtatctgctcagcttgatagaaccgttgggaggcgaaatacattcattggcaccccatactggatggcgcctgaggtgatcgcatgcgacgagaatcctgatgctacttacgattatcggtcagatctttggtcatgcggtatcacagctatcgaaatggccgagggagcacccccactgtgcgacatgcacccgatgcgcgcactcttcctgattccacgtaacccccctccaaggttgaagtctaaaaagtggtccaagaaatttttttctttcatagagggctgcctggtcaagaactacatgcagcgaccatcaactgaacagctgttaaaacatcccttcatacgggatcaacccaacgagcggcaggtgaggatccagcttaaggatcatatagatcgaactagaaagaagcgcggtgaaaaggatgagaccgaatatgaatacagtggatcagaggaggaagaggaagaagttcccgaacaggagggagagccatcttcgattgtgaacgtgcccggtgaatctactctccgccgagattttctcagactgcagcaggagaataaggagagatctgaagccctgcgaagacagcaactcctgcaagaacagcaactgagggagcaggaagaatacaaaaggcaacttctcgccgagagacagaagaggattgagcagcagaaagagcagaggcgccgtctggaggagcagcagcgacgcgagagagaggctcggaggcagcaggagagagagcagcggcgtcgggaacaggaggagaaaagacggctcgaggaactggagcgaaggcggaaggaagaagaggaaagacgacgggctgaagaagaaaagcgcagggttgagcgcgagcaagagtacattcgtaggcaactcgaggaagaacagaggcacctggaagtcctccagcagcagctgctgcaggagcaggctatgctgctggagtgccggtggagagaaatggaggagcacagacaggctgaacggctgcagcgacagctgcaacaggagcaggcttatctgttgagcctgcagcatgaccacagacggcctcaccctcagcactcccaacagccccctcctccccagcaggagagaagcaagccgagtttccacgccccagaacccaaggctcactacgaaccggctgatcgggcacgcgaagtagaagataggtttcggaagaccaatcattctagcccggaggcgcaaagtaagcagacagggcgtgtattggagccccctgtcccatcgcgcagcgaatctttttcaaacgggaattctgaatccgtgcaccccgctctgcagagacctgctgagccccaggtgccagtgcgcaccactagtcgttccccggtcttgagccggagggatagcccgctacagggcagtggccaacaaaattcgcaggcagggcagcggaattcaaccagtatcgaacccagacttttgtgggagcgagtggagaaactggtgcccaggccaggatctggctcttcttctgggtctagcaactcggggtcgcagcccggtagtcaccccggatcccaatccgggtcaggagagcgcttccgggtgcgtagcagctctaaatctgaaggtagtccatctcagaggctggaaaatgccgtgaagaagcccgaagacaagaaggaggtgttccgacccctaaagccggctgacctgaccgccctcgcaaaggaacttcgagccgtggaggacgttaggccccctcataaggtgactgactattcaagctcatcagaggagagtgggaccactgatgaagaggacgacgatgtggagcaagaaggggcagatgagtccacctcagggccagaggatacgagggctgccagcagcttgaatctttccaacggcgagaccgaatccgtgaagactatgattgtgcatgatgacgtcgagagtgaacctgcgatgacgcccagtaaagaaggaactctgatcgtccggcagacccaatcggcaagttccacattacagaaacacaaatcctcaagctccttcaccccgttcatagacccacgccttcttcaaatctccccctcttccggcactaccgtgacctctgttgtaggattttcttgtgacggaatgcgccctgaggctatccgtcaggaccctacaagaaaggggtccgtcgtcaacgtgaacccaacaaatacaagaccccagtcggacactccagagatacgaaagtataaaaagaggtttaacagcgaaattctgtgcgcagccctgtggggcgtgaacctgctcgtgggaaccgaatccggtctgatgctgttggaccgatcgggccaggggaaggtataccctctgattaaccggcgacggtttcaacagatggacgttctcgagggcctcaacgtcctggtcaccatcagcgggaagaaagataagctgcgcgtgtactatttgtcatggctcagaaataaaatactgcacaatgaccccgaggtcgagaaaaaacagggatggacgacggtcggagatctcgagggctgcgtgcactataaggtggtgaagtatgaacgcattaaatttctggttattgcattgaaaagctcggttgaggtgtatgcctgggcgcctaagccatatcacaagttcatggcattcaagtccttcggggaattggtacataaacccttgctagtggaccttaccgtggaagagggacaaaggctcaaagtgatttacggcagctgcgctgggttccatgcagtggacgtggatagtgggtccgtgtacgatatttaccttccaactcatattcaatgctccataaagccacacgccataataatcctgcccaataccgacggtatggagctcctagtgtgttacgaagacgagggcgtgtatgtaaatacttacggcagaattactaaggatgtggtcctccagtggggagagatgcccacctcagtggcgtacataagatccaaccagacaatgggctggggggagaaagcaatcgaaatcaggtctgtggagaccgggcacctggacggggtgtttatgcacaagagggcccagcgattgaaattcctgtgcgagcgtaatgataaggttttctttgccagcgtacgcagcggcggtagtagccaggtttatttcatgaccctggggagaacgagcctcctctcctggtag

SEQ ID NO: 28390 - DNA, 2847 bp, synthetic construct
  source 1..2847: mol_type = other DNA; note = Synthetic coding sequence
atgtacggttcagcacggagtgtggggaaggtggagccctcctcccagtcccccggtagatcaccgaggctgcccagatctcctcgcctgggccaccgcaggactaatagcacgggcggatcctctgggtcgtcagtaggcggaggcagtgggaaaacgctgtctatggagaacatacaaagcctcaacgccgcatacgcgactagtggacccatgtacctcagcgatcacgaaaatgtagggtccgagaccccaaagtccaccatgacacttggcaggagcggcggaagactgccatacggcgtgcgtatgaccgccatgggcagttcaccaaacatcgcttcttccggagtggccagtgatacaatcgcttttggggaacaccatctccctcccgtcagtatggccagcaccgttccccattctctgagacaagccagggataacacaatcatggatctacagacccaattgaaggaggtcctgcgcgagaatgacctgctccggaaggatgtggaggttaaggaaagtaagctgagtagcagcatgaactcaatcaagactttctggtcacctgagctgaaaaaggaacgcgcacttcgcaaggacgaagcatccaaaataactatttggaaggaacaatatagagtggtgcaggaggaaaatcaacacatgcaaatgaccatccaggctctccaggatgaacttcgaattcagagggatttgaatcagctgtttcagcaagattcttcgtcaagaaccggcgagccatgtgttgccgagcttacagaggagaactttcagcgcctacatgctgaacacgaacgtcaggctaaagagctgtttctacttcgcaaaaccctggaagagatggagctgaggatagagacgcaaaaacaaacgctcaatgcgagagacgagtccattaaaaaactgctggaaatgctccagagcaaagggctgagtgccaaagctactgaggaggatcacgaaaggacgcgacgcctggcagaagccgagatgcatgtgcatcatttagaatcactacttgaacagaaggagaaagagaattccatgctccgtgaggaaatgcacagaaggttcgagaatgccccagatagtgccaaaactaaagcccttcagaccgtgatcgaaatgaaagactccaaaatttcttcgatggagagaggcttgagggatttagaggaagagatacagatgctgaagagcaatggggctttatccacagaggagcgggaagaagagatgaagcagatggaagtgtatcgttcccacagcaagttcatgaaaaacaagattgggcaggtcaagcaagagctgtcgcgaaaggatacagagcttttggctctgcagacaaaacttgaaacactgacaaaccagttcagcgactctaagcagcatatcgaggtcctgaaggaatcccttaccgctaaagagcagcgcgctgcgatcctccagactgaagtggacgccctgaggcttagactagaggaaaaggaaaccatgctaaataagaagactaaacagattcaggacatggctgaggagaagggtactcaggctggtgagattcacgaccttaaggacatgttggatgttaaagaacgaaaagtgaatgtgcttcagaagaagatcgaaaacctgcaagagcagctgagagataaggagaaacagatgtcttccctaaaagagcgcgtgaaatctctgcaggcagacaccactaacacagatacagcgctgaccacactcgaggaagcactggctgaaaaagagcggaccattgagcggctcaaggagcagagggacagggacgaaagagaaaaacaagaagagatcgacaattataaaaaggacctgaaggatttaaaagagaaggtgtcattgcttcagggtgatttgtctgagaaagaggcctcgctgttagatctcaaggagcatgcctcaagcttggcatcctctggcctgaagaaggactctagattaaaaacactcgagattgcgttggagcagaagaaggaagagtgcctgaaaatggagagtcaactaaaaaaggcgcatgaggccgcattggaagcccgtgcttcacccgagatgtctgacaggatccagcatctggaaagagagattacccggtataaggacgagagctcgaaggcccaagcggaagtggaccggctgctcgaaatcttgaaggaggtggagaatgagaagaatgacaaagacaaaaaaattgctgagctggagtctctcacttctcgccaggtgaaggatcagaataagaaggttgcaaatttgaagcataaagagcaggtggaaaagaagaaaagtgcgcagatgctcgaagaagccaggcgcagggaggacaatctcaacgacagcagccagcagttgcaggttgaagagcttctgatggctatggagaaggtaaagcaggagttggagagcatgaaggccaagctgagctcaacccagcagtctctggcagagaaggagacacacttaactaatctgcgggctgaaaggcgcaagcatctggaggaggtactggaaatgaaacaggaagctctgcttgcggctatctctgagaaagatgccaatatcgcccttttggaactttcttctagcaagaaaaagacacaggaggaagtggctgcactcaagcgcgaaaaggatcggctcgtgcagcagcttaagcagcagacccagaatcgaatgaaactgatggccgataattatgaggatgaccacttcaagtccagccacagcaaccagaccaatcataagcctagccctgaccaggatgaagaggagggaatttgggcctag

SEQ ID NO: 28391 - DNA, 2733 bp, synthetic construct
  source 1..2733: mol_type = other DNA; note = Synthetic coding sequence
atggccgctaccgtggaagggcctgaactggaggcggctgctgctgccggagatgcaagcgaagacagtgacgcaggatcgcgggctcttccatttctcggtggtaaccggctgtccctggatttatatccagggggatgccaacaactgttgcacctgtgcgtgcagcaaccccttcagcttctgcaggtggagttcctgcgcctgtcgacacacgaagatccccagcttctcgaggcaactctggcccagctgccgcaatccctgtcttgccttcgatcactcgtcctgaaaggtggccagaggcgcgacactctcggagcatgcttaagaggtgcactaacaaatctgcctgccggtctgagtgggctcgcacatctggcccacctcgacctctccttcaattcactggagacgctgcccgcatgtgtccttcagatgcgtggactcggggcattacttctgtcacacaattgcctctccgaacttcctgaggctttgggagcactgcccgctctcacttttctcacagttacacataaccgcctccagaccttacccccagcactcggcgctctgagcacccttcagcgactggacttgtcccaaaacctcctggacaccctgcccccagaaatcggaggtctgggctctcttctcgagctaaacctggcctctaaccgcttgcagtccctgcctgccagtcttgctgggctaagaagccttcggttgctcgttctccacagcaatttactcgcgagtgtacctgccgaccttgcacgcctccctctcctgacgaggttagacctgagagataaccaactacgcgatttaccaccagaactgctggatgcccctttcgtgaggcttcaggggaatccccttggcgaagcttctcctgacgcaccatcgtccccggtggcggcactaatacctgaaatgccacgattgttcctgaccagtgatctcgacagctttcccgttacccctcaagggtgcagtgtaactctggcatgcggcgtgcgcctccagtttcccgctggggcaaccgctactcctattaccatcaggtacaggcttctactgcccgaaccaggcctagtccctttagggccacacgacgctcttttgagccatgtgctggaactgcaaccacacggggtggcctttcagcaagacgttggcctatggctcctgtttacccctccccaagctaggaggtgccgcgaggtggtggttagaactaggaatgacaactcttggggggatctggagacttatctggaggaggaagcccctcagcgactgtgggctcactgtcaggtcccacacttctcctggttcctggtggtaagtcgccctgtgagcaacgcttgtttggtcccacctgaagggactctcctgtgctcttcaggccatcccggagtgaaggtaatcttcccaccaggcgcaacagaagaacctagacgcgtgagtatgcaggtggttcggatggcaggccgagagttgcaggcactactcggggagccggaggccgcagtaagtcccctgctgtgcctgagccagtcaggaccccctagctttctccagcctgtgactgtacagttgcctcttcccagcggtattactggcctgtctctggaccggtctcgccttcacttattatactgggctcccccagctgccacatgggatgatataacagcacaggtcgtcctggaactcacacatttgtacgctcgttttcaggtgacccacttctcttggtactggctgtggtataccacgaaaaattgtgttgggggtctggcaagaaaggcttgggagagacttcgactgcaccgcgtgaacctgatcgccctgcagcgaagacgtgaccccgaacaggtgctgctccaatgcctgcctcgcaacaaggtagatgcaacgctccggagactcttagagagataccgtggccctgaaccgtctgacaccgtggagatgttcgaaggcgaagagttctttgctgctttcgagagaggtatagacgtcgacgccgaccgtccagattgcgttgaaggtcgcatttgtttcgtgttctatagccacctgaagaacgtgaaggaagtgtacgtcacaactaccctcgaccgggaagcccaagcggtacggggtcaggtatcattctataggggtgcagttcccgttcgcgtgcccgaagaagccgaggccgcacgacagcggaagggagccgacgccctgtggatggctacactgccgatcaaactcccgagactcagaggatccgaaggacctcgcaggggtgccggtctctcgctcgccccactcaatctcggggatgctgaaacaggcttcctgacacagtccaatttgttatcagtggccggaaggctcggactagattggccagctgttgcactacatttgggggtgtcctaccgtgaagtacaacggattcgccacgaatttagagatgaccttgatgagcagattcgacacatgttgttctcatgggcagaacgccaggcgggacagcccggtgctgttgggttgcttgtgcaggcccttgaacaatccgatcggcaagacgtggctgaagaggttagggctgtcttggaattaggaaggcggaagtatcaggactccatacgaaggatgggcttggctccgaaggatccggctctccctggctccagtgcccctcagcctcctgaaccagcccaggcctag

SEQ ID NO: 28392 - DNA, 2961 bp, synthetic construct
  source 1..2961: mol_type = other DNA; note = Synthetic coding sequence
atgtctcagtggacaccagaatataatgagctgtacaccctcaaagtcgacatgaaatccgagatcccctccgacgcccctaaaacacaggaatctctcaagggaatcttgctgcatcctgaacccatcggcgctgcaaagagctttccagctggagtggagatgattaactccaaagtggggaacgagttcagccacctctgcgatgattctcaaaagcaagaaaaagaaatgaatggaaatcagcaggaacaggagaagagcttagtggtgcggaagaagaggaagtcccagcaagcgggaccgtcctacgttcagaattgtgttaaagaaaatcagggcatcctaggactacggcaacacctgggaactccgtcggacgaagacaatgactcgtccttttctgattgcctgtcaagtccttcttctagtctgcatttcggagattcagacaccgtaacatcagatgaagacaaggaggtgagcgtccgacatagtcaaactatccttaatgccaaatcccgatcgcacagtgccaggtcacataagtggccgaggaccgagacagagagcgtgtctggcctgctgatgaaacgtccctgtctacacggctcctccctgcgcagactcccctgcaggaaaagatttgtgaagaacaattcgagtcagcggacccagaagcagaaggaaaggattctgatgcagaggaagaaaagagaggtgctcgcaagacggaagtatgccctgttgccctcatccagtagttctagtgagaacgatttatcctcagagagtagcagttcctcctccaccgaaggggaagaggatttgttcgtgagcgcctccgaaaatcaccagaataaccctgctgtcccttccggctcaatcgatgaagatgtggtggtgattgaggcctcatcgacaccccaggtcactgccaatgaggaaatcaacgtgacctcaaccgactccgaagtcgagatagttaccgttggggagtcataccgatcacgttcaacattgggccattcacgctcacactggagtcaaggcagtagttcccatgcttccagacctcaagaaccgaggaaccgatcacgcatctccacggttattcagcccctcaggcaaaacgccgcagaggtcgtcgacctgactgtagatgaggatgagcccacagtggtgcccacaaccagtgcccgaatggagtcacaagcaacgagtgctagcatcaataacagcaaccccagcaccagcgaacaggcctctgatactgccagtgccgttacaagcagtcaaccttctactgtgtccgaaacatctgccacgctgacctcaaactccacaactggaacttcgatcggagacgatagtcgaagaaccacatcgagcgccgtgactgagacaggtcctcccgcaatgccacgcctcccgtcctgttgtcctcagcattcaccttgtggcggatccagccagaaccaccacgccctgggacatcctcacacatcctgcttccagcaacatggtcatcatttccagcatcaccaccaccatcatcatacaccacaccctgcggttcctgttagtcctagcttcagtgatcccgcatgcccggtggaacggccacctcaagtacaggccccttgtggggctaactccagctcgggcactagctaccatgaacagcaagcactgcccgtggatctgagcaatagcggaattcggagtcatggtagcggaagcttccacggtgcttccgctttcgatccttgctgtccagtttcaagctcccgggcagctatcttcggtcatcaggctgcagctgcagcaccaagccagcctctcagttcaatcgatgggtatggctcaagtatggtcgcccaaccccagccacaacctccaccacaaccttctcttagcagttgccggcactatatgcccccaccttacgccagtctaactcgccctctgcatcatcaggcgtcagcttgtccccatagccatggaaacccccctccccagacacagccacctccgcaggtggactacgtgattccacacccggtccatgcttttcactcacaaatttctagccacgcaacttctcaccccgtggcaccccctccgccaacccaccttgcgagcactgctgcccctatcccgcagcacctgcccccaactcatcagccaattagccatcatattccagccaccgctcctccagcccaacggctgcacccccacgaagttatgcagagaatggaggtccagcggaggaggatgatgcaacaccccacccgagctcatgaacggcctccaccccaccctcatagaatgcatcctaactatggacacggtcaccacattcacgtgccgcagaccatgtcaagccatcccaggcaggcaccagagaggtccgcctgggagctggggatcgaagccggagtgaccgcggcaacatacacaccaggagctttgcacccccacctggcccactatcacgctccccctagactgcaccatttgcagctcggggctcttcctctgatggttcctgacatggccggttatccacacataaggtatatcagctctggcctggacggcactagctttagaggaccctttcgaggtaattttgaagagctgatccacctagaggagagactggggaatgtcaaccgaggggcatcccagggcacaatcgagaggtgcacttatccacacaagtataaaaagcgaaaattgcactgcaaacaggatggtgaggaaggtacggaggaagataccgaagagaaatgtaccatttgcctcagcattctcgaagagggagaagatgtgcggagactgccttgcatgcaccttttccaccaggtgtgtgtggatcagtggctaatcaccaacaagaagtgcccaatctgtcgggtcgacatcgaggcccaattgccttctgagtcctag

SEQ ID NO: 28393 - DNA, 372 bp, synthetic construct
  source 1..372: mol_type = other DNA; note = Synthetic coding sequence
atggctaaaatcaaagccagagatctacgcggtaaaaagaaagaggagcttttaaaacagttagatgacctcaaggtggaattaagccagctcagggtggcgaaggtgactggaggagcagcatccaagctctccaagataagggtggtaaggaaatccatcgctcgtgtgctgacagtcatcaaccaaacccaaaaggagaatctccgcaaattctacaagggaaagaagtacaagcctctcgacctgagacctaagaagaccagagcaatgaggagaagactgaacaagcacgaagagaatcttaagacaaagaagcagcagcggaaggagcgtttatatccactgcgcaagtacgccgtgaaggcctag

SEQ ID NO: 28394 - DNA, 1635 bp, synthetic construct
  source 1..1635: mol_type = other DNA; note = Synthetic coding sequence
atgaagatcttctgttcccgcgctaacccaaccacagggtcagttgaatggctggaggaagatgagcactacgactaccaccaggagatcgccaggagctcttacgcggacatgctccacgataaagaccgcaacgtgaaatattaccaaggcattcgggctgccgtgtctagggtaaaagaccgcggacagaaggccttagtgctggacatcggaaccgggacagggctgctcagtatgatggcagtgacagccggtgccgacttctgctacgcaattgaggagaattgcgaagcggtccctcaccgggctaccgtatacgcccaattggttgagtcaggcaggatgtggagctggaataaactgtttcctatccatgtacagacatcattgggggaacaggtgatagttccgcctgttgatgtggaatcatgtcccggagctccgtcagtatgtgacatacagctgaaccaagtctcacccgcagactttactgtccttagtgatgttctcccgatgttttccattgactttagcaagcaggtatcatcgagtgccgcttgtcactcaagacggttcgagcctctcacaagtggtcgagcgcaggtcgtactgtcttggtgggatattgaaatggatccagaaggaaaaatcaaatgcactatggctcccttttgggctcacagcgatccagaggagatgcagtggcgcgaccactggatgcagtgcgtgtatttcttaccacaggaagaacccgtggtgcagggaagtgccctctacttagtggcccatcatgacgactattgcgtttggtacagcctacagcgcacatcccctgaaaagaacgaacgagtgcgccaaatgcgaccggtgtgcgactgccaagcccatcttctttggaacaggccgagatttggcgagatcaacgaccaggacaggacagatagatatgtacaggcattgaggaccgtgagcctgcttctgggagaacctttctttactacaagtctgttgccttggcataacctgtatttctggtatgtgcggaccgcagttgaccagcacctggggcctggcgctatggttatgcctcaggcagctagccttcatgctgtggtagtcgaattccgcgatctgtggaggattcgctcaccctgcggcgactgcgagggttttgacgttcatattatggatgatatgatcaagagagccctggattttcgggagagccgggaagcagaaccacaccctctctgggaatatccctgccggagtctgagtgagccctggcagattctgacatttgactttcagcagcctgtccctctgcaacccttgtgtgcagagggaacagtcgagcttcggaggcccggtcagagccatgcagctgtcctgtggatggagtaccatctaaccccggaatgtactctgagtaccggcttactggagccggcagatcctgagggcggatgctgctggaaccctcactgtaagcaggctgtatacttcttttcccctgcacccgatcccagagctctgctcggcggaccacgcactgtctcctatgccgtggagttccacccggatacaggcgatattatcatggagtttcgtcacgctgacactcccgattag

SEQ ID NO: 28395 - DNA, 1131 bp, synthetic construct
  source 1..1131: mol_type = other DNA; note = Synthetic coding sequence
atgcccctccaggtgtcagactacagctggcagcagactaagaccgccgtgtttttgagcctgccattgaaaggcgtttgcgttagagacaccgatgtcttctgtacagaaaactatttaaaagtgaatttccccccattcctgtttgaggcctttttgtatgcgcctatcgacgatgagtcttccaaggctaaaataggtaatgatacaatcgtatttaccctgtataagaaggaggccgcaatgtgggagactctatccgtcaccggcgtggataaggaaatgatgcagcggattcgggaaaagtccattttgcaggctcaggaacgtgccaaagaagctaccgaggcaaaggccgcagccaagcgagaggatcagaagtacgccctatcagtgatgatgaaaatagaggaggaagagagaaaaaaaattgaggatatgaaagaaaacgagcgcatcaaggctaccaaagccttggaggcttggaaagaataccaaaggaaagcggaggaacagaaaaagattcagcgagaggagaaactttgtcaaaaggaaaaacagatcaaagaggaacgaaaaaaaatcaagtataagtctctgaccagaaacctcgcaagtagaaacctggcgcctaaaggcagaaatagcgagaacattttcacagagaagctgaaggaggatagcatccccgctccccgatctgtgggtagcattaagattaacttcactccgagggtcttccccactgccctcagagaatcacaagtcgccgaggaagaggaatggctgcacaagcaggccgaagcacgcagggccatgaacactgatattgcggaactatgcgatctcaaggaagaagagaagaatcccgagtggttgaaggacaagggcaacaagctgtttgccactgaaaattacttggcagccataaatgcctacaatctcgccattcggttgaataataaaatgcccttgttatacctgaatcgggctgcatgccatttgaaactgaaaaacctccacaaagctatagaagactcgagtaaggcctatcgcatcatgaagaggcatttaagattgatacatcccactaagctgtacaagcttatgttgcgtaggtttgggatgtag

SEQ ID NO: 28396 - DNA, 4221 bp, synthetic construct
  source 1..4221: mol_type = other DNA; note = Synthetic coding sequence
atgtggtccttgactgcatcagagggcgaatcaacaaccgctcacttttttctgggcgcaggtgatgagggactgggaaccagaggcatcggcatgcgacctgaggaatccgactcagaactgctggaggacgaagaggatgaggtgcctccagagccccaaatcattgtcggcatctgcgccatgaccaagaagtctaagtctaagcccatgacccaaatccttgaaagactgtgccggtttgactatctgacggtcgttattctaggggaggatgtgatcctcaacgagccagtggagaactggcccagttgccactgtctgatcagcttccattcgaaaggctttcctctcgataaggccgtcgcttatagcaagcttcgcaaccccttcctgataaacgaccttgccatgcaatactacatccaggataggcgagaagtgtacaggatcctgcaggaggagggtatcgatcttcccaggtatgccgtcctgaacagagatcctgcaagaccggaggagtgcaacttaatagaaggggaagatcaggtggaggtgaacggtgccgtgttcccaaaacccttcgttgagaagcctgtatccgctgaagaccacaatgtgtacatctattacccaagtagtgcgggtgggggttcacaacgcctgtttcggaagattggcagccgttcttctgtttactcacctgaatctagcgtgagaaaaacaggctcttatatctatgaggaatttatgccgacagacggtaccgatgtcaaggtgtatactgtgggccctgactacgcccacgcagaggctcgtaagagtcctgcacttgacggtaaagtagaacgggactccgaaggcaaagagatcagatatcctgtaatgctgaccgccatggagaaacttgtcgctcgtaaggtatgcgtggcctttaaacagacagtttgcgggttcgatcttcttagggccaatgggcactcattcgtgtgcgacgtcaatggcttttcatttgtgaaaaatagcatgaaatattacgacgattgtgcgaaaatactggggaatactattatgagggagttagcccctcaattccagatcccctggtctattcccaccgaggctgaagatatccctattgtgccgactacgtctggcaccatgatggagttgcggtgcgtcatcgctattattagacacggagataggacacctaaacagaaaatgaaaatggaggtgaagcatccacgcttcttcgcactttttgagaaacatggcggatacaagaccggtaaactgaaactgaagaggcctgagcagctgcaggaagttctggatatcactcgcctgctgcttgccgagctggaaaaggagccaggcggagagatcgaagaaaaaaccggcaaacttgaacagctgaaatcggttctcgagatgtatggccacttcagcgggatcaatcgaaaggttcagcttacatactacccccatggagtgaaggcgtctaacgagggccaggaccctcagagggaaactttggccccttctctgctgctcgttctcaagtggggcggagagctgacacccgctggtcgagttcaggctgaggaactgggaagggccttcagatgtatgtaccctgggggtcaaggagattacgcgggattccctgggtgcggcctcttaagactgcactcaacgtttcggcacgacctcaagatctatgcaagcgatgaaggcagggttcagatgaccgccgcagcctttgccaaggggctgctagccctggaaggcgagctgacaccaatattagtccagatggttaagtccgcaaatatgaatgggttgctggacagcgacggggactcattatctagctgccagcaccgtgtgaaggccaggctgcaccatatcctgcaacaggatgcaccctttggacccgaggattatgatcagctcgcaccgacacggtcaacaagtctgctcaactccatgaccatcattcagaaccccgtcaaagtgtgtgaccaagttttcgcactgatcgagaatctaactcatcagatcagagagagaatgcaggatcctcgctccgtggatctgcagctttaccacagtgagaccttggaattaatgctgcaacgctggtccaaactggagagagactttagacagaagtcaggcagatatgatatctccaaaatacccgacatatatgactgtgtaaagtatgacgtgcaacataatggatcccttggcctccagggaacagccgagctgctgagactaagtaaagctctggcagatgtagtcatcccccaagaatacggcatttctcgcgaggagaaattagaaatagccgtggggttttgccttccgctgctgaggaagatcctgctggatctgcagagaacccatgaagacgagtccgtgaacaaacttcacccactctacagtaggggagtgttgagtcccggaagacacgttcgtacaaggctatactttacatctgagagtcacgtgcattctctcctcagcgtcttccgctatgggggattgctggatgagacccaggatgcccaatggcagcgcgcactggattacctcagcgccataagcgagctcaactatatgacccagattgttattatgctgtacgaggataacacccaagatccattatccgaagagaggttccacgtagagctgcacttttcgccaggcgtgaagggagtcgaagaagaggggtctgctcccgctggttgcggatttcgaccagcaagctccgagaacgaggaaatgaaaacaaaccagggaagtatggagaacttatgtcctggaaaggctagcgatgagccagaccgtgctctgcagactagccctcagcctccagaggggccaggccttccaaggcgctcacccctcatcagaaatcgtaaagcaggaagcatggaggtcctctccgagaccagcagtagccgaccaggcggatataggctgttctcttccagtcgtcctcccactgagatgaaacaatcggggctcggtttcgaaggctgtagtatggttcctacgatctaccctttggagaccttgcacaatgccctctcactcaggcaggtctccgagttcttaagtcgggtgtgccaacgtcataccgatgcgcaggcccaagcatctgcagcgttgtttgacagtatgcactccagccaggcatccgacaacccatttagtccacccaggaccctgcactcccctcctctccagttgcagcagaggagcgagaaacccccttggttggaaacacgtttttgtcatgtaggacaggctggcttggagttgctgaccagtagcgacctgccagccagcgcttctcagagcgcagggatcacaggcgtcagccatcggacgcagcctgattcttcaggtccctcttcaaccgtgtcatccgccggtccgtcttcccccacgacagttgatggcaactctcagttcggcttctctgatcaaccttcgttaaacagccatgtggcagaggaacaccagggcctaggtctactgcaggagacaccagggtcaggggctcaggagctgagtattgagggcgagcaggaattattcgaaccaaaccagagccctcaggtgccacccatggaaacctcccagccctacgaggaggtttcacaaccttgccaggaggtaccagacataagtcagccctgccaggatataagcgaagccctgtcccaaccttgccagaaggttccagatattagccagcagtgccaggaaaaccacgataacggtaaccacacatgtcaggaggtgccacatatttcacagccgtgccagaaatctagtcagctgtgccagaaggtttctgaagaagtctgtcagctatgtctagagaattcagaagaggtttcacagccctgtcagggcgttagtgttgaagtaggaaaactggtgcataagttccatgttggagtgggaagcttggtgcaggaaactctcgttgaggtcggcagcccggcagaggagattccagaagaagtgatccaaccttatcaggaattctccgtggaggtgggacggctggcgcaggagacatcagcaatcaatctgctcagtcaggggatacctgaaatcgataagcctagtcaggagttccccgaagaaattgatctccaggcccaagaggtgccagaggagattaattag

SEQ ID NO: 28397 - DNA, 1338 bp, synthetic construct
  source 1..1338: mol_type = other DNA; note = Synthetic coding sequence
atggtcttggagggaaatcccgaagtgggatctccaaggacatcagatctgcagcaccgcggaaataaagggagctgcgtgttatcttcaccaggagaggatgcccagccaggagaagagcctattaaatacggtgaactgattgttctcggctataatggctgcctggcttcaggggacaaggggagaagacggtccagactggcactcagtcgcagatctcacgctaacggtgttaagcccgatgtgatgcaccacattagcacacctcttgtgtccaaagccctatccaaccgcggacaacacagcatttcttacacattgtctcgctcgcactctgttatcgtcgaatatacgcatgatagtgacactgacatgtttcagatcgggaggagcaccgagaacatgattgatttcgtggtgactgataccagccctgggggaggcgcagccgaaggtccttccgcacaatctaccatatcccgatatgcttgtcgcatcctgtgtgatcgcaggcctccatataccgccagaatttatgccgcagggttcgacgcgagcagtaacatcttcctgggagagagggccgctaagtggcggacccccgacggtctgatggatgggcttaccactaatggcgttctggtcatgcaccctgccggtggattttctgaagattcagcacccggtgtgtggagggagatcagcgtctgtggcaacgtgtacactctccgagattcacgatcagcacagcagagaggcaagttagtggagaatgagtccaacgtgctgcaggacggctcactgattgacctgtgtggcgcaaccctcctgtggagaacacctgctgggctgctgagggctcctacgctgaagcagcttgaggcacagagacaggaggccaacgccgcacggcctcaatgtcccgtgggtttgtccactcttgcatttccctctcccgctcgcggacgtaccgctccggataaacagcaaccctgggtgtacgtcaggtgtggacacgtccacgggtatcatggctggggatgccgacgggaacggggacctcaagaaagggaatgtcccttgtgtcgtctcgtgggaccttacgtgccgctgtggcttggccaagaggccggtctttgtctggaccctggaccaccatcccatgcattcgccccttgtggccatgtttgtagcgagaaaaccgccagatactgggctcagacccctcttccgcatggcacacacgcctttcatgccgcttgtccattttgcggcgcttggttgactggagagcatgggtgcgtgcgcttgatatttcaggggccacttgactag

SEQ ID NO: 28398 - DNA, 1950 bp, synthetic construct
  source 1..1950: mol_type = other DNA; note = Synthetic coding sequence
atgggaactgcgcttgtctaccacgaagatatgacagccacccgtctgttatgggatgacccggagtgcgagatcgaacggcctgagagactcacagctgctctggaccggttgaggcaacgcggactggagcagagatgtctgcggctcagcgcacgggaagcatcagaggaggagttggggttggtacactcccctgaatatgtgagcttggtcagggagacccaggtgctcgggaaagaagagctgcaagccttgtctgggcaattcgatgccatatacttccacccctctacatttcattgcgcccgattagccgctggggctggcctgcaactcgtggatgctgtgctcaccggtgccgtccagaacgggctggcccttgtccgcccaccaggacaccacggacagagagcagctgcaaatggattttgtgtttttaataatgtggcgatcgccgcagctcacgctaagcagaaacatgggctccatcgaattctggtggttgactgggacgtccatcacggtcagggcatccaatacctgtttgaagacgaccctagtgtgctctacttttcatggcaccggtacgaacatggtcgcttttggccctttctccgcgagtcagatgctgatgcagtggggaggggtcaagggttgggtttcaccgtcaacctgccctggaaccaggtgggaatggggaacgccgactacgtagctgcgtttctacacctgctgcttcccctggctttcgaaggacagatgcaggcgacaccagagtgttttgctcacttaactcagcttttgcaagtgctcgccggagggagggtttgtgctgtgctagaaggagggtatcatctggaatcccttgctgaatcagtctgtatgaccgtgcagacactgcttggtgaccctgccccaccactttccgggccaatggcgccatgtcaatctgcgcttgagagcatccagtccgccagagctgctcaagcccctcactggaagtctctccagcagcaagatgtgactgccgtcccgatgtcacccagctctcacagtcctgaggggaggcctccccctttgctcccaggcggtccggtatgcaaagccgctgcctctgctccatcttctctgttagaccagccctgcctgtgtcccgcaccttctgtaagaacggccgtggcattgacaacccctgacatcactcttgtccttccccctgacgttatacagcaggaggcttccgctcttcgggaggaaacggaagcctgggctagaccgcacgaatctctggcgagggaggaagccctgacagccttgggcaaattgctttatctgttggacgggatgctggatggacaggttaactcaggcattgccgcaactcctgcctccgctgctgccgctaccctggatgtggcagtgagacggggacttagtcatggagcccagcggctgttgtgtgtagcgttaggacagctcgaccggccaccagacctggcccacgacgggaggtccttatggctgaatattcggggtaaagaagctgccgctctgtctatgttccatgtgtcaaccccactccccgtcatgacaggcggtttcctgtcttgtattttaggcctggttctgccccttgcttatggcttccagcctgacctggtgctggtcgccctgggacccggacatggactgcagggccctcatgccgctcttctggccgcaatgcttagaggccttgctggagggagggttctggcactgctcgaggagaattccacccctcagctcgccggtattctggccagggtgctgaatggcgaagccccaccatccctaggccctagtagcgtcgcctctcctgaagatgttcaggccctgatgtacttacgaggccaattagagccacagtggaagatgctgcagtgtcatcctcacctagtggcctag

SEQ ID NO: 28399 - DNA, 795 bp, synthetic construct
  source 1..795: mol_type = other DNA; note = Synthetic coding sequence
atggcaggagagcagaaaccaagcagtaatctgctagagcagtttatcctcctggctaagggcacatcgggcagtgcactcacagctctgattagccaagtgctggaagccccaggtgtctatgtcttcggggagctcctcgaacttgccaacgttcaggagttggccgagggtgccaatgctgcttacctgcagctcctgaacctcttcgcttacggaacatatccagattacatcgcaaacaaggagagccttcctgagcttagtacagcccagcagaataagcttaagcacctgactattgtctctctcgcatcgcgtatgaaatgcatcccctatagcgtccttctcaaagatctcgagatgcggaacctgcgcgagctagaagacctcattattgaggccgtgtatacagacattatccagggaaagcttgaccaaaggaatcaactgctggaagtggacttctgtataggaagagacatcagaaagaaggacattaacaatatcgtgaagactctccacgagtggtgcgacggctgcgaagccgttttattgggaatcgagcaacaggtacttcgtgctaatcagtacaaggagaaccacaaccgcacacagcagcaagttgaagcagaagtgactaacataaagaagacgctgaaggctacagcatccagcagcgcacaagagatggagcagcagctggccgaaagagagtgcccaccccacgccgaacagcggcagccaaccaaaaagatgtccaaggtcaaaggcctcgtgtcctctaggcactag

SEQ ID NO: 28400 - DNA, 726 bp, synthetic construct
  source 1..726: mol_type = other DNA; note = Synthetic coding sequence
atgagcgccagcctgaactataaatccttcagcaaagagcagcagaccatggataaccttgaaaagcaactgatttgcccaatttgtctagaaatgtttacaaagcccgtggtgattctaccctgtcagcataacctgtgcaggaaatgcgcctctgacatctttcaggcttctaatccctatctgcctacccggggaggcaccaccatggcctccggaggaaggtttcgctgcccctcatgcaggcatgaagtagtccttgatcgccacggagtctacgggttgcagagaaatctgctggtggagaacataattgacatttataagcaggaatcaaccaggcctgagaagaaatcagatcagcccatgtgcgaggagcacgaagaggaacgcatcaatatctattgcctgaactgtgaggtgcctacttgttccttatgtaaagttttcggagcgcacaaggattgtcaggtggcccctctcacccatgtcttccagagacaaaagagcgaactctctgatgggattgccatccttgtggggagtaatgaccgggtacagggtgtcatttcacagcttgaagatacctgtaagaccattgaaatcggcttcgaagcacctcccctccaggggcaggccgcagcaccagcttcaggttctggagctgactccgaaccagcccgtcatattttcagctttagctggctgaactctttgaacgaatag

SEQ ID NO: 28401 - DNA, 3501 bp, synthetic construct
  source 1..3501: mol_type = other DNA; note = Synthetic coding sequence
atggccaacgatagccccgctaagtccttagtagacatcgacctgagttcgttgagagatcccgctggtatctttgaactcgtggaagtggtaggcaacggtacttacggccaagtgtacaaaggaaggcacgtcaagacaggacagttggctgccatcaaagttatggacgttactgaggacgaggaggaagagattaagctcgagattaatatgctaaaaaagtactctcaccatcggaatatagccacttactatggggcattcatcaagaagtctcccccaggacacgatgaccagctttggctggtgatggaattttgcggagcgggttctataacggatttggttaaaaacaccaagggcaatacattgaaggaggactggattgcttacatcagtcgagagatcctccgcggactggcgcacttgcatatccatcacgtcatccatagggacatcaagggccagaacgtgttgctgaccgaaaacgccgaggttaaactcgtcgactttggtgtcagcgcccaattagataggaccgtgggaagaaggaataccttcatcgggacaccctactggatggcccctgaagtcatcgcctgcgatgagaaccccgacgcaacctatgactatcggtctgacttatggagctgcgggattacagccattgagatggctgaaggggctcctccactgtgcgacatgcaccctatgcgcgcactgtttcttattcctaggaatccacccccacgtctcaaaagtaagaaatggtcaaagaaatttttctcattcatagaaggatgtttggtaaagaattatatgcagcgacctagtaccgaacagctactcaagcatccatttatcagggaccagccgaacgaacgccaagtaaggatccagctgaaggaccatattgatcgtactcggaaaaagcgcggagagaaggacgaaaccgagtatgagtactcgggaagtgaggaagaagaagaggaagttcctgagcaggagggcgaaccctcatccatagtgaatgttcccggagagagcaccttgaggagggactttctccgcctgcagcaggagaataaagagaggagcgaggccctgcgacgccaacagctactgcaggagcagcagctgcgggaacaggaggagtacaaacggcagctgctggcagagcgtcagaagcggattgagcaacagaaagaacagaggcggaggttagaagagcaacagcgaagagagcgggaggctcgcagacagcaggaaagagaacagaggcgcagggagcaggaggagaagcgaaggttggaggaattagagcgcagaagaaaggaggaagaggaacggaggagggccgaggaagaaaaacgacgggtggaacgcgagcaggagtacatcaggcggcagctggaagaggagcagaggcacctcgaagtgctgcaacagcagctgttgcaagaacaagccatgttgttgcatgaccatcgtcgccctcatcctcaacactctcagcaaccaccaccacctcagcaggaacgaagcaaaccaagtttccacgctcccgaacctaaagcccactatgagccagcagaccgcgcacgagaagtccccgtgaggactacgagcagatctccagtgctatctaggagggattcacccctgcaggggtcagggcagcagaactctcaggcaggacagcgcaactcaacatcgtctatcgaaccacggctgctgtgggaacgggtggaaaaattagtacctaggcctggcagcgggtctagctccggatcctccaactcaggttctcagcccggttcccatccaggtagccagtccggctcaggcgagcggttcagagtgaggtctagtagtaagagcgaaggctctccgagccagcgcctagagaacgccgtgaagaaacccgaagataagaaggaagtcttccggcctctcaagccggctgtgcgtatcgaccttactgctctggcaaaagagttaagagctgtggaggatgtcaggcccccacataaagtgacggactatagttcatcatccgaagagagtggtacgactgacgaagaggacgatgatgtcgagcaggagggcgcagatgaaagtacttcaggccctgaggatacaagagctgcctccagccttaatttaagcaacggtgagaccgagtcagtgaagacaatgattgtacatgacgatgtggaatctgagccagcgatgacccccagcaaagaaggcactcttatcgtgcgtcagacccaatccgccagtagcactctccaaaaacataagtccagctcaagttttacccccttcatcgatccgaggctgttacagattagcccctcgagtggtactacagtcacctctgtcgtcggcttttcctgcgacgggatgaggcctgaggcgataagacaggacccaacaaggaagggctctgttgttaacgtaaatccaaccaacaccagaccccagtccgatactcccgaaatccggaagtacaagaagcggtttaatagtgaaattttgtgtgccgctttatggggagtgaatcttttagtgggaactgagtctggcttgatgctcctggatcggtctgggcaaggaaaggtctatccgctgataaatcggaggcgctttcagcagatggacgtgctcgaaggactgaatgttctcgtgaccatcagtgggaaaaaggataagctccgggtttactatctgtcctggctccgcaacaaaattcttcataacgaccccgaggtcgaaaagaaacaggggtggacgacagttggcgaccttgaaggttgcgtgcactacaaggtagtcaagtacgagagaataaagtttctcgtcattgctctgaagtcatcagtcgaagtgtatgcgtgggctccaaagccttaccacaaattcatggcttttaaaagcttcggcgagctggtgcacaaacctctgctggtggacctgacggtggaggaggggcagagattgaaagtgatctatggaagctgtgcaggctttcacgcagttgacgtggacagtggctctgtgtatgacatttatctacccacacacgtgcggaagaatccccatagtatgatccagtgcagcattaaaccacatgctatcatcatacttcccaacactgatggtatggaactcttggtatgttacgaagacgaaggcgtgtacgttaacacatacggacgcattaccaaggacgtggtattgcagtggggtgaaatgcctacgtcggttgcttacatcagatcaaaccagacaatggggtggggcgaaaaggccatcgaaattcgatcggtagaaactggtcacttagacggcgttttcatgcataaacgggcacagaggctcaaatttctttgtgagagaaatgataaggtatttttcgcttcagtgaggtcaggcggttcatcgcaggtttacttcatgactcttgggagaacgtctttgctttcatggtag

SEQ ID NO: 28402 - DNA, 2466 bp, synthetic construct
  source 1..2466: mol_type = other DNA; note = Synthetic coding sequence
atggtcgcccctgtccttgagacttcacacgttttttgttgccctaatagagtgcgaggcgttctgaattggtccagcgggcctaggggcttgctggcattcgggacttcatgttccgtagtgctgtatgatcctctgaagcgcgtggtcgtgactaacctgaatggccacactgctagagtgaactgcatccagtggatctgtaagcaggatggcagtcctagcacagaactcgtctcaggtggttctgataaccaggtcattcactgggaaattgaagataaccagcttctgaaggcggtgcacctgcagggccatgagggacccgtgtacgctgtgcatgcggtgtaccaaagacgcacttctgaccccgctctgtgcaccctgattgtgagtgccgcagcagacagcgctgtccgactgtggtccaagaagggacccgaagtcacctggaagacgggccaagtggagcggggacgagcctggaaaccaccagcgtccctcgcattgtgcagccgatcatgcgacagtatggtaagttgctatgcatcaatactttgcaaggcgttgtggaaggagaagctgcatactttctggcaccataaccgaatttctttcctgccatccgcttttcgccctatcccaattctcgcatgcggaaacgatgattgccgtattcacatctttgctcaacagaacgaccagtttcagaaagtgctaagtctatgtggacatgaggattggatccgaggcgtggagtgggctgccttcggacgcgatctgttcctggcttcttgctctcaggattgcctcattaggatttggaaactgtatatcaaaagtacctctctcgaaacgcaagatgatgacaatatccgactgaaagaaaatacttttactattgaaaacgagtccgtgaagatagctttcgccgtgaccttggagaccgtgttagctggccacgaaaactgggttaacgccgttcactggcagcccgtgttctacaaggacggtgttctgcaacaacctgttagactgctcagcgcctcaatggacaaaaccatgatcttatgggccccagacgaggaatccggcgtgtggctggaacagcgggagtggacgccggagattgtcatctcagggcatttcgatggtgtgcaagacctcgtgtgggacccagaaggggagtttataataactgtggggaccgatcaaactaccagactgtttgctccctggaagagaaaggaccagagtcaggtgacttggcacgagatcgccagaccgcaaatccacggctacgacctgaagtgcttggccatgatcaacaggttccaatttgtctctggagccgatgagaaagtgcttcgtgtgttcagcgcaccgcgtaacttcgttgagaatttttgcgccataactgggcaaagtctgaaccacgttctgtgcaaccaagacagcgacctgcctgaaggggctacagtgccggcacttggcctaagcaacaaagccgtgtttcaaggagacattgcctctcaaccctccgatgaggaggagcttttgacatctaccggatttgagtaccagcaggtggctttccagccctctatcctaacagaaccgcctacggaagaccatctattgcagaacacattgtggcccgaagttcagaagctgtacggccacggatatgaaatattctgtgttacctgtaattccagcaagaccctcctggcaagtgcttgcaaggctgcaaagaaagagcacgccgctattatcctgtggaacactacttcgtggaaacaggtgcagaatctggtttttcactcgctgaccgtgactcaaatggccttctctccaaatgagaaattcctccttgctgttagcagagacagaacttggtccctgtggaagaaacaagacacgataagccccgagtttgagcctgtcttttccctgttcgccttcaccaacaagatcacatctgtgcactctcggataatctggagctgcgattggagtccggatagtaaatactttttcacgggttctagggataagaaggtcgtagtctggggggagtgtgatagtacggatgattgtatcgagcacaatatcggcccttgtagcagcgttttggacgtagggggagcagttaccgcggtgagcgtgtgccctgtcctgcacccatcacagcggtatgtggtcgccgtggggctggagtgtggaaagatttgcctctacacatggaaaaagacagaccaggtccccgagataaacgactggacccactgcgtcgaaacatcccagtcgcagtcccatactctggcaattagaaaattatgttggaagaactgttccggcaaaaccgaacaaaaggaagctgagggagccgaatggctgcatttcgcgtcttgcggcgaagaccatacagtgaagattcacagggtgaataaatgtgccctgtag

SEQ ID NO: 28403 - DNA, 969 bp, synthetic construct
  source 1..969: mol_type = other DNA; note = Synthetic coding sequence
atggtcagcgtaataaacacagtggacacgagccacgaggacatgatacacgatgctcagatggactactacggtacccggcttgcaacatgcagctctgacaggagcgttaagatttttgatgttcgcaacgggggacagatcctgatcgccgacctgagggggcatgaaggccctgtgtggcaggttgcctgggctcaccctatgtacggaaatatacttgcttcttgtagctacgatagaaaagtgataatctggcgggaagaaaatggcacttgggagaaatcacacgaacacgccggacacgatagcagtgtgaattctgtctgctgggctccacacgactacggactcatccttgcttgtggtagctctgacggcgctatttcactgctgacatacacaggcgagggccagtgggaggtgaagaagattaacaacgctcataccatcgggtgtaacgcggtgtcatgggcccctgccgtggtgcccggttccctaattgaccatccaagtggccagaagcctaattatataaagcgttttgcctccggaggctgcgacaatttgattaaactgtggaaggaggaggaagatggacaatggaaagaagagcagaagctagaagcacacagtgactgggtgagagatgtcgcatgggccccttctatcggccttcccacctccaccatcgcctcatgtagtcaggacggtcgggtgttcatttggacatgtgatgacgcaagttctaacacttggtctcctaaacttttacataagttcaatgatgttgtttggcacgttagctggagtattaccgctaatattcttgccgtttccggaggggacaacaaggtcacgctgtggaaggaaagtgttgatggccagtgggtttgcatttccgatgtgaataaagggcagggatccgtgtccgccagtgttaccgagggtcagcaaaatgagcaatag

SEQ ID NO: 28404 - DNA, 1347 bp, synthetic construct
  source 1..1347: mol_type = other DNA; note = Synthetic coding sequence
atgagctctcggaaactttcaggacctaagggaaggcggctctctattcacgtggtgacgtggaatgttgccagcgcagcaccaccattggacctcagtgacctccttcagctcaacaaccgtaatcttaacctggatatctacgtgatcgggttgcaagagctgaattcgggcattatttctttactgagcgatgccgcattcaacgacagttggtctagtttcctgatggatgttctgtctcccctgagtttcatcaaagtgtcgcacgttcgcatgcagggaattcttctgttagtgttcgcaaagtatcagcacctcccgtacatccaaatcttatcaactaagtccacaccaacaggtctgttcggttactggggcaataaggggggtgtaaacatctgtctgaagctgtatggatattacgttagcatcattaattgccacttaccaccccacatctccaacaactaccagcggctggagcacttcgatcgcattcttgaaatgcagaattgtgaaggccgagatattcctaacatcctggaccacgacctgatcatttggttcggggacatgaatttcaggatcgaggattttggcttgcatttcgttcgagagtccatcaaaaaccgttgctacggtgggctatgggagaaggatcagctctcaattgctaaaaagcacgatcctctgctgcgagaattccaagaaggaagactccttttccccccaacctataagtttgaccgcaatagtaacgactacgatacttccgaaaaaaagaggaagccggcttggactgaccggatcctgtggcgattaaagagacagccttgcgcaggccctgacacccctattccccctgctagccacttttcactgtcactgagggggtatagctcccatatgacttacggcatcagcgaccacaagcctgtgagcgggacattcgaccttgagctgaagccgctagtgagtgctcctttaattgtcttaatgccagaagacctgtggacagtcgagaacgacatgatggtatcttatagttctacatccgacttcccgagcagtccttgggactggatcggcttgtataaggtggggctgcgggatgtgaatgactatgtcagttatgcctgggtcggagatagcaaagtcagctgtagtgacaatctgaatcaggtatatatcgatatatcgaacatccccacaaccgaggacgaatttctcttatgctattactcaaactcccttcgctctgtggtgggcatcagcagaccctttcagatcccccctgggagtctgagggaagaccctctcggggaggcacagcctcaaatctag

SEQ ID NO: 28405 - DNA, 1641 bp, synthetic construct
  source 1..1641: mol_type = other DNA; note = Synthetic coding sequence
atgggtgcatatctgtcacagccgaatactgtgaagtgctctggggacggcgtgggagcccctcgactgcccttgccctatggcttcagcgcaatgcagggctggcgcgtgtccatggaggacgcccacaattgcataccggaactggattccgaaacagctatgttctcggtgtacgatgggcacgggggagaggaagtggctctttactgtgccaagtacctgccagacataatcaaagaccaaaaagcttataaggagggcaaactgcaaaaagccctggaagatgccttcctggccattgacgctaaattgactaccgaagaagtcatcaaagaattagctcaaattgccggacgtcccaccgaggacgaagatgaaaaggagaaagttgccgacgaggacgacgtcgataatgaagaggccgcactgctgcatgaagaggctaccatgacgatcgaagagctgctgacgaggtatggacagaattgccataagggacctccccattcgaaatctggcggaggcactggggaggagcccggatcacagggcctgaatggtgaggctggaccagaggattcaactagagagacgccaagtcaggagaacggacccactgcaaaggcctacacgggtttttcctctaacagcgaaaggggcacggaggctgggcaggtgggcgaacccggtatccctaccggtgaggctggaccgtcctgctcctctgctagtgataaattgccccgagttgctaagagcaagttttttgaagatagcgaagatgaaagtgacgaagccgaagaggaggaggaagacagtgaagagtgctcagaggaggaagatggctattcttccgaggaggcggaaaacgaagaggacgaagacgacaccgaggaagctgaggaggatgacgaggaggaagaggaagagatgatggtgcctggcatggagggtaaagaagaacccggatcggactcaggcacaacggctgtggtggctctgattaggggcaaacagctcattgtcgcgaatgccggtgactcccgatgtgtggttagcgaggctggcaaagctctcgatatgagctacgaccacaagccagaggatgaagtggaactggccaggattaagaacgcagggggaaaagtgactatggatggacgggttaacggaggtctcaatctgtccagggcgatcggggatcacttctacaaacggaataagaatctgccacctgaggagcagatgattagtgctttacccgacataaaagtccttaccttaaccgacgatcacgaatttatggtgattgcctgtgatggtatttggaatgttatgagcagccaggaggtcgtagacttcatccagagtaagatttcccaaagggatgaaaacggtgaactcaggctgctgagtagtattgtcgaagaacttctcgatcagtgtctggctcccgatactagcggggatggaactggctgcgacaatatgacctgcatcataatctgttttaaaccaaggaacacagccgaacttcaacccgaatccgggaaacggaagctggaggaagtgctgagcaccgagggagccgaagagaacggcaactcagacaagaagaagaaagccaagagggattag

SEQ ID NO: 28406 - DNA, 3840 bp, synthetic construct
  source 1..3840: mol_type = other DNA; note = Synthetic coding sequence
atgttgcaggctctccaactgcggaccggcttcttttgtttccgagtcctggtggccttaagcccctgcgccctccacgactcaggacgcctgaccaccggctcatttaacgtggtgcgagacgaagaagaagaaataaaactggaaataaacatgttgaagaagtacagccatcaccgcaacattgctacctattacggggcattcatcaaaaagagcccccctggccacgatgaccagctctggctcgttatggaattttgcggcgctggttcaatcaccgacctggtgaagaataccaaggggaataccttgaaagaggactggatagcttatatttctagagaaatcctgcgtggcttagcccacctacacatacaccacgtgatccatagagacattaagggacaaaacgtgctcctgaccgaaaatgctgaggtaaaattggtcgactttggggtgagtgcccaactggaccgcactgtgggcagacgtaataccttcatcggcactccatactggatggccccagaagtgatcgcctgtgatgagaatccagatgccacctacgactacaggtcggacctgtggtcttgcggcatcacagcaatcgagatggccgaaggcgctccccctctgtgtgatatgcatccaatgagggccctgttccttattcccaggaatcctcccccacggctgaagtctaagaagtggtccaagaaattcttctctttcatcgaggggtgtctcgttaagaattatatgcagcgaccttctaccgagcagctgttaaagcacccattcattagagaccagcccaatgagaggcaggtgcggattcagctcaaagatcacatagacagaacccgaaagaagagaggggagaaagatgagaccgagtatgagtactccggcagtgaggaggaggaagaagaggtgcctgagcaggaaggagaaccttcctcaatcgtcaatgtgcctggtgaatccaccctgaggcgcgactttcttcgcttacagcaagaaaataaggaacgcagtgaagcattgcgtaggcagcagctcctgcaggagcaacagctcagagaacaggaggaatataaaagacagctcttggcagaaagacagaagagaattgaacaacagaaagagcagcgcagaaggctggaagaacagcagcgcagagaacgcgaagctcggaggcagcaagagcgtgagcagcgcaggagggagcaggaggaaaagcgcagactcgaggagctggaaagaagaagaaaagaggaggaggagaggcgacgtgctgaagaggagaagaggcgcgtggaacgagagcaggaatacattcggaggcagttggaagaagaacaacgccacttagaggtactgcagcagcagctcctgcaggaacaggcaatgttgctacacgaccaccggaggccgcacccccaacattctcaacaacctcctcctcctcagcaggagcgctcaaaacccagctttcatgcaccagagcccaaggcccactatgagcccgctgatagagcgcgtgaggtgcaatggtcgcatctggcctcactcaaaaacaatgtttcccccgtgagcaggtcacactcattctccgacccttcccccaaattcgcgcaccatcatctgcgcagccaagacccttgccctccgtccaggtccgaggttctgtcacaatcctctgacagtaagtcagaagccccagatccaacacagaaagcctggagtcgttctgactccgatgaggttcctcctagggtgccggttcgaactacttcacgcagtcccgttctgtcacggagggatagccctttgcagggctcaggacagcagaattctcaggctggccagcggaactctaccagctctattgagcccagactcctgtgggagcgggtcgagaagttggtgccacgtcccggatctggatcttcaagcggctcctcaaatagcggctcacagccaggcagccatcccggatcacagagcgggtcaggagaacgattccgtgtgaggtccagctccaagtctgaggggtcccctagccagcgccttgaaaacgccgtcaagaaaccagaggataagaaagaggtgttcagaccccttaaaccagcggtgcgaatagacctgaccgccctggccaaggaactgcgagccgtggaggacgttcggcctccgcacaaagtgactgactactcctcttctagcgaggaaagcgggactactgatgaagaagacgacgacgtggagcaggagggcgctgacgagagcacatctgggcctgaggacactagagcagcctcctcgcttaatctctccaatggagagactgaatccgtcaagactatgatcgttcatgacgatgtggagtctgaaccagccatgactccctccaaggaaggtaccttgatagtccgtcagtccacagtcgatcagaagagagcatcgcaccacgagagcaacggcttcgctgggaggattcacctgttgcccgacctgctgcagcagtcccatagctcatctacctcttctaccagttcatctccgtcttcatcccagcccaccccaacaatgagcccgcaaacacctcaggataaattgacggctaacgaaacccaatccgcttcaagtactctgcagaaacataagagctcatcgtccttcacgccattcatagaccctcgcctgttgcagatctctccatccagtggcaccaccgtaacatctgtagtgggcttcagctgtgatggaatgagacccgaggctatccggcaggatcctacccgtaaaggcagcgtcgtgaatgtgaatcctaccaatactcggcctcaatctgatacccctgagatacgtaaatacaaaaaaagatttaacagtgagatcctgtgcgcggcactgtggggcgtgaacttattggtgggtactgagtcagggttgatgctgctcgacagaagtggtcagggaaaggtttacccactgataaaccggagacgctttcagcagatggacgttcttgagggacttaacgtgctggtgactatctcaggcaagaaagacaagctgcgggtctattacctctcctggcttcgcaataagattcttcataacgatcccgaagttgagaaaaagcagggatggaccactgtcggagacctcgaaggatgcgtgcattacaaagtggtgaaatacgagcgcatcaagttcctggtgattgccctgaagtcatctgtggaggtgtacgcctgggccccaaaaccctatcacaagtttatggccttcaaatcattcggcgaactggttcacaagcccttattagtggatctgacagttgaggagggccagcgtcttaaagtcatatacggctcatgcgctggatttcacgcggtggatgtggacagtgggtcagtgtatgatatttatcttcccacacatattcaatgctctattaaaccccacgccattatcatcctgcccaacaccgacggaatggagctgcttgtgtgctatgaggatgaaggcgtgtatgttaatacttacggcaggatcactaaagacgtggtgttgcagtggggcgaaatgccaactagcgtcgcgtacataagatcaaaccagacgatggggtggggtgaaaaggccattgaaattcggagcgttgagacgggccatctagacggcgtgtttatgcacaagcgtgcccagcgcctcaaattcctctgcgaaaggaatgataaagtatttttcgctagcgtgcgttctggaggcagctctcaggtgtatttcatgactctgggtaggacgtcactactgtcttggtag

SEQ ID NO: 28407 - DNA, 1989 bp, synthetic construct
  source 1..1989: mol_type = other DNA; note = Synthetic coding sequence
atggcctcatgtcccgactctgataactcctgggtcctggctggatctgagagtctacccgttgagacactggggcctgcttcgagaatggaccccgagtccgagcgagcactccaggccccacatagccctagcaaaaccgatggcaaagaactggccggaactatggacggtgagggcactttgtttcagaccgaaagcccccagagcggctccatactaaccgaggagacagaagtgaaaggcactctcgagggtgacgtgtgcggcgtggagcccccaggccctggcgacacagtcgtgcaaggcgatttgcaagaaacgaccgtggtaaccgggctgggcccagatacacaggatctggagggacagagcccaccacagtccttaccgagtacacctaaggctgcctggatccgtgaagaaggacgctgtagctccagcgatgacgacacggatgttgatatggaaggcctccgtcgaaggcgtggaagggaggcaggtccccctcagcctatggtacctctggcagtggagaaccaggccggaggcgagggtgccggaggagagttaggcatctcattgaatatgtgtcttttaggcgctctcgtattactgggtctcggcgtgctattattcagtggcggtttgagcgaatctgaaacaggcccaatggaagaggtcgaaaggcaggtcctgcctgaccctgaagtgttggaagcagtgggcgataggcaagacggactgagggagcagctacaagccccagtgccacctgattccgtgccaagcctccagaacatggggctccttctggacaagctggctaaggaaaaccaggacatcaggctgttgcaggcacagctgcaggcacagaaagaagagctgcaatcccttatgcaccagcctaaaggcctggaggaagaaaacgcgcagctgagaggggctctgcaacagggcgaagcatttcagcgggcactcgagagcgagctacagcagctccgcgctagactccaggggctggaggctgattgcgtacgcggtcccgacggagtgtgtctgagcgggggaagagggccacagggcgataaagccatccgtgagcaaggcccacgtgaacaggagcctgaattatcttttctgaagcagaaagagcaactggaggccgaagcgcaagctttgcgacaggagctcgaacggcaacgccgtctgcttggttctgtgcagcaggacctcgaaagaagcttgcaagatgcttcgaggggagatccggctcacgcaggcctcgccgagcttgggcacaggctggcccagaagctccaggggctcgaaaattggggacaggatccaggcgtgtcggctaatgcttctaaagcttggcatcagaagagccactttcaaaatagcagggagtggtccggaaaggaaaagtggtgggacggtcagcgagatcgcaaggcagagcattggaagcacaaaaaggaagaatcggggagggaacggaagaagaactggggcggacaggaagaccgggagccagctggaagatggaaggagggccgtcctagggtggaggagagcggcagcaagaaagagggaaagcgccaggggccaaaagagccacctagaaagagcggaagttttcactccagtggtgaaaaacagaagcagcctcggtggcgagagggaacaaaagaactgccgttgtccccagccttttttggagaggacggaatcttccgccatgatagactacggtttcgcgatttcgttgacgcgctggaggatagcctcgaagaggtcgccgtacagcaaactggggatgacgatgaagttgatgattttgaagattttatcttttctcactttttcggcgacaaggcgctgaagaaaagatccggtaaaaaggataaacactcacagtccccccgagccgcaggcccacgcgaaggtcactcccattctcaccaccatcatcaccgaggatag

SEQ ID NO: 28408 - DNA, 2403 bp, synthetic construct
  source 1..2403: mol_type = other DNA; note = Synthetic coding sequence
atggtcgctccggtgctggagaccagccatgtcttttgctgcccgaatagggttcggggagtgctcaactggagctccggtcctagggggttgctggcctttggtacctcctgttcggtggtgctctacgatcccctgaaacgcgtggtagtaacaaacctcaatgggcatactgcccgtgtgaactgtatccaatggatttgtaagcaggatggctccccctctactgaactggtaagtggaggatctgacaatcaggtcatccactgggaaattgaagataaccaattgcttaaggctgtgcacctgcaaggccacgaaggccctgtgtatgccgtgcacgctgtgtaccagcgccgtacttccgatcctgcattatgcacactcattgtctccgccgcagccgatagcgctgtgaggttgtggtctaagaaaggaccggaagtacccattttagcctgcggtaatgatgattgcaggattcacatttttgctcaacagaacgaccagtttcagaaggtcctctcgttgtgtggacacgaagattggatcagaggcgtagagtgggccgcattcggacgagaccttttcctagccagttgttctcaggactgcctgatacgcatatggaaattgtatatcaaatctacctccctggaaacacaagacgatgataacatccgactgaaagaaaacacttttacaatcgagaacgagagcgttaaaattgcttttgccgtgacactggaaacagtactggctggacacgaaaactgggtgaacgccgtgcattggcagccagtcttctataaggacggcgtcctgcagcagcccgtgagactgcttagcgccagcatggataaaacaatgattctgtgggccccagatgaggaaagtggcgtgtggttggaacaggtgagggtcggtgaagttggcggaaacaccttggggttctatgattgtcaattcaatgaggacgggagcatgattattgctcatgcgttccatggtgccctgcatctctggaagcagaacaccgtcaatcccagggaatggaccccggaaatcgtgatttctggacactttgatggcgtgcaggaccttgtttgggatcctgagggtgagttcatcattacggtggggactgaccaaacaacacgcttgtttgctccttggaaaaggaaagaccagtcccaggtcacttggcacgaaattgccaggcctcagatccatggatacgatcttaagtgcctggcaatgattaaccggtttcagttcgtgagcggcgctgatgaaaaagtgctgcgagtgttttccgcccctcggaactttgtggagaacttctgcgccatcacgggacagagtctgaatcatgtactctgcaatcaggactccgaccttcccgagggcgcaaccgtacccgctctgggcttgtcaaataaggccgtgttccaaggcgacatagcttcacaaccaagcgacgaggaagaattattgacgtccaccgggttcgagtaccaacaagtcgccttccaacctagcatcttgaccgaacccccaacggaggatcatctccttcaaaatactctgtggcctgaggttcagaagttgtacggacacggctatgagattttctgtgtaacatgcaattccagtaaaaccctgctggccagtgcctgcaaggcggcaaaaaaagaacacgccgcaatcatactctggaacaccacctcttggaagcaagttcagaaccttgtattccattccttgacggtgactcagatggcctttagcccgaacgaaaaatttctgcttgctgtctctagagaccgtacctggagcttgtggaaaaagcaagacaccatttcgccagagttcgaaccggtattctccctgttcgccttcacaaataaaattacgagcgtgcatagccgcatcatctggagttgtgattggagccccgatagcaagtattttttcactggcagcagagataagaaagtggtcgtgtggggcgaatgcgactccactgacgactgtatcgagcataatatcgggccatgttcctccgtcctggacgtgggtggcgctgtgacagccgtgagtgtgtgcccagtgctgcacccctcccagagatatgtggtcgccgttggcctggaatgcgggaagatctgcctttatacctggaagaaaaccgaccaggtccccgaaattaatgattggacacattgcgttgagacctctcagtcccagagccacacgctggcaattagaaagttatgctggaagaattgctctggcaaaacagagcagaaagaagccgaaggagcagaatggttacacttcgcttcatgcggagaagatcatactgtgaaaatccatcgtgttaacaagtgcgcactctag

SEQ ID NO: 28409 - DNA, 561 bp, synthetic construct
  source 1..561: mol_type = other DNA; note = Synthetic coding sequence
atggccggagaaaactttgccacaccatttcacggtcacgttggcaggggtgcctttagtgatgtttatgaacccgcagaagatacattcctgttgctgaacgccttagaggcagctgctgccgagctagccggagtagagatctgcctggaggtgggatccggcagcggagtggtgtcagccttcctagcctccatgataggcccacaggccctgtatatgtgcaccgatatcaaccccgaagctgccgcatgcactttggagaccgcaagatgtaacaaggtgcacattcagcccgttattactgacctggtggggtcccatggaattgaagccgcatgggctggtggaaaaaacggcagagaagttatggataggttttttcccctggtcccggatcttctcagtcccaagggcctgttttacctggtcacaataaaggagaacaacccagaagagatcctcaaaattatgaagacaaagggactgcaaggcaccaccgccctctcgcggcaggctgggcaggagactttaagcgttctaaaatttaccaagtcatag

SEQ ID NO: 28410 - DNA, 2352 bp, synthetic construct
  source 1..2352: mol_type = other DNA; note = Synthetic coding sequence
atggcaaaatataatacagggggtaatcccacagaagacgtctccgtgaactcacgaccctttcgtgtaactggtccaaacagctcatccgggattcaggccaggaagaacctgttcaataaccaaggcaacgcctcacctcccgcaggaccgtccaacgtccctaagttcggaagtcccaagcctccagtagcagtgaaaccctccagcgaagaaaagcctgataaagagcctaagccgccatttctcaagccaacaggagctggccagaggtttggaacccccgcttcacttaccacgcgcgaccccgaggctaaagtgggcttcctaaagccagtgggacctaaaccaatcaatctccccaaggaggacagcaaacccaccttcccctggccccctggaaataaaccatctctccattctgtgaaccaagaccatgaccttaaacctctcggacccaagtcaggccctacgccacccacctccgagaatgagcaaaaacaggcattccccaaactgacgggtgtgaaaggaaaatttatgagcgccagccaagatctggagccgaagccacttttccctaagcccgcattcgggcagaagccgccattatccacggagaacagccatgaggacgagtcacccatgaagaatgtgtcttcgtcgaagggaagcccagcgccactgggagtccgctcaaaaagcggcccactgaaacccgcaagggaagattctgagaacaaggaccatgcgggagagatatcttccttaccgttcccaggcgtcgtactgaagcctgccgcttccaggggaggtcccggactgtccaagaatggcgaggagaagaaggaagaccggaagatagatgcggctaagaacacctttcaatcgaagatcaaccaggaggagctcgcttcaggaacgccacctgctcgcttccccaaggctccttctaagctgactgttggcggaccttgggggcagtcccaggagaaagaaaaaggcgataaaaactctgcgactccgaaacaaaagccactcccacctttgtttactctggggcctcctccacccaaacctaatcgaccccctaacgtggacctgacaaaattccacaagacttcttctggaaattctacttcaaaaggacaaaccagttacagtactacgtctctgccgcctccgccacccagccacccggcaagtcagccgcctctgcccgcatcccatccctcgcagccgccagtcccatctctgccaccccgaaacataaagcctccatttgacctgaagagtccagtgaatgaagataaccaggacggcgtcacccattcagacggcgcaggtaatctggacgaggagcaggactccgagggcgaaacctatgaggacatcgaggcttcaaaggaacgcgaaaagaaacgagagaaagaggaaaaaaaacgccttgaactggagaagaaggagcaaaaggagaaggaaaagaaagagcaagagatcaaaaagaaatttaagctgaccggcccaattcaggtgatccatctggcgaaggcatgttgcgacgtgaaggggggtaaaaacgaactctcatttaagcagggggaacagatcgagattatccgtattaccgacaacccggaaggcaagtggctgggacgaaccgctagaggctcctatggttatatcaagacaacagccgtggaaattgattacgattcactgaaactcaaaaaagacagtctgggagcgccaagtcggcctatcgaggatgaccaggaagtgtacgatgatgtcgctgagcaggatgatatttcttctcatagccaatccggctctggcggaatcttcccaccacctcctgacgacgatatatacgatgggattgaggaggaggacgctgacgacggattcccagcaccgcctaagcaactcgacatgggtgacgaggtatatgatgacgttgacacatccgattttccggtgtctagtgctgagatgtcgcaagggaccaatgttggcaaagccaaaacggaagagaaggacctgaagaagctgaaaaagcaggaaaaggaggagaaggactttcgcaagaagttcaagtatgatggggagatccgtgttctgtattccaccaaggtcaccacttctataacttcgaagaagtgggggacacgtgatttgcaagtgaaacccggagagagcctagaggtcatccaaaccaccgacgacacgaaggtgctgtgcaggaatgaagagggaaagtacggctacgttctgcgaagttaccttgcagataacgatggcgagatttacgacgatatcgcagacggctgcatttacgataacgactag

SEQ ID NO: 28411 - DNA, 1722 bp, synthetic construct
  source 1..1722: mol_type = other DNA; note = Synthetic coding sequence
atgattcctccccaagaagccagcgccagacgtagggagatcgaggataagctgaaacaagaggaggaaaccctgtccttcattcgggactctctggaaaaatctgaccagctgacaaaaaatatggtatctattctttcctcttttgagtccaggcttatgaagttggagaactccatcatccccgttcataaacagacagagaacctccagcggttgcaggaaaacgttgaaaaaactctgagctgccttgaccatgtgattagctactaccacgtgatcagtggcgatgatgatctcgaagcacaggaggatgtaacactggaacacctcccggagtctgttttgcaggacgtgatcaggattagcaggtggttagttgagtatggcaggaaccaggatttcatgaatgtttactaccaaattagatcgtcccagcttgataggagtattaagggcttgaaggagcatttccacaagtcctcgtcctccagtggcgtaccttactcccccgctatacctaataagcgcaaggacactcccacgaaaaagcccgtcaaacgcccaggaagggatgacatgctggacgtggaaacagatgcctatatccattgcgtttccgcatttgtgaaactggctcaaagtgaatatcagctgctggctgatatcatccccgagcaccatcagaagaagacctttgacagcttaatacaggacgcactggatggactcatgctcgagggagaaaacatcgtgtccgcagccagaaaggctatcgtgcggcatgacttcagtacagtgctcactgtgtttcccattcttcgccaccttaagcagactaagccggagttcgaccaagtcctccaaggcaccgccgctagcacaaaaaataaattaccgggtctaattacgtccatggagaccattggtgcgaaagctctcgaggattttgctgataatattaagaatgatccagataaagaatacaatatgccaaaggatggcaccgtacacgagctgacaagcaacgccattctgtttctacagcagcttctcgactttcaggagacagctggggctatgctggcatcacaggagacatcatccagcgccacaagctactcctcagaattctccaagagactcttgagcacatatatctgtaaagtgttggggaacttgcagttaaacttgctctctaagagcaaagtttatgaagatccagcactctctgccatcttcctccacaacaattacaattatatcctgaagtcgctggaaaaaagcgagctcatccagttagttgcagtgacacagaagaccgccgagagatcttaccgggaacatatcgagcagcaaatacagacctatcaacgatcgtggttgaaagtgactgactatatcgctgagaagaatctcccagtatttcagcccggagtcaaactgcgggataaagagaggcagattattaaagaacgcttcaaagggttcaatgatggccttgaggagctgtgtaaaatccagaaggcgtgggccatacctgataccgagcagcgcgataggattcggcaggctcagaagacaatcgtgaaagaaacatacggagcgttcttgcagaagttcgggtccgtacccttcactaaaaaccccgaaaagtacattaaatatggggttgagcaagtgggtgacatgatcgacagactttttgacacatccgcctag

SEQ ID NO: 28412 - DNA, 2475 bp, synthetic construct
  source 1..2475: mol_type = other DNA; note = Synthetic coding sequence
atgatgcagaacgtccatctggctcccgaaacagacgaagatgacctgtacagcggctacaacgactacaatcctatttatgatatagaggagctggaaaacgacgccgcatttcagcaggccgtcagaacatcccatggccgacggcctccaatcactgctaaaatctcctccacagctgtaacacgacctatcgctactgggtatggatcgaaaacctcactggcctcttccatcggcaggccgatgactggtgccatacaggacggggtaacacgacctatgaccgccgtccgcgcagccggattcacaaaagctgccctgagagggtctgccttcgatcctctaagccaaagcagaggccctgcctctcctctggaggccaagaagaaggactcccctgaagaaaagatcaaacaacttgaaaaagaggtgaacgagctagtggaagagagctgtatcgctaattcatgtggagacttgaagctcgctttggaaaaagcaaaagatgccggacgcaaagaacgggtgctggtgcggcagcgggagcaggtgacgactccagagaacattaacctggatctgacctatagtgtgctgttcaacctcgcctcccagtactctgttaatgagatgtacgctgaagctctgaatacttaccaggtcattgtcaaaaacaagatgtttagcaacgcaggaatactgaagatgaatatggggaacatatatctgaaacagagaaattacagcaaggctatcaagttttatagaatggctctggatcaggtcccatccgttaacaagcagatgcggattaaaatcatgcagaacattggagttactttcatacaagccggacaatatagcgacgctattaactcatatgaacacataatgagcatggcccctaatctgaaggcgggttacaatctgacaatctgttattttgcgatcggggacagagagaagatgaagaaagcttttcaaaagctcatcactgtaccactggaaatcgatgaagataaatatatctccccatcggacgacccacatactaatctggtcaccgaggcgatcaagaatgaccatttgcggcagatggaacgggaacggaaagcaatggcggaaaaatatataatgacatcagccaagctcattgcaccagtgatcgagacttccttcgcagccggatacgattggtgtgtggaagtggtgaaggcttctcagtatgtggaactggctaacgatctggaaatcaataaagccgtcacctatttaagacagaaggactataatcaggccgtggagatactgaaggtgctagagaagaaggactcccgggttaagtctgcagctgccacaaacttatctgctctgtactatatgggaaaggactttgcacaggccagcagctacgctgatattgcagtcaatagcgataggtacaaccctgctgccttgacaaacaaggggaacacggtgtttgctaacggagattatgagaaagccgcagaattttacaaagaagctctgcgcaatgactcatcatgcaccgaggcactatacaacatcggtctcacatatgaaaagcttaatcggctggacgaagccctggattgctttctaaaattacatgccatattaagaaatagcgctgaggtgctctaccaaattgctaatatatacgaactaatggaaaatccaagtcaagcaatcgagtggctgatgcaggtggtgtctgttatccccacggacccccaggtgctgagtaagctgggggagctgtatgatagagaaggtgacaaaagtcaggcctttcagtattattacgaatcctaccggtacttcccatgcaacatcgaggtgattgagtggctcggcgcatactacatcgacactcagttttgggaaaaagccatccagtattttgaacgcgcttcgctgattcagcctacccaggtgaagtggcagcttatggtcgcctcttgtttccggcgatctggcaattatcagaaagccctggacacatacaaggacacgcataggaaatttccagagaatgtggagtgtttgcgattcctcgtaaggctgtgcaccgatctgggactaaaagatgcccaggagtacgctaggaaattgaagaggctggagaaaatgaaggagatccgggagcagcgcatcaaatctggcagggacggatccggagggtcacgcggtaaaagagagggcagtgcctccggagactctggccagaactactccgcctcaagtaaaggcgaaagactgtccgctaggctgcgagctctccccggaactaacgaaccctacgagagttcttcaaataaagaaatcgatgcatcgtacgtcgatcctctgggccctcagatcgaacgacctaagacagccgcaaagaaaagaatcgatgaagacgactttgctgacgaggagctgggcgacgacctcctgcctgaatag

SEQ ID NO: 28413 - DNA, 2850 bp, synthetic construct
  source 1..2850: mol_type = other DNA; note = Synthetic coding sequence
atgcttaggacagccggtagggatggtttgtgccggctgtcaacgtacctcgaggaactcgaagcggtggagctgaagaaatttaaactgtacctgggaacggccaccgagcttggtgagggcaagattccctggggctccatggagaaagccggtcctctggagatggctcagttgcttatcacccacttcggccctgaagaggcctggcgcctggcgctgtcaacatttgagcgcatcaaccgcaaggacctttgggagcggggacaacgggaagacctggtgcgtgacacaccccctgggggaccctcatctttggggaatcaatccacctgtctcctcgaagtttcactagtcacaccacgcaaagatccacaggagacctatagggattacgtgcgccgtaagttccgcttgatggaggaccggaacgcccgactcggggagtgcgtaaacctctcccacaggtacacacgcctgttactcgtcaaagagcattctaatccaatgcaggtgcaacaacagttgctagatacgggccgaggccacgctaggacagttggccaccaagcgtccccaatcaagatagaaacactgttcgagcctgatgaggaacgccctgagcccccacggactgtggtgatgcagggtgccgctgggatcggaaagtccatgctagcgcacaaagtcatgctggattgggctgacggaaagctgttccagggcaggtttgactatttattctacataaactgcagggagatgaaccaatccgccaccgagtgctccatgcaggatcttatctttagctgctggccagaacccagcgcccctctgcaggaactgatcagagtgcccgagcgactattatttatcattgacggcttcgacgaactcaagccaagctttcacgaccctcagggcccttggtgtctgtgctgggaggagaagcgtcccaccgagcttttactgaattcccttatcagaaagaagcttcttccagagctgtcactattgattaccacgagacccacagccttagaaaaactgcaccggctgctcgaacacccacgacatgtggagatcctgggtttctccgaagcagaaaggaaagagtatttttataagtattttcataatgctgagcaggcaggtcaagtttttaactacgtccgcgacaatgaacctctgtttactatgtgttttgttccactagtgtgttgggttgtctgtacttgtctgcagcagcaactcgagggcggaggcctcttgagacagaccagccgaaccaccacggcagtctatatgctgtacctactgagcctgatgcagccaaagccaggcgcaccacgattgcagccaccgcctaaccagcggggtctgtgtagtcttgctgcggacgggctatggaatcagaagattttgtttgaagaacaggacctccggaaacatggcctggatggagaggatgtgtctgctttcctcaatatgaacatcttccaaaaggacattaattgtgaaaggtactattccttcatccatctttccttccaggaattttttgctgccatgtactacatcctggacgagggtgaaggaggcgcaggccctgatcaggatgtgacccggctgctcaccgagtatgcgttctccgagcgcagcttcttggccctgacaagcagattcttgtttgggctgctgaacgaagagacaagatcccacctggagaagtccttgtgttggaaggtgagcccccacatcaagatggatctgttgcagtggattcagagtaaagcacagtctgacggtagtacgcttcagcaaggctccttagaatttttttcctgcctctatgaaatccaggaggaggagttcatccaacaggcactctctcatttccaggttatagtggtgtctaatatagcttcgaagatggaacacatggtctcctccttttgtctgaaaagatgtcggtctgcccaggtgctccatctgtacggtgccacatacagtgcggatggtgaggacagagctcgctgttctgctggagcgcatacacttcttgtgcagctgccggagaggaccgtgctgctggatgcatattcagagcatctggccgcagcactgtgcacgaaccccaatttgattgaactctcgctgtaccgaaatgcattaggtagcagaggagtgaagttgctgtgtcaaggccttcgtcatccaaattgtaagctgcaaaacctccgattgaaacgctgtcggataagctcctcagcctgtgaggatttgagcgcggctctgatagcaaacaaaaatcttactcgaatggatcttagcggaaatggggtgggcttccctggcatgatgttattatgcgagggactccggcacccccagtgcaggctccagatgattcagttgagaaagtgccagctcgaatcaggggcttgccaggagatggcttccgtcttgggtaccaacccacacctggtggagttggaccttaccgggaatgccttagaggacctcggactgaggctgctgtgccagggcctgaggcatcctgtttgccggctgagaacactctggttgcagctagattcatgtggtctgaccgccaaagcttgcgaaaatctgtatttcaccctgggaattaaccaaacattgaccgacttatatctcacaaataacgccctcggggatacaggagttaggttgctgtgtaaacgcttgagccatcctggttgtaagctgcgggtgctttggctgtttggcatggatcttaacaaaatgacccactcccggctcgccgctctcagagtgaccaagccctatctcgacattggctgttag

SEQ ID NO: 28414 - DNA, 5795 bp, synthetic construct
  source 1..5795: mol_type = other DNA; note = Synthetic coding sequence
atggctgccagaagtgcgccaagttgtcacctccggctggagtgggtatacggctacagaggccaccagtgtcggaacaatctctattacaccgccgcaaaggaaattgtatatttcgtggctggtgtgggtgtggtctactcccctagggagcacagacaaaaattttatagaggccactcagacgacatcataagcctggccttgcatccggagagagtgctcgttgcaaccggacaggtcggaaaagaaccctatatctgcatctgggactcatatacggtgcagacaatttccgtgttgaaggacgtccatacccatgggattgcttgcctggcctttgaccttgacggccagaggctggtcagcgtgggcctcgattccaagaatgccgtgtgcgtgtgggattggaagcgcggaaagatgctgtccatggccccaggccataccgatagaatatttgatatctcctgggatttgtatcagcctaataagctggtctcctgcggagttaagcacatcaagttctggtcgctgtgcggaaacgcactaaccccaaaaaggggagtctttggcaagacgggcgacctgcagaccattctctgcctggcatgcgccagggacgaacttacgtacagtggcgctctcaacggagacatttatgtgtggaagggcataaacctcatacggacaatacagggagcacatgcagctggaatcttttctatgaacgcttgcgaggaggggtttgccacaggtggcagggacggatgcattcggctgtgggacctcacatttaagcctatcactgttatcgacctgcgggagactgaccaggggtacaaagggctctctgttcgctccgtttgctggaggggggaccacatcttggtcggcacacaggatagcgaaatatttgagatcgtggtgcaggagcgcaataagccatttctgatcatgcagggtcactgcgagggtgagctgtgggccctcgctgttcaccccaccaagccgctcgccgtgactgggtccgacgaccgcagtgtccggatctggagcctggtggaccacgcgctgatcgcccgatgcaatatggaagagcctataagatgcgccgctgtgaacgctgacggaattcatctggcactcggaatgaaggatggctcttttacagtgctgcgggtgagggacatgaccgaagttgttcatattaaagaccgaaaggaggccattcacgagctgaagtatagcccagacggaacctacctggctgtgggatgtaatgatagttccgtggatatctatggcgtggctcagcggtacaaaaaagtgggtgagtgccttgggtcactcagtttcattacccatcttgattggtcatccgatagcaggtacttgcaaacgaacgatggtaatggcaagagacttttttaccggatgcccggtgggaaggaggtcactagtacggaggagatcaagggagtgcattgggcctcttggacttgtgttagcgggctcgaagtgaacggcatctggcccaaatatagtgacatcaacgacataaattctgttgacggaaactacataggccaggtccttgttactgcggacgattacgggattataaagctgtttagatatccttgcctgaggaaaggagccaagttcaggaagtacatcgggcacagcgcgcacgtcaccaatgtgcggtggtctcacgattaccagtgggttatctctatcgggggagccgatcacagcgtctttcagtggaagtttattcctgagaggaaactgaaggatgccgttcacattgccccacaggaaagcttggctgacagccattctgatgagagcgactccgaccttagcgacgttcccgagctcgatagcgaaattgagcaggagactcagctcacctacaggcgacaggtttataaggaagacctgcctcaactgaaagagcaatgcaaggagaaacagaagtcagcgaccagtaaacgaagagagagagccccaggaaattcgatccgactgcacttcgtacacggataccgtggatatgactgtcgttcaaacctgttctatacacagattggcgaaatcgtgtaccatgtggccgcagttggcgtgatttataaccgacaacagaatacccagcgcttctacctgggtcacgacgacgatatcctgtgcctgactatccatcctcttaaggattatgtggccacagggcaggtgggacgagacccttctattcatatctgggatacggagaccattaagcctttgagtatcctgaaagggcaccaccagtatggcgtcagcgcagttgattttagcgctgatgggaaaaggcttgcaagtgtgggaatcgatgactctcacacagtggtcctgtgggattggaaaaaaggagagaagctgtctattgcaagaggaagcaaagacaagatctttgtcgtgaagatgaacccttacgtgccagacaagctcatcacagcagggattaaacatatgaagttctggaggaaagccggagacgtttgtatctggagggatattttcttggtaaaaactgtgaaagcccacgatggcccagttttctctatgcatgccttggaaaaaggtttcgttaccggaggaaaagatggcatcgttgctctgtgggatgatagtttcgagcgttgtttaaagacatatgcaatcaagagagcagccctcgccccagggtctaagggcctgctgctggaggataacccaagcattcgcgctatctccctgggacacggccatattctggtcggaactaaaaatggggagatcctagaagtggacaaaagcggtcctattacactgctcgtgcagggccacatggagggagaggtgtggggtctggccactcacccttatttaccaatttgtgccactgtttccgatgataagaccttgcgtatctgggacctctcaccctcccactgtatgctagctgtacgcaagctgaaaaagggtggaaggtgttgctgtttctcgcccgacgggaaggctctggctgtcggtttgaatgacggtagtttcctcatggcaaatgctgacacactagaggaccttgtttcattccaccacagaaaggacatgatttccgacatccgattctctcccggatccgggaaataccttgcagtggcaagtcacgactcgtttatagatatttacaacgtgatgagttcaaaaagagtcgggatctgtaagggcgcaacgagctatatcacgcacatcgactgggacatccgcggaaaattattgcaagttaacactggagctaaagaacaattgttcttcgaagcgcctagagggaagaagcaaaccatcccatccgtggaagtggaaaaaattgcgtgggcctcttggactagcgtactgggtttgtgctgcgaggggatctggccagtcattggggaagtgaccgacgtcactgcgtcttgtcttacctcggacaagatggtgttagccacaggcgatgacttagggttcgtgaagctgttccgatatccaacaaaaggaaaatttggcaaattcaagcggtacgtggctcacagcactcacgtaaccaacgtgagatggacatacgacgattctatgcttgtcaccctcggcggtacagacatgagtctgatggtttggaccaacgaaatggagggctacagggagaagcgtccatgtgatagcgaagaatcagatatagacagcgaagaagacgggggttacgacagcgatgtgacccgagagaatgagatcagttacactatcagagctttatctacaaatattcgcccaatgcttggtattaagcctcatttacagcaaaaagagccctctattgacgaaaggcctcctgtttccagagccccacctcaacctgagaagcttcagactaacaacgtcggaaaaaaaaaacgacccatcgaggaccttgtactcgaattgattttcggctacagaggccgagattgtcgcaataacgtacactatttgaacgatggcgatgacataatctaccacaccgcaagcgttgggattctgcacaatgtggcgaccggatcccagtccttctatcaggaacataatgacgatattctgtgcctcacagtcaaccagcatccgaagtttatcaatatagtggcaaccggccaggttgtactgtcctgctctttgcttactactgccccaagcatccacatatgggatgcaatgaacaagcaaaccctgtctattctgaggtgctaccatagcaagggagtgtgttctgtgtcgttcagtgcgacaggaaaactgctactttcagtggggcttgatccagagcatacaataacaatctggcggtggcaggagggagccaaaatcgcctcccgggcaggccacaaccaaaggatttttgtggcagagttcagacccgattctgacacccagttcgtgtccgtcggagttaagcatgttaaattctggaccctggccggtcgtgccctgcttagcaagaagggcctcctgtccactctggaggatgccagaatgcaaactatgctggcaattgcattcggcgcaaacaacctaactttcaccggaaccataagcggagatgtctgcgtgtggaaggaccacattttatgcaggatcgtggctcgtgcccataatgggccagtctttgcaatgtatacaacgctccgcgacggtctgattgttactgggggtaaagagaggccaagcaaggaaggcggtgccgtcaaattatgggaccaggaactgcgtcggtgccgcgcttttagattagagactgggcaggccaccgactgcgttcggtccgtctgtagggggaagggtaagatcctcgtcgggacacggaacgccgagatcatcgaggtcggagagaagaacgcagcatgcaacatcttggtcaacggtcacgtggacggcccaatttgggggctcgcaacccaccccagccgcgacttttttctgagcgctgccgaggacggaaccgtcagactgtgggatatcgcagacaagaaaatgctgaacaaggtgaatttgggacacgccgcacggacggtgtgctacagccccgagggcgatatggttgctatcggcatgaagaatggggagtttatcattttgctagtctctagtttgaaaatatgggggaagaagcgagacaggcggtgtgcgattcacgatatccgtttctcacccgacagtcgctatttggccgtaggcagcagtgagaattcagttgatttttatgatcttaccttaggtcctactcttaaccggatcagctactgtaaggacatcccctcattcgtgatccagatggacttttcagccgactcctcctacctgcaagttagctctgggtgctacaagcgtcacgtctatgaggtcccatctggaaagcatctaatggatcatgcagccatagacagaatcacatgggcgacttggactagtatcctgggcgacgaggttctgggtatatggagccgccacgctgagaaagctgacgtcaattgtgcctgcgtgagccattcagggatctctctggtcacaggagacgacttcggaatggtgaagttattcgacttcccgtgtccagagaaattcgctaagcacaaaagatttttagggcacagcccccacgtgactaatattaggttcacctctggcgacagacacgtggtgagtgccggtggcgacgattgttcgctgttcgtgtggaagtgtgtccacacgccacacta

SEQ ID NO: 28415 - DNA, 429 bp, synthetic construct
  source 1..429: mol_type = other DNA; note = Synthetic coding sequence
atgtcaatttctagtgatgaagttaactttctggtttatagatacctgcaggaatccggatttagccactctgcctttacgttcggcatcgaatcccatatctctcagtcgaacatcaacggtgccctcgttccgcctgcagcactaatctcgataatccagaaaggcctccagtacgttgaggcggaggtgtcaatcaacgaggacggcacactattcgatgggagacccatagagagcctatctctcatagacgccgtgatgccagacgtggtgcaaaccagacagcaggcctaccgtgacaagcttgcgcagcagcaggctgcagctgctgccgcagcagccgcagccgcatctcagcagggcagtgctaagaacggggagaacaccgctaacggggaagagaatggagcacacactatcgcctag

SEQ ID NO: 28416 - DNA, 1704 bp, synthetic construct
  source 1..1704: mol_type = other DNA; note = Synthetic coding sequence
atggagtttttcaccatgccaccaagaacctggtttatgcggcaactgcaaaggatgtggttcctccgcccaagtatggccataatggtgtttagaatgatagaagaacggccaacacatgctatcaccgtacgcgtgtcttacctggagatctataatgaatctctgttcgatctcttaagcaccttaccgtatgtggggccatcggtaacccctatgacaatagtggaaaatccccaaggcgtgttcataaaggggctctccgtccacctgacatcccaggaggaagacgcatttagcctgctcttcgagggagagactaacagaatcatcgcctcccataccatgaacaagaactctagccgctcccactgcatcttcacaatatacctcgaagcccattcacggacattgtccgaagaaaaatacattactagtaaaattaacctcgtggatctggccggtagcgaaagattaggaaaaagtggctctgaagggcaggtcctcaaggaagcaacatacatcaataaatccctatcttttctcgagcaggcaatcatcgctctgggtgaccagaaacgggaccacattccattcagacagtgtaagctgactcacgctctgaaagactccctgggcggtaactgcaacatggtgctagtgaccaatatttatggagaagccgcacagctggaggagacactgtctagtctccgctttgcgagccgcatgaagttagttactactgagccagccattaacgaaaagtacgacgcggaacggatggtgaaaaacttggagaaagagctcgctctcctgaagcaggaacttgctatacatgactcactgaccaatcgaacctttgtcacctatgaccctatggacgagatccagattgctgagataaatagtcaggttaggagatatctcgagggcacactggatgagatcgacatcatcagcctgagacagatcaaggaagtctttaaccagttcagagtcgtcctgtcacagcaggaacaggaggtggaatcaacgctccgcaggaaatataccttgatcgatcggaatgatttcgctgccatctcagcaatacaaaaggccggtctagttgacgtcgatggacatcttgtaggcgaacctgaggggcagaacttcggactgggcgtagcgccattctctacaaagccaggcaaaaaagccaaaagtaagaagaccttcaaggagcccctgcggccagacaccccacccagcaagccagtggccttcgaggagttcaaaaacgagcagggcagcgagattaaccggatctttaaggagaacaagtccattctgaacgaaaggcgaaagagggccagcgagaccacccagcacataaatgcgattaagagagaaattgatgtgactaaagaggcgttaaactttcagaagagcctcagggagaaacagggaaaatatgagaataagggcttgatgataattgatgaggaagaattcttgctgattttgaaattaaaagaccttaagaagcagtatagaagcgagtatcaagaccttcgagatctgagggctgaaatccagtactgtcaacacctcgtagaccagtgtcgtcatcggctactgatgggcgctactgttggaaaaaacctgacctccggtacgatgtctcccctgtctagccttaggacatgccgatggcactag

SEQ ID NO: 28417 - DNA, 1428 bp, synthetic construct
  source 1..1428: mol_type = other DNA; note = Synthetic coding sequence
atggccgaaggctcggtgatgttcagcgatgtgagcattgatttctcccaggaagagtgggattgcctggatccagtccagagagacctttacagagatgtgatgttggaaaattacggaaaccttgtctcgatgggactttacacccctaaaccacaagtgatttctttgctagagcagggtaaggaaccgtggatggtcggcagggaacttactcgaggtctttgctcggatttggagagcatgtgtgagactaagttgctaagccttaaaaaagaggtgtatgagatcgagttgtgccaaagagagatcatggggcttaccaagcatggtctggaatattcatccttcggtgacgtgctggagtaccgcagccatctggctaagcagcttggctaccccaatgggcatttcagtcaggaaatcttcacccctgaatatatgccgactttcattcagcagacgttcctgaccctgcaccaaataatcaacaacgaagataggccctacgagtgcaaaaagtgtggcaaggctttctcccagaactcccaattcattcaacatcagagaattcatattggggaaaagtcatacgaatgcaaagaatgcgggaaatttttcagttgcggaagtcacgtaaccaggcatttaaaaattcacactggcgagaaaccattcgagtgcaaggagtgtggcaaggctttctcttgttcgtcctacctgtcacaacatcagcgcattcatactggcaaaaaaccatacgagtgtaaggaatgcggaaaagccttttcatattgctcaaacctcatcgaccaccaacggattcatactggcgagaaaccatatgagtgcaaggtatgcggtaaagccttcactaaatcctcgcaactcttccagcacgccagaattcacactggcgagaagccatatgagtgcaaagagtgcggcaaagccttcactcaatcttccaaattagtccagcaccagagaatccacacaggggaaaaaccatacgagtgcaaggaatgcgggaaagctttcagttcagggagcgccttgaccaatcaccagcgcattcatacaggggagaaaccgtacgactgcaaagagtgcggcaaagctttcacacagagttcacagctgcgccagcatcagaggattcatgccggtgagaagcctttcgaatgcctagagtgtggcaaagcattcacacagaattcacagttgttccagcaccaacgaatacacactgatgaaaagccttatgagtgcaacgagtgcgggaaggcattcaacaagtgcagcaacctgacgcgacaccttcggattcacacaggggaaaaaccttataactgcaaggaatgtggtaaggctttctcctcaggatccgatctgattcggcatcagggaattcacaccaacaagtag

SEQ ID NO: 28418 - DNA, 462 bp, synthetic construct
  source 1..462: mol_type = other DNA; note = Synthetic coding sequence
atggcaaggaatacattgtcctcaaggttcaggagggtggatattgatgagttcgacgagaacaagttcgtcgacgagcaggaagaggcggcagccgctgcggcagagccagggcctgacccttctgaggtcgatgggctgttgcgccagggagatatgctccgggcttttcatgccgctttacgcaatagcccagtgaacaccaagaatcaggcagttaaggagcgtgcgcagggagtggtgctaaaggtcctcactaatttcaagtcttctgagattgagcaggccgtgcaatctctcgatcgtaatggcgtggacttgctgatgaaatacatctataaggggttcgagaagccaactgaaaactcaagcgctgtgctgttacagtggcatgagaaagccctagcggtcggcggactagggtccattatacgggtcctcacagcccgaaaaaccgtctag

SEQ ID NO: 28419 - DNA, 2616 bp, synthetic construct
  source 1..2616: mol_type = other DNA; note = Synthetic coding sequence
atgggagagggaggtctgcctcccgcatttcagttgctcctacgtgcgtgcgaccagggggatacagagactgcgcgtcgcctacttgagccaggggcagccgaaccagccgaaaggggggcagagcccgaagctggcgcagagccggcaggcgcagaagttgcgggtcccggagccgctgccgctggggcagtgggcgcaccggtgcccgtggactgttcggacgaggccggtaacaccgcgttacagttcgcggcagccggaggacatgagccgctggtgcgtttcctgctgagaaggggggcatctgtgaattcaagaaatcattatgggtggtcagctctgatgcaggcagccagattcgggcacgtctcagtcgcccacctcctcctggatcacggagcagacgtaaacgctcaaaatcggctgggggcttctgtactaactgtcgcctcccgtggcggtcaccttggcgtggttaaattgttgttggaagctggggcatttgtggaccaccaccatccttccggggagcagctggggctggggggatcacgcgacgaaccgctggacatcacagccctgatggccgctatacagcacggacatgaagcagttgtgaggttactgatggagtggggcgctgatccaaatcatgcagcgcgaacagtcgggtggagccctttgatgctggccgctctgaccgggagattgggcgtggctcaacagctggttgagaagggcgctaaccccgatcatctgagtgtgctggagaaaacagcttttgaggtggctttagattgtaaacacagagacttggtcgattatctggaccctttaacaacagtgcggccaaagaccgacgaagaaaagcgcagacctgacatcttccatgccctaaaaatgggaaacttccaactcgtcaaagagatcgcagacgaagacccgtcacatgtcaacctggtgaatggcgatggcgcaaccccactcatgttggctgccgtgaccggacagttagcattagtccagctactcgtcgagcggcatgctgacgtcgataagcaggattcagtacacggctggaccgcactcatgcaggccacatatcacggcaataaagaaattgtaaagtaccttctgaaccagggggctgatgtgactctccgcgcaaagaatggttacacagcttttgatctcgtgatgttgctaaatgacccagacacagagcttgtaaggcttctcgcctccgtctgtatgcaagtcaacaaggacaagggaaggccctcacaccaaccccctctgcctcattcaaaggtgcggcagccttggagcatacctgttttacctgatgataaaggcggtcttaaatcctggtggaatcgcatgtccaaccgatttcgcaagttgaaactaatgcaaacacttcctagagggctcagctctaaccagccactgcctttcagcgatgaaccagaaccagcgctggactcaacgatgcgcgcagccccacaagataaaacaagccgctccgctctcccagacgccgcacccgtgacgaaggacaacggacctgggtccaccaggggcgagaaagaggatacactgctgacgacaatgttgcgcaatggggctcctttgacaaggttaccttctgacaaactcaaggccgttattccgcctttcctcccaccttcctctttcgagctgtggtctagcgataggagcaggaccagacataacggcaaggctgaccccatgaaaaccgcccttcctcagagagcctccagaggccacccagtaggtgggggtggcaccgacaccactcccgtcaggcctgtgaagttcccatctttgcctcgcagtcccgcttcatcagcgaattccgggaatttcaaccatagcccccacagttcagggggaagttccggggtgggcgtttcgcgacacggaggtgagttgctgaaccggtccggcggaagcatcgataacgtgttgagccagatcgctgcccaaagaaaaaaagccgcaggattgctggagcagaagccctctcatagaagttcgcccgtagggccagcacccggaagctccccgtccgagctgccggcaagccctgctgggggaagcgcaccagtggggaagaagctcgaaacctccaagaggcccccaagcgggacttcaacgacctcaaagtcaacatcacccactctaacgccctccccatctcctaagggacataccgccgagtcttctgtgagtagctctagtagccaccggcagagcaaatcctctggaggctcctcctcaggtacgatcaccgatgaggacgagttaacaggtatcctgaagaagctgtcactagaaaagtaccagccaatttttgaggaacaggaggtcgatatggaagcttttctcactctgacggacggggatctcaaggagctgggcatcaagaccgacgggtcaagacagcagatattagcagctatctccgaactgaacgcgggaaaaggtagggaaaggcagatccttcaggagacaattcataacttccactctagtttcgagtcctccgcaagcaatactcgtgcacccggtaactccccatgcgcatag

SEQ ID NO: 28420 - DNA, 1359 bp, synthetic construct
  source 1..1359: mol_type = other DNA; note = Synthetic coding sequence
atgagcgcctccctgaactacaaatctttttctaaggagcagcagacaatggacaacttagaaaagcaactgatctgccccatctgcctggagatgtttacaaaacctgtggttattctcccatgtcagcacaatctctgccgcaaatgtgctagcgacattttccaagccagtaacccttatctgcctactaggggcggtactaccatggcctccggcggacgtttccgctgccctagctgccgacacgaggttgtgttagaccggcacggtgtctacggcttgcagcgtaacctcttagtcgagaacattattgacatctataaacaggagagcacaaggccagaaaagaaaagtgatcagccaatgtgcgaggaacatgaagaggagcgtataaacatctactgtttaaattgtgaagtacccacttgttctctgtgcaaagtctttggagctcataaagactgtcaggttgctccgctgacccacgtttttcagaggcagaaatccgagctcagcgacgggatcgctatcctcgtggggtccaacgacagagtgcagggcgtgatcagtcagctggaggatacctgcaagacaatcgaggaatgctgcagaaagcagaaacaggagctctgcgagaaatttgactatctatatggaatactggaggagagaaagaacgagatgacacaagtgatcactagaacccaagaagaaaaacttgaacacgtccgagcgctgatcaagaagtacagcgaccacctcgagaacgtgtctaaactcgtggaaagcggcattcagttcatggatgaacctgaaatggcagtgttcctgcaaaatgccaaaactctgctgaagaagatttctgaggcatctaaagcgtttcagatggaaaagatagagcatggatacgagaacatgaaccacttcactgtgaaccttaacagagaagagaaaattatccgcgagatcgatttttatcgggaggacgaggatgaggaggaagaagagggaggtgagggggaaaaagaaggcgaaggggaggtggggggtgaggctgtggaggtcgaggaggtggaaaacgtccagactgaattccccggtgaggacgaaaatccggagaaagcatcagagctctcccaggtcgagttgcaagcagcgccaggcgctctccctgtgtcatccccggaaccaccgcctgccctgccacccgctgcagacgctcctgtcacccagatcggctttgaagccccacctttgcagggtcaggccgctgccccagcatccggcagcggtgctgatagcgagccggcaaggcacattttctccttttcctggctgaattctttgaatgaatag

SEQ ID NO: 28421 - DNA, 492 bp, synthetic construct
  source 1..492: mol_type = other DNA; note = Synthetic coding sequence
atgccatctattaagctgcagtcttctgatggcgaaatatttgaggtggatgttgagatcgccaaacagtctgtaacaataaaaactatgctggaggaccttggaatggacgacgagggcgacgatgaccccgtccccctaccgaatgtaaacgccgctattctgaaaaaggtgatccaatggtgtacgcatcataaggatgacccccctcctccagaagacgatgagaataaggagaagcgcacagacgacatccccgtctgggatcaagagtttctcaaggtggatcagggcactcttttcgagcttattttagccgctaactacctcgacattaagggactgctggatgtgacatgtaaaactgtcgctaacatgatcaagggcaaaactcctgaagagatccgcaaaacctttaacatcaagaatgatttcactgaggaggaagaggcccaggtgaggaaggagaaccagtggtgcgaagagaagtag
